United States Patent Application Publication US 2017/0114356 A1 - sequence listing, part 16

SEQ ID NO: 20452 - DNA, 2074 bp, Zea Mays
cgggtcacgtgagtgacgtggcacgcaagcagttcagctttcggttctcctgccggcggcgccgcgtcttttcccgcaccttcgcatcgtatgccacttcagacgccatggccgtggctccgcctctctcaacccacgtctcccgaactctaacctcaaacctgcacctctggccgcggacccacggtggcgtggctcatgcgcggacgcgggctctgatcccgacaccggctgcggcgtgcgccttccgtttcagtttccgtgttcgcgccaccgccagtggctcgaagctgccgccttatcctctacccgatgtcttcccctacattaccgccgagtgggaggccgtcgcgaagggttgggcgtgcgccgccgtcgccgtatactgcctctcccgcgcagtgcccgccgcggggcgcctgccgcgcgcgctcgccggcggcggcgggggagggggcgcggctgttgtggtggcagccaggggcggggtcgccctcgctgcgtttgcatcggcgcgtgccgccgctacatacgcgcagcaggcgtttctctgggaggcggcgctgcaggcggcggggcggctgcgggagcgcgccttcgagcgcctcctagagcgcgatctcgagttcttcgagggtaggggaggggtggctgcgggcgacatcgcgcacaggatcaccgacgaggcggacgatgtcgcggatgccttgttctccgtgctcaacgatgcagggaaggcatacaatgaatataagcaaggacagccagcattagaacgcatatttgatcttatgaggttcaaccctaaggtgactgataagccaagggcaattcatttacaaagtattaatggggacattaagttccatgatgttacatttagatatgttgatgacatgcctccagtagcagatggtgtgaatcttcatattagaccgggagaaataattgctttagttggaccttctggtggaggcaaaactactcttgccaaattactcctccgtctttatcatccacaaaaagggtatatacttctggacaaccatgatattcaggacattcaatcgcaatgcctgagaacacatatcgcttttgtttcacaggacactatgctattttctgggacaattgctgaaaacattgcttatagagaccctgtgggagatattgacatgaatagggttgagtacgctgctaagattgccaatgctgaggagttcattaagatgttgccagaagggtacaattcaaatgtgggacagagaggttctagtttgagcggtggacagaagcaaaggttatctattgccagggcaatctatcaaaattcctccatattgataatggatgaagcaacttctgctttggatatcagatctgagctgctactgaaagaagcgcttagtaatctaattgcaaaacactcagtaactgttatcatcattgctcatcgacaggaaatggtcctaatggctgacaggattatttcactagagcgcggtgaattgcgagagatgtcgaaacaggcatttttgtctcaagatggtcacttcagcttaccaaggatcaggagtccaaattagggtgtccaaactagggtgagacttggcatgggtaatggtagtttctctcgtgaagatttgttcatatatttggccatggaagaaaacgattgatagaatcacatttcttgcctgagccctgctcagaactttggcttcttggaaccttgtttcatcccaacagcaacaaatctgtcaacattatcgaaggtcgtctgccggagagaatagcaggctcctcagcggcattggctcctacctgctgcaagattctcctcaagacctcaacaggaaggtcaaagcaaggtatagggttttaccaatttttgtacacatgaaaaagcacaggttccttacatcccccgcccccgcccctgcatacatgcaggatgcagtagttgagctgtatatatgccaaaataaagttattcgttttagatttttttattgccaaactccagattggtgcgtttcagaatcgtcaggtagtaaacgtgtaactgaggtag

SEQ ID NO: 20453 - DNA, 1963 bp, Zea Mays
cgggtcacgtgagtgacgtggcacgcaagcagttcagctttcggttctcctgccggcggcgccgcgtcttttcccgcaccttcgcatcgtatgccacttcagacgccatggccgtggctccgcctctctcaacccacgtctcccgaactctaacctcaaacctgcacctctggccgcggacccacggtggcgtggctcatgcgcggacgcgggctctgatcccgacaccggctgcggcgtgcgccttccgtttcagtttccgtgttcgcgccaccgccagtggctcgaagctgccgccttatcctctacccgatgtcttcccctacattaccgccgagtgggaggccgtcgcgaagggttgggcgtgcgccgccgtcgccgtatactgcctctcccgcgcagtgcccgccgcggggcgcctgccgcgcgcgctcgccggcggcggcgggggagggggcgcggctgttgtggtggcagccaggggcggggtcgccctcgctgcgtttgcatcggcgcgtgccgccgctacatacgcgcagcaggcgtttctctgggaggcggcgctgcaggcggcggggcggctgcgggagcgcgccttcgagcgcctcctagagcgcgatctcgagttcttcgagggtaggggaggggtggctgcgggcgacatcgcgcacaggatcaccgacgaggcggacgatgtcgcggatgccttgttctccgtgctcaacgatgcagggaaggcatacaatgaatataagcaaggacagccagcattagaacgcatatttgatcttatgaggttcaaccctaaggtgactgataagccaagggcaattcatttacaaagtattaatggggacattaagttccatgatgttacatttagatatgttgatgacatgcctccagtagcagatgggtatatacttctggacaaccatgatattcaggacattcaatcgcaatgcctgagaacacatatcgcttttgtttcacaggacactatgctattttctgggacaattgctgaaaacattgcttatagagaccctgtgggagatattgacatgaatagggttgagtacgctgctaagattgccaatgctgaggagttcattaagatgttgccagaagggtacaattcaaatgtgggacagagaggttctagtttgagcggtggacagaagcaaaggttatctattgccagggcaatctatcaaaattcctccatattgataatggatgaagcaacttctgctttggatatcagatctgagctgctactgaaagaagcgcttagtaatctaattgcaaaacactcagtaactgttatcatcattgctcatcgacaggaaatggtcctaatggctgacaggattatttcactagagcgcggtgaattgcgagagatgtcgaaacaggcatttttgtctcaagatggtcacttcagcttaccaaggatcaggagtccaaattagggtgtccaaactagggtgagacttggcatgggtaatggtagtttctctcgtgaagatttgttcatatatttggccatggaagaaaacgattgatagaatcacatttcttgcctgagccctgctcagaactttggcttcttggaaccttgtttcatcccaacagcaacaaatctgtcaacattatcgaaggtcgtctgccggagagaatagcaggctcctcagcggcattggctcctacctgctgcaagattctcctcaagacctcaacaggaaggtcaaagcaaggtatagggttttaccaatttttgtacacatgaaaaagcacaggttccttacatcccccgcccccgcccctgcatacatgcaggatgcagtagttgagctgtatatatgccaaaataaagttattcgttttagatttttttattgccaaactccagattggtgcgtttcagaatcgtcaggtagtaaacgtgtaactgaggtag

SEQ ID NO: 20454 - DNA, 2862 bp, Zea Mays
cgggtcacgtgagtgacgtggcacgcaagcagttcagctttcggttctcctgccggcggcgccgcgtcttttcccgcaccttcgcatcgtatgccacttcagacgccatggccgtggctccgcctctctcaacccacgtctcccgaactctaacctcaaacctgcacctctggccgcggacccacggtggcgtggctcatgcgcggacgcgggctctgatcccgacaccggctgcggcgtgcgccttccgtttcagtttccgtgttcgcgccaccgccagtggctcgaagctgccgccttatcctctacccgatgtcttcccctacattaccgccgagtgggaggccgtcgcgaagggttgggcgtgcgccgccgtcgccgtatactgcctctcccgcgcagtgcccgccgcggggcgcctgccgcgcgcgctcgccggcggcggcgggggagggggcgcggctgttgtggtggcagccaggggcggggtcgccctcgctgcgtttgcatcggcgcgtgccgccgctacatacgcgcagcaggcgtttctctgggaggcggcgctgcaggcggcggggcggctgcgggagcgcgccttcgagcgcctcctagagcgcgatctcgagttcttcgagggtaggggaggggtggctgcgggcgacatcgcgcacaggatcaccgacgaggcggacgatgtcgcggatgccttgttctccgtgctcaacgtgaggttcctggagacttgcattcgtccttattttatctgttgccgatcgactcgcagtcgcttcagtgagtaacaaacctttgtagattagatgtgcaggttgctgtgtttgttagttttatggaatgtaggtttgctgttcgtggaaatgcctgcataactgttagtttaattgttgaattggtagtcttaaaattcaaaatttgaactttctgaatttgagcttttccttcacatcttatgctagcactagtaagcatctgtataccggttaaatttcaccaaatttgattgcactttctgatcttcaaatatgttggttacttcatcaatcatggaggcaaaaacctccaacataacgcaacacattatggctgctgtaatagttacagtccaagtgtccaactccacgccaattgtgccaatgcatggtactctgcacatatatggattctgactactaatttgacacagacgattgtgccaacaagcttgcagttgataacgatggccattcagatggtcattccatgcatgtgcttcgccatagtcaatcttggtaaaaggcttcgtcaaatatccaaggaggcacatcttagcctcgccatgctcgcatcatatctcaacgatgtacttccatctatgctgactgtgaaggcaaacaatggggaacttaaggagatcatgagattccaaaagttagctcgtgctgatctaaagaataatttgagtaagaagaaaatgaaggctctcatacctcaagcggttcgagcaacatacattgggggcctgcttgtgctctgtgctgggtcgatagttgtttcaggctcatcctttgatgctgaagagtttctgtctttcctaacagcacttgctcttgttgtggagcctattcaggatgcagggaaggcatacaatgaatataagcaaggacagccagcattagaacgcatatttgatcttatgaggttcaaccctaaggtgactgataagccaagggcaattcatttacaaagtattaatggggacattaagttccatgatgttacatttagatatgttgatgacatgcctccagtagcagatgggtatatacttctggacaaccatgatattcaggacattcaatcgcaatgcctgagaacacatatcgcttttgtttcacaggacactatgctattttctgggacaattgctgaaaacattgcttatagagaccctgtgggagatattgacatgaatagggttgagtacgctgctaagattgccaatgctgaggagttcattaagatgttgccagaagggtacaattcaaatgtgggacagagaggttctagtttgagcggtggacagaagcaaaggttatctattgccagggcaatctatcaaaattcctccatattgataatggatgaagcaacttctgctttggatatcagatctgagctgctactgaaagaagcgcttagtaatctaattgcaaaacactcagtaactgttatcatcattgctcatcgacaggaaatggtcctaatggctgacaggattatttcactagagcgcggtgaattgcgagagatgtcgaaacaggcatttttgtctcaagatggtcacttcagcttaccaaggatcaggagtccaaattagggtgtccaaactagggtgagacttggcatgggtaatggtagtttctctcgtgaagatttgttcatatatttggccatggaagaaaacgattgatagaatcacatttcttgcctgagccctgctcagaactttggcttcttggaaccttgtttcatcccaacagcaacaaatctgtcaacattatcgaaggtcgtctgccggagagaatagcaggctcctcagcggcattggctcctacctgctgcaagattctcctcaagacctcaacaggaaggtcaaagcaaggtatagggttttaccaatttttgtacacatgaaaaagcacaggttccttacatcccccgcccccgcccctgcatacatgcaggatgcagtagttgagctgtatatatgccaaaataaagttattcgttttagatttttttattgccaaactccagattggtgcgtttcagaatcgtcaggtagtaaacgtgtaactgaggtag

SEQ ID NO: 20455 - DNA, 2862 bp, Zea Mays
cgggtcacgtgagtgacgtggcacgcaagcagttcagctttcggttctcctgccggcggcgccgcgtcttttcccgcaccttcgcatcgtatgccacttcagacgccatggccgtggctccgcctctctcaacccacgtctcccgaactctaacctcaaacctgcacctctggccgcggacccacggtggcgtggctcatgcgcggacgcgggctctgatcccgacaccggctgcggcgtgcgccttccgtttcagtttccgtgttcgcgccaccgccagtggctcgaagctgccgccttatcctctacccgatgtcttcccctacattaccgccgagtgggaggccgtcgcgaagggttgggcgtgcgccgccgtcgccgtatactgcctctcccgcgcagtgcccgccgcggggcgcctgccgcgcgcgctcgccggcggcggcgggggagggggcgcggctgttgtggtggcagccaggggcggggtcgccctcgctgcgtttgcatcggcgcgtgccgccgctacatacgcgcagcaggcgtttctctgggaggcggcgctgcaggcggcggggcggctgcgggagcgcgccttcgagcgcctcctagagcgcgatctcgagttcttcgagggtaggggaggggtggctgcgggcgacatcgcgcacaggatcaccgacgaggcggacgatgtcgcggatgccttgttctccgtgctcaacgtgaggttcctggagacttgcattcgtccttattttatctgttgccgatcgactcgcagtcgcttcagtgagtaacaaacctttgtagattagatgtgcaggttgctgtgtttgttagttttatggaatgtaggtttgctgttcgtggaaatgcctgcataactgttagtttaattgttgaattggtagtcttaaaattcaaaatttgaactttctgaatttgagcttttccttcacatcttatgctagcactagtaagcatctgtataccggttaaatttcaccaaatttgattgcactttctgatcttcaaatatgttggttacttcatcaatcatggaggcaaaaacctccaacataacgcaacacattatggctgctgtaatagttacagtccaagtgtccaactccacgccaattgtgccaatgcatggtactctgcacatatatggattctgactactaatttgacacagacgattgtgccaacaagcttgcagttgataacgatggccattcagatggtcattccatgcatgtgcttcgccatagtcaatcttggtaaaaggcttcgtcaaatatccaaggaggcacatcttagcctcgccatgctcgcatcatatctcaacgatgtacttccatctatgctgactgtgaaggcaaacaatggggaacttaaggagatcatgagattccaaaagttagctcgtgctgatctaaagaataatttgagtaagaagaaaatgaaggctctcatacctcaagcggttcgagcaacatacattgggggcctgcttgtgctctgtgctgggtcgatagttgtttcaggctcatcctttgatgctgaagagtttctgtctttcctaacagcacttgctcttgttgtggagcctattcaggatgcagggaaggcatacaatgaatataagcaaggacagccagcattagaacgcatatttgatcttatgaggttcaaccctaaggtgactgataagccaagggcaattcatttacaaagtattaatggggacattaagttccatgatgttacatttagatatgttgatgacatgcctccagtagcagatggtgtgaatcttcatattagaccgggagaaataattgctttagttggaccttctggtggaggcaaaactactcttgccaaattactcctccgtctttatcatccacaaaaagggtatatacttctggacaaccatgatattcaggacattcaatcgcaatgcctgagaacacatatcgcttttgtttcacaggacactatgctattttctgggacaattgctgaaaacattgcttatagagaccctgtgggagatattgacatgaatagggttgagtacgctgctaagattgccaatgctgaggagttcattaagatgttgccagaagggtacaattcaaatgtgggacagagaggttctagtttgagcggtggacagaagcaaaggttatctattgccagggcaatctatcaaaattcctccatattgataatggatgaagcaacttctgctttggatatcagatctgagctgctactgaaagaagcgcttagtaatctaattgcaaaacactcagtaactgttatcatcattgctcatcgacaggaaatggtcctaatggctgacaggattatttcactagagcgcggtgaattgcgagagatgtcgaaacaggcatttttgtctcaagatggtcacttcagcttaccaaggatcaggagtccaaattagggtgtccaaactaggaactttggcttcttggaaccttgtttcatcccaacagcaacaaatctgtcaacattatcgaaggtcgtctgccggagagaatagcaggctcctcagcggcattggctcctacctgctgcaagattctcctcaagacctcaacaggaaggtcaaagcaaggtatagggttttaccaatttttgtacacatgaaaaagcacaggttccttacatcccccgcccccgcccctgcatacatgcaggatgcagtagttgagctgtatatatgccaaaataaagttattcgttttagatttttttattgccaaactccagattggtgcgtttcagaatcgtcaggtagtaaacgtgtaactgaggtag

SEQ ID NO: 20456 - DNA, 3134 bp, Zea Mays
cgggtcacgtgagtgacgtggcacgcaagcagttcagctttcggttctcctgccggcggcgccgcgtcttttcccgcaccttcgcatcgtatgccacttcagacgccatggccgtggctccgcctctctcaacccacgtctcccgaactctaacctcaaacctgcacctctggccgcggacccacggtggcgtggctcatgcgcggacgcgggctctgatcccgacaccggctgcggcgtgcgccttccgtttcagtttccgtgttcgcgccaccgccagtggctcgaagctgccgccttatcctctacccgatgtcttcccctacattaccgccgagtgggaggccgtcgcgaagggttgggcgtgcgccgccgtcgccgtatactgcctctcccgcgcagtgcccgccgcggggcgcctgccgcgcgcgctcgccggcggcggcgggggagggggcgcggctgttgtggtggcagccaggggcggggtcgccctcgctgcgtttgcatcggcgcgtgccgccgctacatacgcgcagcaggcgtttctctgggaggcggcgctgcaggcggcggggcggctgcgggagcgcgccttcgagcgcctcctagagcgcgatctcgagttcttcgagggtaggggaggggtggctgcgggcgacatcgcgcacaggatcaccgacgaggcggacgatgtcgcggatgccttgttctccgtgctcaacgtgaggttcctggagacttgcattcgtccttattttatctgttgccgatcgactcgcagtcgcttcagtgagtaacaaacctttgtagattagatgtgcaggttgctgtgtttgttagttttatggaatgtaggtttgctgttcgtggaaatgcctgcataactgttagtttaattgttgaattggtagtcttaaaattcaaaatttgaactttctgaatttgagcttttccttcacatcttatgctagcactagtaagcatctgtataccggttaaatttcaccaaatttgattgcactttctgatcttcaaatatgttggttacttcatcaatcatggaggcaaaaacctccaacataacgcaacacattatggctgctgtaatagttacagtccaagtgtccaactccacgccaattgtgccaatgcatggtactctgcacatatatggattctgactactaatttgacacagacgattgtgccaacaagcttgcagttgataacgatggccattcagatggtgacaatcaatcccatgctctcattgcttgcagcaacggaagccatgtccacagttcatattgttgtttcataatcacatctatttgcattgtttaatttccattgtataaacaggtcattccatgcatgtgcttcgccatagtcaatcttggtaaaaggcttcgtcaaatatccaaggaggcacatcttagcctcgccatgctcgcatcatatctcaacgatgtacttccatctatgctgactgtgaaggcaaacaatggggaacttaaggagatcatgagattccaaaagttagctcgtgctgatctaaagaataatttgagtaagaagaaaatgaaggctctcatacctcaagcggttcgagcaacatacattgggggcctgcttgtgctctgtgctgggtcgatagttgtttcaggctcatcctttgatgctgaagagtttctgtctttcctaacagcacttgctcttgttgtggagcctattcaggatgcagggaaggcatacaatgaatataagcaaggacagccagcattagaacgcatatttgatcttatgaggttcaaccctaaggtgactgataagccaagggcaattcatttacaaagtattaatggggacattaagttccatgatgttacatttagatatgttgatgacatgcctccagtagcagatggtgtgaatcttcatattagaccgggagaaataattgctttagttggaccttctggtggaggcaaaactactcttgccaaattactcctccgtctttatcatccacaaaaagggtatatacttctggacaaccatgatattcaggacattcaatcgcaatgcctgagaacacatatcgcttttgtttcacaggacactatgctattttctgggacaattgctgaaaacattgcttatagagaccctgtgggagatattgacatgaatagggttgagtacgctgctaagattgccaatgctgaggagttcattaagatgttgccagaagggtacaattcaaatgtgggacagagaggttctagtttgagcggtggacagaagcaaaggtaaaatgctcactttccagtttccagactaccttgtatcacaaggttatctattgccagggcaatctatcaaaattcctccatattgataatggatgaagcaacttctgctttggatatcagatctgagctgctactgaaagaagcgcttagtaatctaattgcaaaacactcagtaactgttatcatcattgctcatcgacaggaaatggtcctaatggctgacaggattatttcactagagcgcggtgaattgcgagagatgtcgaaacaggcatttttgtctcaagatggtcacttcagcttaccaaggatcaggagtccaaattagggtgtccaaactagggtgagacttggcatgggtaatggtagtttctctcgtgaagatttgttcatatatttggccatggaagaaaacgattgatagaatcacatttcttgcctgagccctgctcagaactttggcttcttggaaccttgtttcatcccaacagcaacaaatctgtcaacattatcgaaggtcgtctgccggagagaatagcaggctcctcagcggcattggctcctacctgctgcaagattctcctcaagacctcaacaggaaggtcaaagcaaggtatagggttttaccaatttttgtacacatgaaaaagcacaggttccttacatcccccgcccccgcccctgcatacatgcaggatgcagtagttgagctgtatatatgccaaaataaagttattcgttttagatttttttattgccaaactccagattggtgcgtttcagaatcgtcaggtagtaaacgtgtaactgaggtag

SEQ ID NO: 20457 - DNA, 3048 bp, Zea Mays
cgggtcacgtgagtgacgtggcacgcaagcagttcagctttcggttctcctgccggcggcgccgcgtcttttcccgcaccttcgcatcgtatgccacttcagacgccatggccgtggctccgcctctctcaacccacgtctcccgaactctaacctcaaacctgcacctctggccgcggacccacggtggcgtggctcatgcgcggacgcgggctctgatcccgacaccggctgcggcgtgcgccttccgtttcagtttccgtgttcgcgccaccgccagtggctcgaagctgccgccttatcctctacccgatgtcttcccctacattaccgccgagtgggaggccgtcgcgaagggttgggcgtgcgccgccgtcgccgtatactgcctctcccgcgcagtgcccgccgcggggcgcctgccgcgcgcgctcgccggcggcggcgggggagggggcgcggctgttgtggtggcagccaggggcggggtcgccctcgctgcgtttgcatcggcgcgtgccgccgctacatacgcgcagcaggcgtttctctgggaggcggcgctgcaggcggcggggcggctgcgggagcgcgccttcgagcgcctcctagagcgcgatctcgagttcttcgagggtaggggaggggtggctgcgggcgacatcgcgcacaggatcaccgacgaggcggacgatgtcgcggatgccttgttctccgtgctcaacgtgaggttcctggagacttgcattcgtccttattttatctgttgccgatcgactcgcagtcgcttcagtgagtaacaaacctttgtagattagatgtgcaggttgctgtgtttgttagttttatggaatgtaggtttgctgttcgtggaaatgcctgcataactgttagtttaattgttgaattggtagtcttaaaattcaaaatttgaactttctgaatttgagcttttccttcacatcttatgctagcactagtaagcatctgtataccggttaaatttcaccaaatttgattgcactttctgatcttcaaatatgttggttacttcatcaatcatggaggcaaaaacctccaacataacgcaacacattatggctgctgtaatagttacagtccaagtgtccaactccacgccaattgtgccaatgcatggtactctgcacatatatggattctgactactaatttgacacagacgattgtgccaacaagcttgcagttgataacgatggccattcagatggtgacaatcaatcccatgctctcattgcttgcagcaacggaagccatgtccacagttcatattgttgtttcataatcacatctatttgcattgtttaatttccattgtataaacaggtcattccatgcatgtgcttcgccatagtcaatcttggtaaaaggcttcgtcaaatatccaaggaggcacatcttagcctcgccatgctcgcatcatatctcaacgatgtacttccatctatgctgactgtgaaggcaaacaatggggaacttaaggagatcatgagattccaaaagttagctcgtgctgatctaaagaataatttgagtaagaagaaaatgaaggctctcatacctcaagcggttcgagcaacatacattgggggcctgcttgtgctctgtgctgggtcgatagttgtttcaggctcatcctttgatgctgaagagtttctgtctttcctaacagcacttgctcttgttgtggagcctattcaggatgcagggaaggcatacaatgaatataagcaaggacagccagcattagaacgcatatttgatcttatgaggttcaaccctaaggtgactgataagccaagggcaattcatttacaaagtattaatggggacattaagttccatgatgttacatttagatatgttgatgacatgcctccagtagcagatggtgtgaatcttcatattagaccgggagaaataattgctttagttggaccttctggtggaggcaaaactactcttgccaaattactcctccgtctttatcatccacaaaaagggtatatacttctggacaaccatgatattcaggacattcaatcgcaatgcctgagaacacatatcgcttttgtttcacaggacactagaccctgtgggagatattgacatgaatagggttgagtacgctgctaagattgccaatgctgaggagttcattaagatgttgccagaagggtacaattcaaatgtgggacagagaggttctagtttgagcggtggacagaagcaaaggttatctattgccagggcaatctatcaaaattcctccatattgataatggatgaagcaacttctgctttggatatcagatctgagctgctactgaaagaagcgcttagtaatctaattgcaaaacactcagtaactgttatcatcattgctcatcgacaggaaatggtcctaatggctgacaggattatttcactagagcgcggtgaattgcgagagatgtcgaaacaggcatttttgtctcaagatggtcacttcagcttaccaaggatcaggagtccaaattagggtgtccaaactagggtgagacttggcatgggtaatggtagtttctctcgtgaagatttgttcatatatttggccatggaagaaaacgattgatagaatcacatttcttgcctgagccctgctcagaactttggcttcttggaaccttgtttcatcccaacagcaacaaatctgtcaacattatcgaaggtcgtctgccggagagaatagcaggctcctcagcggcattggctcctacctgctgcaagattctcctcaagacctcaacaggaaggtcaaagcaaggtatagggttttaccaatttttgtacacatgaaaaagcacaggttccttacatcccccgcccccgcccctgcatacatgcaggatgcagtagttgagctgtatatatgccaaaataaagttattcgttttagatttttttattgccaaactccagattggtgcgtttcagaatcgtcaggtagtaaacgtgtaactgaggtag

SEQ ID NO: 20458 - DNA, 3082 bp, Zea Mays
cgggtcacgtgagtgacgtggcacgcaagcagttcagctttcggttctcctgccggcggcgccgcgtcttttcccgcaccttcgcatcgtatgccacttcagacgccatggccgtggctccgcctctctcaacccacgtctcccgaactctaacctcaaacctgcacctctggccgcggacccacggtggcgtggctcatgcgcggacgcgggctctgatcccgacaccggctgcggcgtgcgccttccgtttcagtttccgtgttcgcgccaccgccagtggctcgaagctgccgccttatcctctacccgatgtcttcccctacattaccgccgagtgggaggccgtcgcgaagggttgggcgtgcgccgccgtcgccgtatactgcctctcccgcgcagtgcccgccgcggggcgcctgccgcgcgcgctcgccggcggcggcgggggagggggcgcggctgttgtggtggcagccaggggcggggtcgccctcgctgcgtttgcatcggcgcgtgccgccgctacatacgcgcagcaggcgtttctctgggaggcggcgctgcaggcggcggggcggctgcgggagcgcgccttcgagcgcctcctagagcgcgatctcgagttcttcgagggtaggggaggggtggctgcgggcgacatcgcgcacaggatcaccgacgaggcggacgatgtcgcggatgccttgttctccgtgctcaacgtgaggttcctggagacttgcattcgtccttattttatctgttgccgatcgactcgcagtcgcttcagtgagtaacaaacctttgtagattagatgtgcaggttgctgtgtttgttagttttatggaatgtaggtttgctgttcgtggaaatgcctgcataactgttagtttaattgttgaattggtagtcttaaaattcaaaatttgaactttctgaatttgagcttttccttcacatcttatgctagcactagtaagcatctgtataccggttaaatttcaccaaatttgattgcactttctgatcttcaaatatgttggttacttcatcaatcatggaggcaaaaacctccaacataacgcaacacattatggctgctgtaatagttacagtccaagtgtccaactccacgccaattgtgccaatgcatggtactctgcacatatatggattctgactactaatttgacacagacgattgtgccaacaagcttgcagttgataacgatggccattcagatggtgacaatcaatcccatgctctcattgcttgcagcaacggaagccatgtccacagttcatattgttgtttcataatcacatctatttgcattgtttaatttccattgtataaacaggtcattccatgcatgtgcttcgccatagtcaatcttggtaaaaggcttcgtcaaatatccaaggaggcacatcttagcctcgccatgctcgcatcatatctcaacgatgtacttccatctatgctgactgtgaaggcaaacaatggggaacttaaggagatcatgagattccaaaagttagctcgtgctgatctaaagaataatttgagtaagaagaaaatgaaggctctcatacctcaagcggttcgagcaacatacattgggggcctgcttgtgctctgtgctgggtcgatagttgtttcaggctcatcctttgatgctgaagagtttctgtctttcctaacagcacttgctcttgttgtggagcctattcagggaaggcatacaatgaatataagcaaggacagccagcattagaacgcatatttgatcttatgaggttcaaccctaaggtgactgataagccaagggcaattcatttacaaagtattaatggggacattaagttccatgatgttacatttagatatgttgatgacatgcctccagtagcagatggtgtgaatcttcatattagaccgggagaaataattgctttagttggaccttctggtggaggcaaaactactcttgccaaattactcctccgtctttatcatccacaaaaagggtatatacttctggacaaccatgatattcaggacattcaatcgcaatgcctgagaacacatatcgcttttgtttcacaggacactatgctattttctgggacaattgctgaaaacattgcttatagagaccctgtgggagatattgacatgaatagggttgagtacgctgctaagattgccaatgctgaggagttcattaagatgttgccagaagggtacaattcaaatgtgggacagagaggttctagtttgagcggtggacagaagcaaaggttatctattgccagggcaatctatcaaaattcctccatattgataatggatgaagcaacttctgctttggatatcagatctgagctgctactgaaagaagcgcttagtaatctaattgcaaaacactcagtaactgttatcatcattgctcatcgacaggaaatggtcctaatggctgacaggattatttcactagagcgcggtgaattgcgagagatgtcgaaacaggcatttttgtctcaagatggtcacttcagcttaccaaggatcaggagtccaaattagggtgtccaaactagggtgagacttggcatgggtaatggtagtttctctcgtgaagatttgttcatatatttggccatggaagaaaacgattgatagaatcacatttcttgcctgagccctgctcagaactttggcttcttggaaccttgtttcatcccaacagcaacaaatctgtcaacattatcgaaggtcgtctgccggagagaatagcaggctcctcagcggcattggctcctacctgctgcaagattctcctcaagacctcaacaggaaggtcaaagcaaggtatagggttttaccaatttttgtacacatgaaaaagcacaggttccttacatcccccgcccccgcccctgcatacatgcaggatgcagtagttgagctgtatatatgccaaaataaagttattcgttttagatttttttattgccaaactccagattggtgcgtttcagaatcgtcaggtagtaaacgtgtaactgaggtag

SEQ ID NO: 20459 - DNA, 2442 bp, Zea Mays
cgggtcacgtgagtgacgtggcacgcaagcagttcagctttcggttctcctgccggcggcgccgcgtcttttcccgcaccttcgcatcgtatgccacttcagacgccatggccgtggctccgcctctctcaacccacgtctcccgaactctaacctcaaacctgcacctctggccgcggacccacggtggcgtggctcatgcgcggacgcgggctctgatcccgacaccggctgcggcgtgcgccttccgtttcagtttccgtgttcgcgccaccgccagtggctcgaagctgccgccttatcctctacccgatgtcttcccctacattaccgccgagtgggaggccgtcgcgaagggttgggcgtgcgccgccgtcgccgtatactgcctctcccgcgcagtgcccgccgcggggcgcctgccgcgcgcgctcgccggcggcggcgggggagggggcgcggctgttgtggtggcagccaggggcggggtcgccctcgctgcgtttgcatcggcgcgtgccgccgctacatacgcgcagcaggcgtttctctgggaggcggcgctgcaggcggcggggcggctgcgggagcgcgccttcgagcgcctcctagagcgcgatctcgagttcttcgagggtaggggaggggtggctgcgggcgacatcgcgcacaggatcaccgacgaggcggacgatgtcgcggatgccttgttctccgtgctcaacgtcattccatgcatgtgcttcgccatagtcaatcttggtaaaaggcttcgtcaaatatccaaggaggcacatcttagcctcgccatgctcgcatcatatctcaacgatgtacttccatctatgctgactgtgaaggcaaacaatggggaacttaaggagatcatgagattccaaaagttagctcgtgctgatctaaagaataatttgagtaagaagaaaatgaaggctctcatacctcaagcggttcgagcaacatacattgggggcctgcttgtgctctgtgctgggtcgatagttgtttcaggctcatcctttgatgctgaagagtttctgtctttcctaacagcacttgctcttgttgtggagcctattcagggaaggcatacaatgaatataagcaaggacagccagcattagaacgcatatttgatcttatgaggttcaaccctaaggtgactgataagccaagggcaattcatttacaaagtattaatggggacattaagttccatgatgttacatttagatatgttgatgacatgcctccagtagcagatggtgtgaatcttcatattagaccgggagaaataattgctttagttggaccttctggtggaggcaaaactactcttgccaaattactcctccgtctttatcatccacaaaaagggtatatacttctggacaaccatgatattcaggacattcaatcgcaatgcctgagaacacatatcgcttttgtttcacaggacactatgctattttctgggacaattgctgaaaacattgcttatagagaccctgtgggagatattgacatgaatagggttgagtacgctgctaagattgccaatgctgaggagttcattaagatgttgccagaagggtacaattcaaatgtgggacagagaggttctagtttgagcggtggacagaagcaaaggttatctattgccagggcaatctatcaaaattcctccatattgataatggatgaagcaacttctgctttggatatcagatctgagctgctactgaaagaagcgcttagtaatctaattgcaaaacactcagtaactgttatcatcattgctcatcgacaggaaatggtcctaatggctgacaggattatttcactagagcgcggtgaattgcgagagatgtcgaaacaggcatttttgtctcaagatggtcacttcagcttaccaaggatcaggagtccaaattagggtgtccaaactagggtgagacttggcatgggtaatggtagtttctctcgtgaagatttgttcatatatttggccatggaagaaaacgattgatagaatcacatttcttgcctgagccctgctcagaactttggcttcttggaaccttgtttcatcccaacagcaacaaatctgtcaacattatcgaaggtcgtctgccggagagaatagcaggctcctcagcggcattggctcctacctgctgcaagattctcctcaagacctcaacaggaaggtcaaagcaaggtatagggttttaccaatttttgtacacatgaaaaagcacaggttccttacatcccccgcccccgcccctgcatacatgcaggatgcagtagttgagctgtatatatgccaaaataaagttattcgttttagatttttttattgccaaactccagattggtgcgtttcagaatcgtcaggtagtaaacgtgtaactgaggtag

SEQ ID NO: 20460 - DNA, 2386 bp, Zea Mays
cgggtcacgtgagtgacgtggcacgcaagcagttcagctttcggttctcctgccggcggcgccgcgtcttttcccgcaccttcgcatcgtatgccacttcagacgccatggccgtggctccgcctctctcaacccacgtctcccgaactctaacctcaaacctgcacctctggccgcggacccacggtggcgtggctcatgcgcggacgcgggctctgatcccgacaccggctgcggcgtgcgccttccgtttcagtttccgtgttcgcgccaccgccagtggctcgaagctgccgccttatcctctacccgatgtcttcccctacattaccgccgagtgggaggccgtcgcgaagggttgggcgtgcgccgccgtcgccgtatactgcctctcccgcgcagtgcccgccgcggggcgcctgccgcgcgcgctcgccggcggcggcgggggagggggcgcggctgttgtggtggcagccaggggcggggtcgccctcgctgcgtttgcatcggcgcgtgccgccgctacatacgcgcagcaggcgtttctctgggaggcggcgctgcaggcggcggggcggctgcgggagcgcgccttcgagcgcctcctagagcgcgatctcgagttcttcgagggtaggggaggggtggctgcgggcgacatcgcgcacaggatcaccgacgaggcggacgatgtcgcggatgccttgttctccgtgctcaacacgattgtgccaacaagcttgcagttgataacgatggccattcagatggtcattccatgcatgtgcttcgccatagtcaatcttggtaaaaggcttcgtcaaatatccaaggaggcacatcttagcctcgccatgctcgcatcatatctcaacgatgtacttccatctatgctgactgtgaaggcaaacaatggggaacttaaggagatcatgagattccaaaagttagctcgtgctgatctaaagaataatttgagtaagaagaaaatgaaggctctcatacctcaagcggttcgagcaacatacattgggggcctgcttgtgctctgtgctgggtcgatagttgtttcaggctcatcctttgatgctgaagagtttctgtctttcctaacagcacttgctcttgttgtggagcctattcaggatgcagggaaggcatacaatgaatataagcaaggacagccagcattagaacgcatatttgatcttatgaggttcaaccctaaggtgactgataagccaagggcaattcatttacaaagtattaatggggacattaagttccatgatgttacatttagatatgttgatgacatgcctccagtagcagatgggtatatacttctggacaaccatgatattcaggacattcaatcgcaatgcctgagaacacatatcgcttttgtttcacaggacactatgctattttctgggacaattgctgaaaacattgcttatagagaccctgtgggagatattgacatgaatagggttgagtacgctgctaagattgccaatgctgaggagttcattaagatgttgccagaagggtacaattcaaatgtgggacagagaggttctagtttgagcggtggacagaagcaaaggttatctattgccagggcaatctatcaaaattcctccatattgataatggatgaagcaacttctgctttggatatcagatctgagctgctactgaaagaagcgcttagtaatctaattgcaaaacactcagtaactgttatcatcattgctcatcgacaggaaatggtcctaatggctgacaggattatttcactagagcgcggtgaattgcgagagatgtcgaaacaggcatttttgtctcaagatggtcacttcagcttaccaaggatcaggagtccaaattagggtgtccaaactagggtgagacttggcatgggtaatggtagtttctctcgtgaagatttgttcatatatttggccatggaagaaaacgattgatagaatcacatttcttgcctgagccctgctcagaactttggcttcttggaaccttgtttcatcccaacagcaacaaatctgtcaacattatcgaaggtcgtctgccggagagaatagcaggctcctcagcggcattggctcctacctgctgcaagattctcctcaagacctcaacaggaaggtcaaagcaaggtatagggttttaccaatttttgtacacatgaaaaagcacaggttccttacatcccccgcccccgcccctgcatacatgcaggatgcagtagttgagctgtatatatgccaaaataaagttattcgttttagatttttttattgccaaactccagattggtgcgtttcagaatcgtcaggtagtaaacgtgtaactgaggtag

SEQ ID NO: 20461 - DNA, 2386 bp, Zea Mays
cgggtcacgtgagtgacgtggcacgcaagcagttcagctttcggttctcctgccggcggcgccgcgtcttttcccgcaccttcgcatcgtatgccacttcagacgccatggccgtggctccgcctctctcaacccacgtctcccgaactctaacctcaaacctgcacctctggccgcggacccacggtggcgtggctcatgcgcggacgcgggctctgatcccgacaccggctgcggcgtgcgccttccgtttcagtttccgtgttcgcgccaccgccagtggctcgaagctgccgccttatcctctacccgatgtcttcccctacattaccgccgagtgggaggccgtcgcgaagggttgggcgtgcgccgccgtcgccgtatactgcctctcccgcgcagtgcccgccgcggggcgcctgccgcgcgcgctcgccggcggcggcgggggagggggcgcggctgttgtggtggcagccaggggcggggtcgccctcgctgcgtttgcatcggcgcgtgccgccgctacatacgcgcagcaggcgtttctctgggaggcggcgctgcaggcggcggggcggctgcgggagcgcgccttcgagcgcctcctagagcgcgatctcgagttcttcgagggtaggggaggggtggctgcgggcgacatcgcgcacaggatcaccgacgaggcggacgatgtcgcggatgccttgttctccgtgctcaacgtacttccatctatgctgactgtgaaggcaaacaatggggaacttaaggagatcatgagattccaaaagttagctcgtgctgatctaaagaataatttgagtaagaagaaaatgaaggctctcatacctcaagcggttcgagcaacatacattgggggcctgcttgtgctctgtgctgggtcgatagttgtttcaggctcatcctttgatgctgaagagtttctgtctttcctaacagcacttgctcttgttgtggagcctattcaggatgcagggaaggcatacaatgaatataagcaaggacagccagcattagaacgcatatttgatcttatgaggttcaaccctaaggtgactgataagccaagggcaattcatttacaaagtattaatggggacattaagttccatgatgttacatttagatatgttgatgacatgcctccagtagcagatggtgtgaatcttcatattagaccgggagaaataattgctttagttggaccttctggtggaggcaaaactactcttgccaaattactcctccgtctttatcatccacaaaaagggtatatacttctggacaaccatgatattcaggacattcaatcgcaatgcctgagaacacatatcgcttttgtttcacaggacactatgctattttctgggacaattgctgaaaacattgcttatagagaccctgtgggagatattgacatgaatagggttgagtacgctgctaagattgccaatgctgaggagttcattaagatgttgccagaagggtacaattcaaatgtgggacagagaggttctagtttgagcggtggacagaagcaaaggtaaaatgctcactttccagtttccagactaccttgtatcacaaggttatctattgccagggcaatctatcaaaattcctccatattgataatggatgaagcaacttctgctttggatatcagatctgagctgctactgaaagaagcgcttagtaatctaattgcaaaacactcagtaactgttatcatcattgctcatcgacaggaaatggtcctaatggctgacaggattatttcactagagcgcggtgaattgcgagagatgtcgaaacaggcatttttgtctcaagatggtcacttcagcttaccaaggatcaggagtccaaattagggtgtccaaactagggtgagacttggcatgggtaatggtagtttctctcgtgaagatttgttcatatatttggccatggaagaaaacgattgatagaatcacatttcttgcctgagccctgctcagaactttggcttcttggaaccttgtttcatcccaacagcaacaaatctgtcaacattatcgaaggtcgtctgccggagagaatagcaggctcctcagcggcattggctcctacctgctgcaagattctcctcaagacctcaacaggaaggtcaaagcaaggtatagggttttaccaatttttgtacacatgaaaaagcacaggttccttacatcccccgcccccgcccctgcatacatgcaggatgcagtagttgagctgtatatatgccaaaataaagttattcgttttagatttttttattgccaaactccagattggtgcgtttcagaatcgtcaggtagtaaacgtgtaactgaggtag

SEQ ID NO: 20462 - DNA, 2408 bp, Zea Mays
cgggtcacgtgagtgacgtggcacgcaagcagttcagctttcggttctcctgccggcggcgccgcgtcttttcccgcaccttcgcatcgtatgccacttcagacgccatggccgtggctccgcctctctcaacccacgtctcccgaactctaacctcaaacctgcacctctggccgcggacccacggtggcgtggctcatgcgcggacgcgggctctgatcccgacaccggctgcggcgtgcgccttccgtttcagtttccgtgttcgcgccaccgccagtggctcgaagctgccgccttatcctctacccgatgtcttcccctacattaccgccgagtgggaggccgtcgcgaagggttgggcgtgcgccgccgtcgccgtatactgcctctcccgcgcagtgcccgccgcggggcgcctgccgcgcgcgctcgccggcggcggcgggggagggggcgcggctgttgtggtggcagccaggggcggggtcgccctcgctgcgtttgcatcggcgcgtgccgccgctacatacgcgcagcaggcgtttctctgggaggcggcgctgcaggcggcggggcggctgcgggagcgcgccttcgagcgcctcctagagcgcgatctcgagttcttcgagggtaggggaggggtggctgcgggcgacatcgcgcacaggatcaccgacgaggcggacgatgtcgcggatgccttgttctccgtgctcaacgtcattccatgcatgtgcttcgccatagtcaatcttggtaaaaggcttcgtcaaatatccaaggaggcacatcttagcctcgccatgctcgcatcatatctcaacgatgtacttccatctatgctgactgtgaaggcaaacaatggggaacttaaggagatcatgagattccaaaagttagctcgtgctgatctaaagaataatttgagtaagaagaaaatgaaggctctcatacctcaagcggttcgagcaacatacattgggggcctgcttgtgctctgtgctgggtcgatagttgtttcaggctcatcctttgatgctgaagagtttctgtctttcctaacagcacttgctcttgttgtggagcctattcaggatgcagggaaggcatacaatgaatataagcaaggacagccagcattagaacgcatatttgatcttatgaggttcaaccctaaggtgactgataagccaagggcaattcatttacaaagtattaatggggacattaagttccatgatgttacatttagatatgttgatgacatgcctccagtagcagatggtgtgaatcttcatattagaccgggagaaataattgctttagttggaccttctggtggaggcaaaactactcttgccaaattactcctccgtctttatcatccacaaaaagggtatatacttctggacaaccatgatattcaggacattcaatcgcaatgcctgagaacacatatcgcttttgtttcacaggacactagaccctgtgggagatattgacatgaatagggttgagtacgctgctaagattgccaatgctgaggagttcattaagatgttgccagaagggtacaattcaaatgtgggacagagaggttctagtttgagcggtggacagaagcaaaggttatctattgccagggcaatctatcaaaattcctccatattgataatggatgaagcaacttctgctttggatatcagatctgagctgctactgaaagaagcgcttagtaatctaattgcaaaacactcagtaactgttatcatcattgctcatcgacaggaaatggtcctaatggctgacaggattatttcactagagcgcggtgaattgcgagagatgtcgaaacaggcatttttgtctcaagatggtcacttcagcttaccaaggatcaggagtccaaattagggtgtccaaactagggtgagacttggcatgggtaatggtagtttctctcgtgaagatttgttcatatatttggccatggaagaaaacgattgatagaatcacatttcttgcctgagccctgctcagaactttggcttcttggaaccttgtttcatcccaacagcaacaaatctgtcaacattatcgaaggtcgtctgccggagagaatagcaggctcctcagcggcattggctcctacctgctgcaagattctcctcaagacctcaacaggaaggtcaaagcaaggtatagggttttaccaatttttgtacacatgaaaaagcacaggttccttacatcccccgcccccgcccctgcatacatgcaggatgcagtagttgagctgtatatatgccaaaataaagttattcgttttagatttttttattgccaaactccagattggtgcgtttcagaatcgtcaggtagtaaacgtgtaactgaggtag

SEQ ID NO: 20463 - DNA, 1348 bp, Zea Mays
gcctcattcaccctacgggatcacaccagatcgtcaaccgccctcatcccctctctcctcacgccaatccaaaccctagccatcgccgccatcgccgagtaccaggcctccggggaacgcctcatcggcctgcatgtcgatccacaccgccctgctctgtgcgtcaccctccccacggaggcgaaggcgccctgcgccggagatcgcgggatggttccacgcggctcctaggctaccagctggccatacggatcttgccaagatcgcttcctcactcctcttccctgaaggcgacaacgactgtggaggaggcagcgggggtcagcgaagaggtggtcgcgttcacgcggggcgcagcctcgcggcccgagttatgtctcatcttcccccctccccgacgacgcggactcccatggtttgtggcttcgtgattcatcatattggaacccctcgccgccttcccagccagcgccagcacccccacccagcgaccccgccgtcgccggtgaccagccccaaccccatcacaaggccggcgacaaggaagcggatgttgccaccgccgaaactgatgggtacaaggcggggtcgtcctcatcgcacctgtctcaactgctccgggagttatctcctatattgcagttatccagaaccgcgtcgcccctccattcatccttgacaacgctgcctgtgttgctttacgtgttcagggcttcaggtgccaccagtgtgggcgcgacccatcatgagtcgatgctggcgagccagccatagcgcgacatctgatgcttctgcttccttacatgaacatgcatcaataagtcagccatctagccctacttactgtaaccagcatgcatgatccacctctgtaatttttatttcctaaatatgtgtttttatgctaatttgaatacgctattacgcccaattactagatcgcgcgtatgctccgctttgtaaacacgtagaccaccaatctgatcttctaactcaagtttgcattcagtttagactttaggttatgttagtcataacaaacttgaaaagacatattaacaaggaaagatcatcttaacagttcatgttacatttgcagatatggacctcggtggttttctccacattaggaaagctggaagagccttttcaactcagtttttttgctaacagtggtgttatggtgaaacagagttttgtgtgtatgtaccaacagctaaaatgtaaacacgacattatcatagttgagtataggaataattatctcttatatcttattgcaaaatctgactgtagatggttagcttgcattttacgctacaattacctcagatcacttgttgtatct

SEQ ID NO: 20464 - DNA, 1174 bp, Zea Mays
ctcattcaccctacgggatcacaccagatcgtcaaccgccctcatcccctctctcctcacgccaatccaaaccctagccatcgccgccatcgccgagtaccaggcctccggggaacgcctcatcggcctgcatgtcgatccacaccgccctgctctgtgcgtcaccctccccacggaggcgaaggcgccctgcgccggagatcgcgggatggttccacgcggctcctaggctaccagctggccatacggatcttgccaagatcgcttcctcactcctcttccctgaaggcgacaacgactgtggaggaggcagcgggggtcagcgaagaggtggtcgcgttcacgcggggcgcagcctcgcggcccgagttatgtctcatcttcccccctccccgacgacgcggactcccatggtttgtggcttcgtgattcatcatattggaacccctcgccgccttcccagccagcgccagcacccccacccagcgaccccgccgtcgccggtgaccagccccaaccccatcacaaggccggcgacaaggaagcggatgttgccaccgccgaaactgatgggtacaaggcggggtcgtcctcatcgcacctgtctcaactgctccgggaggtggcgttaacacattgtgttgatgaacctaaagacgtacggagtgctcgaaagggtgttgtaaacatgttctgagatgtggctatgataatctaaagttatctcctatattgcagttatccagaaccgcgtcgcccctccattcatccttgacaacgctgcctgtgttgctttacgtgttcagggcttcagcaatccaggtgccaccagtgtgggcgcgacccatcatgagtcgatgctggcgagccagccatagcgcgacatctgatgcttctgcttccttacatgaacatgcatcaataaatatggacctcggtggttttctccacattaggaaagctggaagagccttttcaactcagtttttttgctaacagtggtgttatggtgaaacagagttttgtgtgtatgtaccaacagctaaaatgtaaacacgacattatcatagttgagtataggaataattatctcttatatcttattgcaaaatctgactgtagatggttagcttgcattttacgctacaattacctcagatcacttgttgtatct

SEQ ID NO: 20465 - DNA, 1544 bp, Zea Mays
ctcattcaccctacgggatcacaccagatcgtcaaccgccctcatcccctctctcctcacgccaatccaaaccctagccatcgccgccatcgccgagtaccaggcctccggggaacgcctcatcggcctgcatgtcgatccacaccgccctgctctgtgcgtcaccctccccacggaggcgaaggcgccctgcgccggagatcgcgggatggttccacgcggctcctaggctaccagctggccatacggatcttgccaagatcgcttcctcactcctcttccctgaaggcgacaacgactgtggaggaggcagcgggggtcagcgaagaggtggtcgcgttcacgcggggcgcagcctcgcggcccgagttatgtctcatcttcccccctccccgacgacgcggactcccatggtttgtggcttcgtgattcatcatattggaacccctcgccgccttcccagccagcgccagcacccccacccagcgaccccgccgtcgccggtgaccagccccaaccccatcacaaggccggcgacaaggaagcggatgttgccaccgccgaaactgatgggtacaaggcggggtcgtcctcatcgcacctgtctcaactgctccgggaggtaggcatcgacgactcctggctgcttgtgctgctgttacttgcaggcaggctctgaatgttgccaataggctctgaatgctgctgctacatagccaagcttgtcagcattgcgacccttggtggatgaatagggtctgcaataggtgaatgttcttgtttttcatcttcagatgatgcatgttccattggacgtatcagtatagttgcaaccaaggatttgttcattttcttttccccttttgactgtgtcagggaaattggaattaagggcttcagacattttttaagtgcattgtactttttttcatggcctactctttgtgaattatcatgtcaatcatgggcattggtaatatcttgcccgtcaggtggcgttaacacattgtgttgatgaacctaaagacgtacggagtgctcgaaagggtgttgtaaacatgttctgagatgtggctatgataatctaaagttatctcctatattgcagttatccagaaccgcgtcgcccctccattcatccttgacaacgctgcctgtgttgctttacgtgttcagggcttcagcaatccaggtgccaccagtgtgggcgcgacccatcatgagtcgatgctggcgagccagccatagcgcgacatctgatgcttctgcttccttacatgaacatgcatcaataaatatggacctcggtggttttctccacattaggaaagctggaagagccttttcaactcagtttttttgctaacagtggtgttatggtgaaacagagttttgtgtgtatgtaccaacagctaaaatgtaaacacgacattatcatagttgagtataggaataattatctcttatatcttattgcaaaatctgactgtagatggttagcttgcattttacgctacaattacctcagatcacttgttgtatct

SEQ ID NO: 20466 - DNA, 923 bp, Zea Mays
tgtcacaggtaccgtcgacctatttgatatatcgctaaaatctgaattcacaaatatctgcgaaattctttaaagaaataaaaaaagaatcttcttctccatccctataccctatctaccaccgccctctacccctaatttttctccagccgccgcgctcctgatccttatctctgcgcgcgctgcatcggcgcccgccgggaggcggatcccgcccgcctcgtccatgttgtgggtccgcaatatccgccgcttcgtcgacacgggcgccggcctcggatccgaggccatcatggctgttgattttggtggagattcacttgggaagaaaatggtgatttctgaagagaactggagactaaaaggatattgcttgagattttcaaggagcggcagcggaagagtgccgaggctggttccatcccaagtttttacaagaaacctgaagaaggatccattagctctagagttcaaaggttggccaagtacaggtttctaaagaaacaatcagagcttctgctgaatgctgatgatcttgatgccatgtgggtttgtctcagagaaaattgtgttattgatgatgctactggtgctgaaaagatgaattatgaagatttctgccatatcgccacagtctgcactgagtagattggtcagaaatgcaaacgatttttcagcccttcaaacttcatgaagtctgcacggagcacttgcacagattgtttggctaattacaagattatctcagtgttttggtttgaatttagagtatacttatgtatgaaatattgattggtactcatttatattatattaattatattattattaaatatatgtatgtgtatttctctttcaaattattataatgtggtatctcaaatgaatataaattgaagaatatatcgttatttaagtcaatt

SEQ ID NO: 20467 - DNA, 1129 bp, Zea Mays
tgtcacaggtaccgtcgacctatttgatatatcgctaaaatctgaattcacaaatatctgcgaaattctttaaagaaataaaaaaagaatcttcttctccatccctataccctatctaccaccgccctctacccctaatttttctccagccgccgcgctcctgatccttatctctgcgcgcgctgcatcggcgcccgccgggaggcggatcccgcccgcctcgtccatgttgtgggtccgcaatatccgccgcttcgtcgacacgggcgccggcctcggatccgaggccatcatgggtcagtgcctctcgcctctgttcctcccttagcccccaacctccgctctaggctcggtcggagttgcacgctttggattagggtttacgtgcgccccagtttggaatgcgtgcggtaggaggatgagatctgtgcaccatagggtgtatggtgatgtaatgcagtcctactacgggtacctgaaaaagttggatgctgatttgcagctgttgattttggtggagattcacttgggaagaaaatggtgatttctgaagagaactggagactaaaaggatattgcttgagattttcaaggagcggcagcggaagagtgccgaggctggttccatcccaagtttttacaagaaacctgaagaaggatccattagctctagagttcaaaggttggccaagtacaggtttctaaagaaacaatcagagcttctgctgaatgctgatgatcttgatgccatgtgggtttgtctcagagaaaattgtgttattgatgatgctactggtgctgaaaagatgaattatgaagatttctgccatatcgccacagtctgcactgagtagattggtcagaaatgcaaacgatttttcagcccttcaaacttcatgaagtctgcacggagcacttgcacagattgtttggctaattacaagattatctcagtgttttggtttgaatttagagtatacttatgtatgaaatattgattggtactcatttatattatattaattatattattattaaatatatgtatgtgtatttctctttcaaattattataatgtggtatctcaaatgaatataaattgaagaatatatcgttatttaagtcaatt

SEQ ID NO: 20468 - DNA, 725 bp, Zea Mays
cagggagtttgcagaggagaccgacgcaaagagccggccatggagggagatccgagcgagtagaaatccgggcgccgagcagaggaagaacgatctgcgtaggggaggaagaagctgcacagcatggagactcagagggctggggcgagttcgtcaaggagcagaggggctggggcaccatggggaagaacctcggcgcgcagagctccacggcgagccaggcgagcagagggaaccagcagcgggcgagacctgggacagggaggaggaagcggctgggatgggcgcgtagagcagcagggcaaggccgcggtcaggcgagatccgaacagagaagctccggccaggggcgagcgatcggccggcgatggagcaggcggccatgggaagggcagaggaagcgccgacagaggagggagatgaagacgccagcagcaaaaaatcagaggagggagaggatagggatggcacgccgtcaggaacaaaaatcaggaagcagatgatttgctgctgcgcggggaagagccatttggctgggaagaagaaggagctggacgacttcagcagattttcctctgcagcggctggagataaccacggctggaatttatccattgctagaaagcggcgcagggatttgttcacgagcttgagcggcatcaaaaaaaatcccacccgaggataaggaagaagaggatttgagcggcacttgatccttgcttttg

SEQ ID NO: 20469 - DNA, 1660 bp, Zea Mays
ggtcgatggcgtggatcgaaaccgcccgggcgccttggtgtcatccaaccaacgccgagctccatctgcaacaaattcgagtggccacgcctcctctctcggtcagcagacccggtcgtgcagatcgccaggaactgtgcccccatcggtgagcagtcaccgacttcatctccaacgactccggcgaagacaggcggctccagagcgcgcgtcacggagatctccatcatcaccgtgtccagcagcggggtcccatgcctcacgtttgggacatggaatgcatcgttcctcttggaggtgccactcggcgtcactgtctcgctcttcgatgagggccacagtgggggtcgcaccgttgatagcggtgtcgtgatcgaggagcgcttgaatcttgtcatacacgcccgctagggcgaacctgaatcccgtcgtgtttgaagggtaccagatgcaaggacatccgcttcaatgggttctgctgcatatgctcctaagagagatgcaatggtctagaaagtaaaatcattccctggtggcaaggaatacatgtgcagagtagaatttagtcttcctagcataacagcggaagaagggccccagaaaagaaggcaccaatacgagtgaaatttgagataccatatttcatcgtatcaggtatttaggtctgttatctgaagataattggaaagagtggttaccaggcactcccctgggttagatatatcacgatggctggcgaatatgagctgagacttatatgagttttctcttttctggctgatggaagacatttatgaagctgcaagatacatatttgctcgagacagcaaccgtatgacatttggatgttagcctggacgtcttctgctgaccatacaaggtttccccctgggggcttgttgttcctcttgttaggctcaccttaccttggttattgtatgttacccatcaagtatagtttttgaaaaaagagaggataattttaattttcatctctcttgtattattatggatttatttttgtgggtaccaaacttggatttgtttcgtctgattgagttcacaaaaacactgtcattactgggtgatagttctgaactgcaggttgaaacaattgtgccctttagtgtaaatgtcgtcgtcttgtgtccatgcaaaagaaaggaaacctaccaagacctattatgacttcattaatttcaactttttttgtttcaactatttcatttaatgtggtgttcttgttatgccaatttctatgtattctaagaaaggccactatgccagaatccttttgacgaagttaattctaatttcattttgtaaacctagcgtacaacgtataaagtaacatgtgtgattgaagctcaaatgctctgcaacacaaatgtctggggagctgttggttggttctagggcacaataaatgtagttagaaaatttatctaggtacttgaggtaataatcatgtgtagtgtagtggctaatggaacttgttgtctaacttatttccattcctgaaacaatgcatcttgtgttgtgcatactttaggactattataagcataaagctatagaacactttttgattttgtgaggatattagttctataatatggattacatgaagcttgcaccggttagtgatcctaagaacaga

SEQ ID NO: 20470 - DNA, 3104 bp, Zea Mays
cttgcatcattttgctaggaaaagaaggggaacaccctgcctcgcgccctcgtctaccgcatctctgttgttcctttttgcaatctccctttatttttccattttaaaaaataaaatcttagctttggagcgggtaagagaaaacggccggacgttggaaaccaagatctacggaatcttcaggctttaacagactccgtgatgccggttcttggcccgggaaagcggcttcgtcggccacctaagtgcaggcaaccgtcggtcctgatgacttgaaatgcggcagcccttctacggcctcccacccagatgaagatgcagcttgtggaaccggaaggctcgaaggggatgggttctcctgggtgctcggagatagtcgaactggtggacgagccgaaagatgctcgttcgtgtgggcttacccacttgagggtgagggtcaagccagtggggcaggagcttggggcacggtcgtgctcggtggaggatgatcttgaccagctcatcagatcgatcaacgtgcgcacgtcggcgagggcttctgggcagacgagcacggataggcggcttattgcgcttgggaagtcgccagtgtcgagctcagagattgtggagtccgtgagcctgaagcaggccctgaggaagatgtgcatctcacaggcgtcggagatggcagccatgaagagactgtcaaaaccgacaggggtgtccaccccttctgattctggagcaatcaagaagctacatggctctgttgcagttcaaaccaatgaggagcaagatgacaagagtaaggcagggaaagtttctgtgaagcctgagaaatcggcaggaagttcagtgggtaagccaagtgaaatcagtaaggggcagagcaagagctcagccaagaagaatttgagatcagcatctcctaccacagggaatgttcataaaaccagaatccaagatgtgatcagtaacaagtcatcagagggagttgaaggtatttctgtagaagtaactctgccaaagcagagaaaaggtaaatcaatgaaaacatctagcccccgggctgttcctgtaggtggctcacggttggtgaggccaatgtttcggaataaaacctcgacgaaaaagaaggtgaaacctgaacctgctatagtgcccgcatcacacaagcattgtgagacgaaaggtcctaaatctcacactagtaaacatcaggagtcccttcaggatgaacccagaaccccagcgccaactgacaagaaggctgctgtcagctccaccactgttgatggagctgattttggcactaaaggatgtggtgtcggtgtgatccatggctcgaaggttggtgagttgttaagatcaaaggagaagggagaatgctcccaaagctctaagagtagcattggtgattatagcaccagcacaagcatcagtgaggacagttatggcagcttcagtgctaacagaagcaggcctcacatgtcaaaggatgtgagatggggagccatcaggcgcatggctatccaacaagggagcttgggattaaagaacttcaagcttctcaaacaacttggttgtggggatattggcactgtttatttggctgagttagtgggctcagactgcatgttcgcattgaaggttatggacatcgagtacctcataagcagaaagaaaatgctcagagcacaaactgagagggagatactgcaaatgctcgaccacccattccttccaaccctgtattctcatttcacgacggacaacctttcttgtctggtaatggagttttgccctggtggtgacctacatgttcttaggcagaagcaacctaccaaaaccttttcggaagcagctgcaagattttatgtcgctgaagtcctcttagccttggagtatctccatatgttgggggtcatataccgtgatctgaagccagagaacatccttgttcgtgaagatgggcacatcatgctctcagactttgatctgtcgctgaggtgctcagtgagcccaatgcttgtgagaacatcatcagtagacagagatgagccaagtaggccttctggtccctgtgcacaaagctgcattgatcccctgtgtatccagccatcgtggagcaattcgtcttgcttcacgcccagtctggtttcatctacaccgtcaaggacacggaggactagagctgaacccctgaagaaaccatcacttccacagctcgttgttgagcctacggaagcaaggtcaaattcgtttgttgggacccatgaatatcttgccccagagatcattcgaggagatggccatggcagctcggttgattggtggactcttggaatcttcctttacgaattactctatggcaagacaccattcaggggaccggacaatgacgaaacactctcaaatgtgatctcacagggcttgaagttccctgacagtccagcattaagcttccacgctcgagatctgatcagagggctgcttgtgaaagaaccggagtaccggcttggctcgtcgagaggagctgctgagattaagcggcatcccttcttcgaaggtctgaactgggccttgatccggtggacttcaccaccagagaccccgaaaaatattgatactgcagcaacactcgcgggaacacgcaagaaaaaggaaggcaaatgtctggaattccggctgaatggcgacgacatcgagttcgagctcttttagttgtagctgtagtggtagtcccaatgatatatcagtaccacgtaagcgcaagagtagtctttagtcccccttccttgcagatttctgttcatccttggtcatttcggacgttgggaagtaaggtaaggttggctgataagcatgtaactttatgcgttgttaatactatccaatattagaagacgctgttggaaaattcctgggcatgtgcgagatgcaactagtagaaacagcacctttgtgttgctggatgaaacagtctgtgcgtaccttgataacgctgggaaatagtgactcgaagtcgaagtgaggcctgtaactttatttcatgttaattggtgaaacaaatcttagatatacacaaatgtatctaaaacatatataaacaaaaaaca

SEQ ID NO: 20471 - DNA, 109 bp, Zea Mays
aataagtcatgtggtcttcatgtggaggacagtccgcacagcatctctgctgtccgcacagcatctctgctgtaggacagcagcaacagcagtttttgactgcaaggac

SEQ ID NO: 20472 - DNA, 513 bp, Zea Mays
cagcgccatggcgccattactccaggtccaggactccaggcgcaaccgcccagctagtgccaagtgcagtgctcttccttcttccctcccagtgcattgctccagccgttgcagcgttgcccttgcccccagccactgtgcagtgctcctactccagcgagccgccgctgcccagtgcacaatgctcctgctccagcgagccgctagtgcgcaaccgcccaggtccagccgccagccagtgcgcactgctctagcaagccgccagccaccagctagtgcgcactgcgcagtgctccattctactgcccagtgtggctgcagcctgcaacagtgtggcagtgaatttcaatttctactgtgtgttgcaacagtgtggcagtatgctcatggtcttaatgttgatgagttcgatgatggttactaatcatgcataaaagttgtaacttgtgttgtgtggttgaacttgtgttgttgaacttgatctgtttctttttattgtaatgctatttggtt

SEQ ID NO: 20473 - DNA, 276 bp, Zea Mays
accgtcgtagaagtaggatatccggtctttctccagcatcgcttcactcctgacggccgtggcagcgggagcagagaaaatcaaagtcgcccagattaacagagcccggcccaaactcagcgcggcggcggcggccgcggatggaggtccaaacgagacggaagcgaaagggcgacaagggtggggacgtggggtgaggactggggaatgctctggatcgggttggacggcacggatcaaacgaccgtaagatcgacggtgtgtactgtcccccag

SEQ ID NO: 20474 - DNA, 976 bp, Zea Mays
acttccacagttccacgtccagctttcttccagttcaccagccgccgccgacggtcacaccactacacctcgtccctgcctgctggctcgctgaggccgatcaggactagtacgtctcgctgtagtaggcgctcgaggagtacgtcttgccgagcagacggagacaccaaggccgaccaggaccactggaccagtacgtctcgtcgagctccaatccagcgctgacgccaccaccacacctcgccgagtgcggatgcctactcacctctgccagctcaggtaatcaggaaacaagagaaaagcgagtggaagctctatgggtgcaccaattggtcagtcatcatcttcagcacaagcaggtgaaagaagatgcaaataaattggttgtcgcaggcacaagtaatattggtactagagttgtagcttctgttgatatagcgggccttgatgatgatgatgaggacatacaagaggagatgactggaataggaaagagacaaacgaggcgcacatctattgtatggaagtactttacaaaataaaatgtggaagtggatgtgaatggcaagaagtttgagcagctatgggcctactgcaactttccaaaatgtaagcagagatatagagttgagtctaatcatggaacaaatgcattccgcaaccatctgaggtcacatcatagtattgtcaaaggacaactagaactaaaggcagaaaaggatcatggaaaagatgtcaccactatttagccttttaggtatgatccggatgctagtcttagaaaattctatttaatagtaatcatgcatgagtacccattcaacattgttgagcatgattattttgttgatttcaccaagtcgttgaggcctagttttgtcttcaagtctagagtgattgctaggaaagatatacttgacatatactttgaagaaaaagaaaaattgtatgcccaattgaaaaatgtaacacgtcg

SEQ ID NO: 20475 - DNA, 1312 bp, Zea Mays
acttccacagttccacgtccagctttcttccagttcaccagccgccgccgacggtcacaccactacacctcgtccctgcctgctggctcgctgaggccgatcaggactagtacgtctcgctgtagtaggcgctcgaggagtacgtcttgccgagcagacggagacaccaaggccgaccaggaccactggaccagtacgtctcgtcgagctccaatccagcgctgacgccaccaccacacctcgccgagtgcggatgcctactcacctctgccagctcaggaaacaagagaaaagcgagtggaagctctatgggtgcaccaattggtcagtcatcatcttcagcacaagcaggtgaaagaagatgcaaataaattggttgtcgcaggcacaagtaatattggtactagagttgtagcttctgttgatatagcgggccttgatgatgatgatgaggacatacaagaggagatgactggaataggaaagagacaaacgaggcgcacatctattgtatggaagtactttacaaaataaaatgtggaagtggatgtgaatggcaagaagtttgagcagctatgggcctactgcaactttccaaaatgtaagcagagatatagagttgagtctaatcatggaacaaatgcattccgcaaccatctgaggtcacatcatagtattgtcaaaggacaactagaactaaaggcagaaaaggatcatggaaaagatgtcaccactatttagccttttagaaggaaggcgtactggtattaagttggcaaagtgctttactgaagtgatggtaaaatggtttgctgagaagaaattgttttcattgacctgggacaatgcatcaaacaatttagtggcagtcaaagacattattcaagatcttagagtgaatgcttcttcttatttgatttgtgatggaatgttctttcatattagatgtgcacgccacatactaaacttggttgctagagatgggcttgctgttatttcaaaagcactgaaaaagatcaaagctttggtactaactgtgaagggctctcccttgcaatgggaggaacttatgaagcgtgctactgagtgtggattggatacatcaaagggcattcaactagatgtttccacaaggtggaattcaacttacatgatgctaagggacgcattgcactataaggatgcttttagtaggctcaagacatcaaatcatcataagtatgaaaacatatctccttctgaaagtaaatggaacatggctgtagcagtttttgaatgtctaagcaaattttatgatctaactgaattgctt

SEQ ID NO: 20476 - DNA, 1320 bp, Zea Mays
acttccacagttccacgtccagctttcttccagttcaccagccgccgccgacggtcacaccactacacctcgtccctgcctgctggctcgctgaggccgatcaggactagtacgtctcgctgtagtaggcgctcgaggagtacgtcttgccgagcagacggagacaccaaggccgaccaggaccactggaccagtacgtctcgtcgagctccaatccagcgctgacgccaccaccacacctcgccgagtgcggatgcctactcacctctgccagctcaggtaatcaggaaacaagagaaaagcgagtggaagctctatgggtgcaccaattggtcagtcatcatcttcagcacaagcaggtgaaagaagatgcaaataaattggttgtcgcaggcacaagtaatattggtactagagttgtagcttctgttgatatagcgggccttgatgatgatgatgaggacatacaagaggagatgactggaataggaaagagacaaacgaggcgcacatctattgtatggaagtactttacaaaataaaatgtggaagtggatgtgaatggcaagaagtttgagcagctatgggcctactgcaactttccaaaatgtaagcagagatatagagttgagtctaatcatggaacaaatgcattccgcaaccatctgaggtcacatcatagtattgtcaaaggacaactagaactaaaggcagaaaaggatcatggaaaagatgtcaccactatttagccttttagaaggaaggcgtactggtattaagttggcaaagtgctttactgaagtgatggtaaaatggtttgctgagaagaaattgttttcattgacctgggacaatgcatcaaacaatttagtggcagtcaaagacattattcaagatcttagagtgaatgcttcttcttatttgatttgtgatggaatgttctttcatattagatgtgcacgccacatactaaacttggttgctagagatgggcttgctgttatttcaaaagcactgaaaaagatcaaagctttggtactaactgtgaagggctctcccttgcaatgggaggaacttatgaagcgtgctactgagtgtggattggatacatcaaagggcattcaactagatgtttccacaaggtggaattcaacttacatgatgctaagggacgcattgcactataaggatgcttttagtaggctcaagacatcaaatcatcataagtatgaaaacatatctccttctgaaagtaaatggaacatggctgtagcagtttttgaatgtctaagcaaattttatgatctaactgaattgctt

SEQ ID NO: 20477 - DNA, 1224 bp, Zea Mays
cagaaacatagcatgtaaatctatagaatcaatttccatctctcaccccatgaatttgagatagtcttatatgataactttggaaagtggtggaatgtcacattctaaaaaaatatcctgttccattagtaagattccaattcctcaaaatgaaaggaaacaaacggggcctaaaggattttgtgaggttagggacttacttgataactggtgtatcagtactgatttgactattaggcacatggctattggtatgagagaaaaatttgagaaatattggagttcttctagtatgtgtcttgttgtagcatgcttctttgatcctaggtataagagaagggtcatagagttctacatgaaaaagttttatggtgactattatcaagtgacccttgaagtatttatgagtgttttaaggaagttgtatagcttttatgcttctgaaacaccacgtgcggcaaaagacaactggacatatcatcccaacaaattcatcacaacagaggaatgtaaatttggaacttgagagttacttgtatgatgacttgcctgatagggatgagtctaatgaattggataaatatatggttgagccacttatcaaacaaaacttgtttgatattttagcatattggaagaaccaaacagataagtatccagttctttcccaaatagctcgtgacttaatgtctgttcaagtgtcaacagtagcatctaagtcggcatttagtgctggtggccgagtcattgatccatatcgtaatagacttgaccctgaggtggtggaagctctaatatgcaccaaggattggatcaatgtagtaagaaaagattctaaaagtgttctttcaattgtggctaaactaaaaccaccagagacagatcctttgtcccctaattctagccacttgatggatgatgaggaacaaggccgggatagtgattcccaattcatgaatcaagatggcgagctgtgaagaaatcttgcaaatgtgtgtttgatgtcatgaagacattgaagaacttatattatgtccatatgtgtgtgtcagtgtgtgagtgtgactattactctgttaactgttattgtgtctgaactgaatttatgtgggttgagtgagtgtaagtttacttgttggatttggaattgtgctatgtgctcatgtactattgtggacttattttcctgttgttcaatggctatgtggtcaactggtcatgtaa

SEQ ID NO: 20478 - DNA, 2792 bp, Zea Mays
agtggaagccatcgagcgcggttcctaaactcggatcctgcattttgttgcggcgatatgcgcaccgttctgagctgcgctggtgctcctggaaaggtactggtgcctggaggtggcagtgatgacttgctttcctccgcagagccggtcgtggacactcaacctgaagaactacagatacctgaagcagaactgactgtggagaagacatcctcctcaccaactcaaacaacatcagcagtggctgaagcaagctcaggagttgaggctgaggagaggcctgagctctcagaagtgattggagttggaggtactggtggaaccaaaattgatggtgcaggcatcaaagccaaagcaccactcgtggaggagaaaccacgagttatcccaccaccaggagatggccaacgaatatatgagattgacccaatgttggaagggtttcggggtcaccttgactaccgatacagtgaatataagagattacgtgcggctattgatcaacatgaaggtggtttggatgcattttcacgcggttacgaaaagcttggatttactcgcagcgctgaaggtatcacttacagagaatgggctcctggagcatactctgcagcattagtaggtgacttcaacaactggaacccaaatgctgatgctatggccagaaatgagtacggcgtttgggagattttcctgcctaacaatgctgatggttcccctgctattcctcatggctcacgtgtaaagatacggatggacacaccatctggtgttaaggattccattcctgcctggatcaagttttctgtgcaggctccaggtgaaataccatacaacggtatatattatgacccacctgaagaggagaaatatgtattcaaacaccctcaacctaagcggcccaagtcactgcggatatatgaatcacatgttggaatgagtagcccggaaccaaagataaatacatatgctaacttcagagatgaggtgcttccaagaattaaaaagcttggatacaatgcagtacagataatggcaatccaggaacactcttattatgcaagctttgggtaccatgttacgaatttttttgccccaagtagccgttttgggactccagaggacctaaaatctcttattgataaagcgcatgagcttggcttgctagtgcttatggatattgttcatagtcattcatcaaataataccttggatggtttgaatggtttcgatggcaccgatacacattacttccatggtggtccacgaggccatcattggatgtgggattctcgcctattcaattatgggagttgggaagttttgagatttctattgtcaaatgcgagatggtggcttgaagaatataaatttgatgggtttcgatttgatggggtgacctccatgatgtatactcaccatggattacaagtgacattcactgggaactatggcgagtattttggatttgccactgatgttgatgcagtagtttacctaatgctggtaaacgatcttattcgtgggctttatccagaagctgtatccattggcgaagatgtcagcggaatgcctacattttgtatccctgtccaagatggtggtgttggttttgattatcgtcttcatatggctgtcccagacaaatggattgaacttctgaagcaaagtgacgaatattgggaaatgggtgacatcgtgcacaccttaacaaatagaaggtggcttgaaaagtgtgtcacttattgtgaaagtcatgatcaagctcttgttggtgacaagacaattgcattctggttgatggataaggatatgtatgatttcatggctctggacaggccttcaacgcctcgcatcgatcgtgggatagcattacataaaatgattaggcttgtcacaatgggtttaggaggtgaaggctatctaaatttcatgggaaatgagtttgggcatcctgaatggatagattttccaagaggtcctcaaagtcttccaaatggctccgtcattcctgggaataacaatagctttgataaatgccgccgtagatttgaccttggagatgcagattatcttagatatcgtggtatgcaagagtttgaccaggcaatgcagcaccttgagggaaaatatgaattcatgacatctgatcactcatatgtatcacggaagcatgaggaggataaggtgatcatctttgagagaggagatttggtcttcgtgttcaacttccactggagcaatagctattttgactatcgcgttggttgtttcaagcctgggaagtacaagatcgttttagattctgacgatggccttttcggtggatttagtcggcttgatcatgatgccgagtacttcactgctgactggccgcatgacaacaggccgtgttctttctcggtctatgcacccagcagaacagccgtcgtatatgcacctgcaggtgcagaggacgaatagggcacaacagcggttgttggggaagaacttcagagggatgtgctgctggtggactgacaccactgccacgcgcgatgctgccagatgttgccctcgagaccacgtggcaggacgatcagctattcaggtggataggttagcttaccgatgagctctcgctttcgagtgactggtgaaggaaatggacctcgcacaccgcattttcgctatgcattctgaaaatgtaccgtgtggttttgtacatatggcatcagtaggcattatatcattcatctcgctgaaccaaccatttacgctatactccgtactgctgtgcaaatctctctctc

SEQ ID NO: 20479 - DNA, 756 bp, Zea Mays
atatataaacagcaataaacaaagctaaggaaattaaagaaaaacggtggactagaaacttccaaatcgaacggcacacaaaaatcacaacccggaaagggaccagcagcgcaaagagcagggtgttggcattgatcagacgcctgccatggcggatcagttcgtggattcggcgaacaatgtgatcattgaggaggtgaacaagggcctgaacccaggaatggtggttctgcttgtggttgcaagcttcctgctgctcttctttgtggggaactatgcgatgtatgtgtatgcgcagaagacgctcccgccaaagaagaagaagccggtgtcgaagaagaagctgaagagggaaaagctgaagcagggggtctctgcgccgggagagtaaacggccatgctgccgatcctcccgtccagagctcctattcacatgattattaaagaaaaaaatttatatatatataccagctggagccgtagtgttggagtaactttgttctgtagatgctctgtctttaatggtacatctgtattggagactttaatggcctgagccgagctagtatgcttcctgtttcgtacaagttcttgaaatgctggtgatggcgcatggctctagagaaaaactcaagggagctgagccagcgaaacatgatctacctctacctctagagttaccaactatatgcagttttaagagctgcagtagtattatttttggagtaactcttatgttactttgaaatccttaaa

SEQ ID NO: 20480 - DNA, 662 bp, Zea Mays
aaagaaaaacggtggactagaaacttccaaatcgaacggcacacaaaaatcacaacccggaaagggaccagcagcgcaaagaacaatgtgatcattgaggaggtgaacaagggcctgaacccaggaatggtggttctgcttgtggttgcaagcttcctgctgctcttctttgtggggaactatgcgatgtatgtgtatgcgcagaagacgctcccgccaaagaagaagaagccggtgtcgaagaagaagctgaagagggaaaagctgaagcagggggtctctgcgccgggagagtaaacggccatgctgccgatcctcccgtccagagctcctattcacatgattattaaagaaaaaaatttatatatatataccagctggagccgtagtgttggagtaactttgttctgtagatgctctgtctttaatggtacatctgtattggagactttaatggcctgagccgagctagtatgcttcctgtttcgtacaagttcttgaaatgctggtgatggcgcatggctctagagaaaaactcaagggagctgagccagcgaaacatgatctacctctacctctagagttaccaactatatgcagttttaagagctgcagtagtattatttttggagtaactcttatgttactttgaaatccttaaa

SEQ ID NO: 20481 - DNA, 1810 bp, Zea Mays
atctttcttcccaacccgttcttttccgccgcgatcccaaaaatccccgacgccgccaatcattcattcatgctgtaccggaaacacttcagctacggatcgggctttgcggacggcaagtcagtagtaaacaattagtggttgcagtactagcagcgaaccgtccatcccgtgggagtatttgcttgggcctgcctgccgattggaacgcgcgctcccaatcgacatgaattgagtcgaattgagattaaccgaacaaggctcactctggtcaccatccgccgctggccgctgccctcgccggccgcgttcgacagcaacgtagacctagctagtgtttctccacagtatctctcggagattcttgtgtagttttccagcgcagccgaaactgaactgatggtgtagtaggaccccgaacccgaacgaatccaattattgatgggacgacggctaacaggctagtgacgtccttaaatcctcgcgtctgctttctctttctcagcctttaccccaggacgacgagccgctcgctgactggttacttattactagtagcctctctggtcctggtgcatcctcgcggaactcatcacaaggctccacctccaccctcctgcgcgcatggtgactgcagcagcagcagcagcctcctctccccgcagcatgctccgcttcgcattgaccgcctcgtcgtccggccgccaccgaacgtgagtacgtggctctcgtccaccgtcaccgccagcggccggatcgccgcgacgtctagagcccccccgcctctgcagccagccggcgctcgcgatgcctcctctggcgccgccgcacggtgagaagggcggcaggcagcggcagggggcggcggcggccccggccccggcccagcggtcggcgtcgttccacgggcgcgggacggagcagcggcaccaccagccgcagaagcagaggcccaagacgctgcccgacctgctcgccggcgtccggggggcgagcttccgctccgggtccccgcccccggacggcgacgcggggcggaggacgccgagcaaggtcctggtcagcgtggcggtgcagcagagcatgtggccgctgcacgtcatggcgcccgccgagtggaccgtggcggacctggtggcggccgccgtcgccctctacgtcaaggaaggccgccgcccgctgctgccgtcgaccgacccggccgccttcggcctccactactcccagttcagcttggacagtctgaacccaaaggagaaaatcatggaactaggcaccaggagcttcttcctgtgcccaagatcttgggctgccggtcaggacgcttcgtcgtcctccggcacagcgaacggggtcaccagtgcggcatcagggaaaacaccggcctggcttagctacatgccgttctggccgaccatgtgatcggctagcacacgcacaccccaaactcttccaggtcctaaagaatctccaagtattgcatttgtgagacagatggctacaaggacattgtaaatgtatattttggagtttgtaagcatcttgaatggtgcacgtgcgatcctgcaaatcatctgtggcccatgttacaacccacagattcagggaaaaaatatcgaatgattatgtaattaaaaaaagtttaaaacagttttaatggcgaaaaattgctgtggtcatcttgttcaaattaactattctacagctccatccaacagtcaagaaagcgatggtgcgagcgagtaaaatgacgagtgaccttgtatggacctttcaagtggcaagcaaatctcttttattaaaacctgac

SEQ ID NO: 20482 - DNA, 590 bp, Zea Mays
catgaattgagtcgaattgagtctgaacccaaaggagaaaatcatggaactaggcaccaggagcttcttcctgtgcccaagatcttgggctgccggtcaggacgcttcgtcgtcctccggcacagcgaacggggtcaccagtgcggcatcagggaaaacaccggcctggcttagctacatgccgttctggccgaccatgtgatcggctagcacacgcacaccccaaactcttccaggtcctaaagaatctccaagtattgcatttgtgagacagatggctacaaggacattgtaaatgtatattttggagtttgtaagcatcttgaatggtgcacgtgcgatcctgcaaatcatctgtggcccatgttacaacccacagattcagggaaaaaatatcgaatgattatgtaattaaaaaaagtttaaaacagttttaatggcgaaaaattgctgtggtcatcttgttcaaattaactattctacagctccatccaacagtcaagaaagcgatggtgcgagcgagtaaaatgacgagtgaccttgtatggacctttcaagtggcaagcaaatctcttttattaaaacctgac

SEQ ID NO: 20483 - DNA, 896 bp, Zea Mays
tagttttccagcgcagccgaaactgaactgatggtgtagtaggaccccgaacccgaacgaatccaattattgatgggacgacggctaacaggctagtgacgtccttaaatcctcgcgtctgctttctctttctcagcctttaccccaggacgacgagccgctcgctgactggttacttattactagtagcctctctggtcctggtgcatcctcgcggaactcatcacaaggctccacctccaccctcctgcgcgcatggtgactgcagcagcagcagcagcctcctctccccgcagcatgctccgcttcgcattgaccgcctcgtcgtccggccgccaccgaacgtgagtacgtggctctcgtccaccgtcaccgccagcggccggatcgccgcgacgtctagagcccccccgcctctgcagccagccggcgctcgcgatgcctcctctggcgccgccgcacggtgagaagggcggcaggcagcggcagggggcggcggcggccccggccccggcccagcggtcggcgtcgttccacgggcgcgggacggagcagcggcaccaccagccgcagaagcagaggcccaagacgctgcccgacctgctcgccggcgtccggggggcgagcttccgctccgggtccccgcccccggacggcgacgcggggcggaggacgccgagcaaggtcctggtcagcgtggcggtgcagcagagcatgtggccgctgcacgtcatggcgcccgccgagtggaccgtggcggacctggtggcggccgccgtcgccctctacgtcaaggaaggccgccgcccgctgctgccgtcgaccgacccggccgccttcggcctccactactcccagttcagcttggacaggacttgtttcgtactcgactagca

SEQ ID NO: 20484 - DNA, 635 bp, Zea Mays
cgagtatctgttcatgctcatactatgtgcctccatgtgctatgtgccatttcgatctgagcgagacatttgtagatacagtctatcgtaaaatacgggtgcatggaggatccatttactatggtggaagaacagtcgcagacatggtggttgttgggatcgtcgaggcttttttttcattgggcacaccttcaccatcggcctgccttttgattcaattggaaaatgctgctactttcaattggaaaatgctgctactgaagaactttagccgttggactgaaactctacttggatgtatgcagctttggaccgtcgatgttaaatcttgtctcaccagcggctacttctgatggtgtggctacctgagcagcttgtatcgattctgccttagcttgccaattaacgatgtccaccaggacagagttgaaaacttgaaatggcaagaccagaaccctgaagttgaactgttggcaagaaactcagataggtggatgaacctcagataggggcgaggaacctagcgaaaagcctgggcaacctgtgcagccatccaaatggctttatgtaatccattgtaccacatttcagttgctaactgaaatttctaatcatacggaaacaattgaagccga

SEQ ID NO: 20485 - DNA, 3975 bp, Zea Mays
acgaggcggagtcgccgcacgccctccgctttccgagtgacagccgcactcggccctcgtagctggaggagtgggggcgcgggagagatgataaggatggcggcagcgtctcagccgccatcgtcagccttgcggatgcacgggtgcggcggcgcggcttctgcgtcgtccgcgcccgtgcgcctcttcacggagtcgcggggtagagtcgtggcgtcgattgggaggggcaggaggcggaggcgcgccatctcgtgctgctcgtctccagacgcagatggccctcgccccgccgcgccaccgacctccgcagcgccttccgacgggtcgatacagctctattcccagatcgagagggtaatcacggaggcggcaaagcagtcccgggaaggctggggttcgactggagattggaccgaagtcgagggatcatgggtgttgagaccgaagtccttggagccatcatttgttgtccactttgttggaggaatttttgtcggagccgctccccagatcacataccgcttcttcctcgagtgtctcgcgaacaggggagctttggtgattgctacaccttatgcgagcggctttgaccatttcttcattgcagatgaagttcaatttaagtttgacaggtgtttgagaaacttggatgagcctgtaaatgatctcccaacgtttggtgttggacattcattgggatctgttatccacatgttgattggatcaagatatgctgtgcagcgaagtggaaatgtactgatgtcctttaacaacaaggaggcaagctctgcgatcccactattttcacctgtaattgttcctatggcacagagttttggccctatattctcccaattggcatcgtatccaacaatccgatttggggcagaagcagctattaagcagcttgagaatctaagcccacctgttgttaagcaacttctacctttacttcaacaacttcctccgttgtatatggacctaataaaagggcgggaggacttcattccaaaaccagaagagacacgccgcctgataaaatcctactatggaatttctcggaatctcttaataaagtttaaagatgatcaaattgatgaaacctctacccttgcacaagtactaagctctgaagcagctattagctcattgcttgatatgtcaattcgatcacttcctggggatcatgggttaccattacaacaggttcttcctgatgttccaccagcaatggctgatgcagtgaaccgcggaggtgaacttctgacaaatctgacaacaggcacaccatgggaggctgttgctaaggaggttggcaccactttgggtactgactcaggcattctacgagcacagatctcaaaagacgttgaaactcttgttgatgtaattgcttcatggacatcttcaaattctggtccaagactacttcgcccatgatcacccagcagtctgcgtacagaaatatgatacgagacgttggcaattaaggagttatgttaccttggccggtggaggaaggatgcatggcactggcaataggagcttttgtggacaaactatcttaacccattggcaaaggcaagatctccttcccagatattttagtctgtaatcaatttggattaaaggtaaacaatataggcttataaggtgaactaagtaagttaggatatttctccccactaaatgtattaagatcttatattcaagatgactgagtaagagatgctagtaaatggacaatgaaattacgtatcttatattcaagatgactgagtaagagatgctagtaaatggataatgaaattaccctacgtagttatacataataagtgtgaaagggcctctagcctagtggttaaggacttccgagtagcacctccaagtcctgggttcgattccccttggaagcgaattttcaggcttggttaaaaaaattccctcgctgtgccccatccgttctcgggttacgatgtcctatgcgccaccctccggttgggccgttgcagagtggacagttgacgtcggcccgttagtgatggggggccagggttcgggaattttctcggccaggaccattgtttcggtctcttcttaatatattaccgggagggcggtctttcccttcccggccgagttatacataataagtattttacatgaaggcatagagcgtgtttggtttagcttcctgaactagattcgctcataaaaatctagaatctcaaccacacatagattcctctagttcaattcataatcacctcctacctagatttttcagattcttgttatccatgttacaaggtgccatactcttatataatctatagtttcgagttatttcaaccaaacaaattttagttttttcacaattgtcagctcacaacatctttctcacagctcacaactagaatcggatttttcatgattctatagctaaaccaaatagagcctcggtgttcttcacacttcgtagctaatgttgtgtagtggactctaacattattgtcgactcctttgttggtcgacagtataggcaccgtcctaagcgcccttcaggctcaggcgtgtgaggggctggggtggtttaggagagattatagatgtgttcaattattgttaggcaagtgtacctacactacaaagggcactttagattgtaatcaagaattatcgaagaaggaataaacacccacacaagcatgtgtggtttccttcaacagtggcgacacagaactctggcctcgccattgttgacacccacgactggcctcgctacccccaacgctccaactctcagtcttagccgctcctgtactctcccttgtgcacccagctctgtatcaatttggtatcaaagaaaagcactagggcatttaccaccatgtactgatcttgcggatattgcggcaaagttggattgcatcttagagcagctcaccacccttggcaatcggatggactcccacgacaagcgcattgcgcggatggagaagttctagtctatggaggatgacgtggacctcaccgagaactccgtgcaaccataataacaggattgtagcagccatggtgttgatggcaaaggcgaccatgcccgggatcccttctgtgacaacgacttccatgaagacggctactgtatgcccttggcgaccctagcgatcatcgtttccctcacggacacgctactatttcaccgagtgcgaccctagcgaacacgcgtatgttttctctcgtcttgaactatggtccttctcttcctttagaccaaggtgatagaaggatcccgttacatgattcgaagggttggttgaagcgagtgaaggtcgggtgctgttgtgcagcttgtcctccggggttcccgccagccaagggataccgtatatgatgcctccttcctccatcagggtactgtagccacgccaacgccagcccgaagcttgccattatacttcgtcacgtctcattgtggtttactctaggggtggtaatagacgacgatctaaatgtttctttacaataagttaggacccttaaataattttagttcaaaaataaataggaatagagtccaatcctaattcgattgattcttaaattttatagtgtaaaatctagagctcattatcgcccctaggtttacccggtgtcctttgttgacttcccaactacggagtggttgagccggtcagggacgaagctatattcagcttagggggtgcagatgcaccccctaaaagatacagaactagttataatggtcaaatttttactttatatgtacccccatcacatgatgtttatgcatccataaggtaattgcaccctcctcaacttttctctagcttcgccactggagccggtgttagtctctacgccatgacaagtgacgctcgcatcctgacatactaactcttgtaccgtcattcatgctgcacgcctgtgtcaaagtctggcttacat

SEQ ID NO: 20486 - DNA, 4015 bp, Zea Mays
acgaggcggagtcgccgcacgccctccgctttccgagtgacagccgcactcggccctcgtagctggaggagtgggggcgcgggagagatgataaggatggcggcagcgtctcagccgccatcgtcagccttgcggatgcacgggtgcggcggcgcggcttctgcgtcgtccgcgcccgtgcgcctcttcacggagtcgcggggtagagtcgtggcgtcgattgggaggggcaggaggcggaggcgcgccatctcgtgctgctcgtctccagacgcagatggccctcgccccgccgcgccaccgacctccgcagcgccttccgacgggtcgatacagctctattcccagatcgagagggtaatcacggaggcggcaaagcagtcccgggaaggctggggttcgactggagattggaccgaagtcgagggatcatgggtgttgagaccgaagtccttggagccatcatttgttgtccactttgttggaggaatttttgtcggagccgctccccagatcacataccgcttcttcctcgagtgtctcgcgaacaggggagctttggtgattgctacaccttatgcgagcggctttgaccatttcttcattgcagatgaagttcaatttaagtttgacaggtgtttgagaaacttggatgagcctgtaaatgatctcccaacgtttggtgttggacattcattgggatctgttatccacatgttgattggatcaagatatgctgtgcagcgaagtggaaatgtactgatgtcctttaacaacaaggaggcaagctctgcgatcccactattttcacctgtaattgttcctatggcacagagttttggccctatattctcccaattggcatcgtatccaacaatccgatttggggcagaagcagctattaagcagcttgagaatctaagcccacctgttgttaagcaacttctacctttacttcaacaacttcctccgttgtatatggacctaataaaagggcgggaggacttcattccaaaaccagaagagacacgccgcctgataaaatcctactatggaatttctcggaatctcttaataaagtttaaagatgatcaaattgatgaaacctctacccttgcacaagtactaagctctgaagcagctattagctcattgcttgatatgtcaattcgatcacttcctggggatcatgggttaccattacaacaggttcttcctgatgttccaccagcaatggctgatgcagtgaaccgcggaggtgaacttctgacaaatctgacaacaggcacaccatgggaggctgttgctaaggaggttggcaccactttgggtactgactcaggcattctacgagcacagatctcaaaagacgttgaaactcttgttgatgtaattgcttcatggacatcttcaaattctggtccaagactacttcgcccatgatcacccagcagtctgcgtacagaaatgttagtaacagtgaagagcaacaggatttaatgatgcattatgatacgagacgttggcaattaaggagttatgttaccttggccggtggaggaaggatgcatggcactggcaataggagcttttgtggacaaactatcttaacccattggcaaaggcaagatctccttcccagatattttagtctgtaatcaatttggattaaaggtaaacaatataggcttataaggtgaactaagtaagttaggatatttctccccactaaatgtattaagatcttatattcaagatgactgagtaagagatgctagtaaatggacaatgaaattacgtatcttatattcaagatgactgagtaagagatgctagtaaatggataatgaaattaccctacgtagttatacataataagtgtgaaagggcctctagcctagtggttaaggacttccgagtagcacctccaagtcctgggttcgattccccttggaagcgaattttcaggcttggttaaaaaaattccctcgctgtgccccatccgttctcgggttacgatgtcctatgcgccaccctccggttgggccgttgcagagtggacagttgacgtcggcccgttagtgatggggggccagggttcgggaattttctcggccaggaccattgtttcggtctcttcttaatatattaccgggagggcggtctttcccttcccggccgagttatacataataagtattttacatgaaggcatagagcgtgtttggtttagcttcctgaactagattcgctcataaaaatctagaatctcaaccacacatagattcctctagttcaattcataatcacctcctacctagatttttcagattcttgttatccatgttacaaggtgccatactcttatataatctatagtttcgagttatttcaaccaaacaaattttagttttttcacaattgtcagctcacaacatctttctcacagctcacaactagaatcggatttttcatgattctatagctaaaccaaatagagcctcggtgttcttcacacttcgtagctaatgttgtgtagtggactctaacattattgtcgactcctttgttggtcgacagtataggcaccgtcctaagcgcccttcaggctcaggcgtgtgaggggctggggtggtttaggagagattatagatgtgttcaattattgttaggcaagtgtacctacactacaaagggcactttagattgtaatcaagaattatcgaagaaggaataaacacccacacaagcatgtgtggtttccttcaacagtggcgacacagaactctggcctcgccattgttgacacccacgactggcctcgctacccccaacgctccaactctcagtcttagccgctcctgtactctcccttgtgcacccagctctgtatcaatttggtatcaaagaaaagcactagggcatttaccaccatgtactgatcttgcggatattgcggcaaagttggattgcatcttagagcagctcaccacccttggcaatcggatggactcccacgacaagcgcattgcgcggatggagaagttctagtctatggaggatgacgtggacctcaccgagaactccgtgcaaccataataacaggattgtagcagccatggtgttgatggcaaaggcgaccatgcccgggatcccttctgtgacaacgacttccatgaagacggctactgtatgcccttggcgaccctagcgatcatcgtttccctcacggacacgctactatttcaccgagtgcgaccctagcgaacacgcgtatgttttctctcgtcttgaactatggtccttctcttcctttagaccaaggtgatagaaggatcccgttacatgattcgaagggttggttgaagcgagtgaaggtcgggtgctgttgtgcagcttgtcctccggggttcccgccagccaagggataccgtatatgatgcctccttcctccatcagggtactgtagccacgccaacgccagcccgaagcttgccattatacttcgtcacgtctcattgtggtttactctaggggtggtaatagacgacgatctaaatgtttctttacaataagttaggacccttaaataattttagttcaaaaataaataggaatagagtccaatcctaattcgattgattcttaaattttatagtgtaaaatctagagctcattatcgcccctaggtttacccggtgtcctttgttgacttcccaactacggagtggttgagccggtcagggacgaagctatattcagcttagggggtgcagatgcaccccctaaaagatacagaactagttataatggtcaaatttttactttatatgtacccccatcacatgatgtttatgcatccataaggtaattgcaccctcctcaacttttctctagcttcgccactggagccggtgttagtctctacgccatgacaagtgacgctcgcatcctgacatactaactcttgtaccgtcattcatgctgcacgcctgtgtcaaagtctggcttacat

SEQ ID NO: 20487 - DNA, 4030 bp, Zea Mays
acgaggcggagtcgccgcacgccctccgctttccgagtgacagccgcactcggccctcgtagctggaggagtgggggcgcgggagagatgataaggatggcggcagcgtctcagccgccatcgtcagccttgcggatgcacgggtgcggcggcgcggcttctgcgtcgtccgcgcccgtgcgcctcttcacggagtcgcggggtagagtcgtggcgtcgattgggaggggcaggaggcggaggcgcgccatctcgtgctgctcgtctccagacgcagatggccctcgccccgccgcgccaccgacctccgcagcgccttccgacgggtcgatacagctctattcccagatcgagagggtaatcacggaggcggcaaagcagtcccgggaaggctggggttcgactggagattggaccgaagtcgagggatcatgggtgttgagaccgaagtccttggagccatcatttgttgtccactttgttggaggaatttttgtcggagccgctccccagatcacataccgcttcttcctcgagtgtctcgcgaacaggggagctttggtgattgctacaccttatgcgagcggctttgaccatttcttcattgcagatgaagttcaatttaagtttgacaggtgtttgagaaacttggatgagcctgtaaatgatctcccaacgtttggtgttggacattcattgggatctgttatccacatgttgattggatcaagatatgctgtgcagcgaagtggaaatgtactgatgtcctttaacaacaaggaggcaagctctgcgatcccactattttcacctgtaattgttcctatggcacagagttttggccctatattctcccaattggcatcgtatccaacaatccgatttggggcagaagcagctattaagcagcttgagaatctaagcccacctgttgttaagcaacttctacctttacttcaacaacttcctccgttgtatatggacctaataaaagggcgggaggacttcattccaaaaccagaagagacacgccgcctgataaaatcctactatggaatttctcggaatctcttaataaagtttaaagatgatcaaattgatgaaacctctacccttgcacaagtactaagctctgaagcagctattagctcattgcttgatatgtcaattcgatcacttcctggggatcatgggttaccattacaacaggttcttcctgatgttccaccagcaatggctgatgcagtgaaccgcggaggtgaacttctgacaaatctgacaacaggcacaccatgggaggctgttgctaaggaggttggcaccactttgggtactgactcaggcattctacgagcacagatctcaaaagacgttgaaactcttgttgatgtaattgcttcatggacatcttcaaattctggtccaagactacttcgcccatgatcacccagcagtctgcgtacagaaatgttagtaacagtgaagagcaacaggatttaatgatgcattgtgagtaacaaaaagatgatacgagacgttggcaattaaggagttatgttaccttggccggtggaggaaggatgcatggcactggcaataggagcttttgtggacaaactatcttaacccattggcaaaggcaagatctccttcccagatattttagtctgtaatcaatttggattaaaggtaaacaatataggcttataaggtgaactaagtaagttaggatatttctccccactaaatgtattaagatcttatattcaagatgactgagtaagagatgctagtaaatggacaatgaaattacgtatcttatattcaagatgactgagtaagagatgctagtaaatggataatgaaattaccctacgtagttatacataataagtgtgaaagggcctctagcctagtggttaaggacttccgagtagcacctccaagtcctgggttcgattccccttggaagcgaattttcaggcttggttaaaaaaattccctcgctgtgccccatccgttctcgggttacgatgtcctatgcgccaccctccggttgggccgttgcagagtggacagttgacgtcggcccgttagtgatggggggccagggttcgggaattttctcggccaggaccattgtttcggtctcttcttaatatattaccgggagggcggtctttcccttcccggccgagttatacataataagtattttacatgaaggcatagagcgtgtttggtttagcttcctgaactagattcgctcataaaaatctagaatctcaaccacacatagattcctctagttcaattcataatcacctcctacctagatttttcagattcttgttatccatgttacaaggtgccatactcttatataatctatagtttcgagttatttcaaccaaacaaattttagttttttcacaattgtcagctcacaacatctttctcacagctcacaactagaatcggatttttcatgattctatagctaaaccaaatagagcctcggtgttcttcacacttcgtagctaatgttgtgtagtggactctaacattattgtcgactcctttgttggtcgacagtataggcaccgtcctaagcgcccttcaggctcaggcgtgtgaggggctggggtggtttaggagagattatagatgtgttcaattattgttaggcaagtgtacctacactacaaagggcactttagattgtaatcaagaattatcgaagaaggaataaacacccacacaagcatgtgtggtttccttcaacagtggcgacacagaactctggcctcgccattgttgacacccacgactggcctcgctacccccaacgctccaactctcagtcttagccgctcctgtactctcccttgtgcacccagctctgtatcaatttggtatcaaagaaaagcactagggcatttaccaccatgtactgatcttgcggatattgcggcaaagttggattgcatcttagagcagctcaccacccttggcaatcggatggactcccacgacaagcgcattgcgcggatggagaagttctagtctatggaggatgacgtggacctcaccgagaactccgtgcaaccataataacaggattgtagcagccatggtgttgatggcaaaggcgaccatgcccgggatcccttctgtgacaacgacttccatgaagacggctactgtatgcccttggcgaccctagcgatcatcgtttccctcacggacacgctactatttcaccgagtgcgaccctagcgaacacgcgtatgttttctctcgtcttgaactatggtccttctcttcctttagaccaaggtgatagaaggatcccgttacatgattcgaagggttggttgaagcgagtgaaggtcgggtgctgttgtgcagcttgtcctccggggttcccgccagccaagggataccgtatatgatgcctccttcctccatcagggtactgtagccacgccaacgccagcccgaagcttgccattatacttcgtcacgtctcattgtggtttactctaggggtggtaatagacgacgatctaaatgtttctttacaataagttaggacccttaaataattttagttcaaaaataaataggaatagagtccaatcctaattcgattgattcttaaattttatagtgtaaaatctagagctcattatcgcccctaggtttacccggtgtcctttgttgacttcccaactacggagtggttgagccggtcagggacgaagctatattcagcttagggggtgcagatgcaccccctaaaagatacagaactagttataatggtcaaatttttactttatatgtacccccatcacatgatgtttatgcatccataaggtaattgcaccctcctcaacttttctctagcttcgccactggagccggtgttagtctctacgccatgacaagtgacgctcgcatcctgacatactaactcttgtaccgtcattcatgctgcacgcctgtgtcaaagtctggcttacat

SEQ ID NO: 20488 - DNA, 1661 bp, Zea Mays
acgaggcggagtcgccgcacgccctccgctttccgagtgacagccgcactcggccctcgtagctggaggagtgggggcgcgggagagatgataaggatggcggcagcgtctcagccgccatcgtcagccttgcggatgcacgggtgcggcggcgcggcttctgcgtcgtccgcgcccgtgcgcctcttcacggagtcgcggggtagagtcgtggcgtcgattgggaggggcaggaggcggaggcgcgccatctcgtgctgctcgtctccagacgcagatggccctcgccccgccgcgccaccgacctccgcagcgccttccgacgggtcgatacagctctattcccagatcgagagggtaatcacggaggcggcaaagcagtcccgggaaggctggggttcgactggagattggaccgaagtcgagggatcatgggtgttgagaccgaagtccttggagccatcatttgttgtccactttgttggaggaatttttgtcggagccgctccccagatcacataccgcttcttcctcgagtgtctcgcgaacaggggagctttggtgattgctacaccttatgcgagcggctttgaccatttcttcattgcagatgaagttcaatttaagtttgacaggtgtttgagaaacttggatgagcctgtaaatgatctcccaacgtttggtgttggacattcattgggatctgttatccacatgttgattggatcaagatatgctgtgcagcgaagtggaaatgtactgatgtcctttaacaacaaggaggcaagctctgcgatcccactattttcacctgtaattgttcctatggcacagagttttggccctatattctcccaattggcatcgtatccaacaatccgatttggggcagaagcagctattaagcagcttgagaatctaagcccacctgttgttaagcaacttctacctttacttcaacaacttcctccgttgtatatggacctaataaaagggcgggaggacttcattccaaaaccagaagagacacgccgcctgataaaatcctactatggaatttctcggaatctcttaataaagtttaaagatgatcaaattgatgaaacctctacccttgcacaagtactaagctctgaagcagctattagctcattgcttgatatgtcaattcgatcacttcctggggatcatgggttaccattacaacaggttcttcctgatgttccaccagcaatggctgatgcagtgaaccgcggaggtgaacttctgacaaatctgacaacaggcacaccatgggaggctgttgctaaggaggttggcaccactttgggtactgactcaggcattctacgagcacagatctcaaaagacgttgaaactcttgttgatgtaattgcttcatggacatcttcaaattctggtccaagactacttcgcccatgatcacccagcagtctgcgtacagaaatgttagtaacagtgaagagcaacaggatttaatgatgcattgtgagtaacaaaaagatgatacgagacgttggcaattaaggagttatgttaccttggccggtggaggaaggatgcatggcactggcaataggagcttttgtggacaaactatcttaacccattggcaaagtggtcttcatggtactatcccg

SEQ ID NO: 20489 - DNA, 1927 bp, Zea Mays
acgaggcggagtcgccgcacgccctccgctttccgagtgacagccgcactcggccctcgtagctggaggagtgggggcgcgggagagatgataaggatggcggcagcgtctcagccgccatcgtcagccttgcggatgcacgggtgcggcggcgcggcttctgcgtcgtccgcgcccgtgcgcctcttcacggagtcgcggggtagagtcgtggcgtcgattgggaggggcaggaggcggaggcgcgccatctcgtgctgctcgtctccagacgcagatggccctcgccccgccgcgccaccgacctccgcagcgccttccgacgggtcgatacagctctattcccagatcgagagggtaatcacggaggcggcaaagcagtcccgggaaggctggggttcgactggagattggaccgaagtcgagggatcatgggtgttgagaccgaagtccttggagccatcatttgttgtccactttgttggaggaatttttgtcggagccgctccccagatcacataccgcttcttcctcgagtgtctcgcgaacaggggagctttggtgattgctacaccttatgcgagcggctttgaccatttcttcattgcagatgaagttcaatttaagtttgacaggtgtttgagaaacttggatgagcctgtaaatgatctcccaacgtttggtgttggacattcattgggatctgttatccacatgttgattggatcaagatatgctgtgcagcgaagtggaaatgtactgatgtcctttaacaacaaggaggcaagctctgcgatcccactattttcacctgtaattgttcctatggcacagagttttggccctatattctcccaattggcatcgtatccaacaatccgatttggggcagaagcagctattaagcagcttgagaatctaagcccacctgttgttaagcaacttctacctttacttcaacaacttcctccgttgtatatggacctaataaaagggcgggaggacttcattccaaaaccagaagagacacgccgcctgataaaatcctactatggaatttctcggaatctcttaataaagtttaaagatgatcaaattgatgaaacctctacccttgcacaagtactaagctctgaagcagctattagctcattgcttgatatgtcaattcgatcacttcctggggatcatgggttaccattacaacaggttcttcctgatgttccaccagcaatggctgatgcagtgaaccgcggaggtgaacttctgacaaatctgacaacaggcacaccatgggaggctgttgctaaggaggttggcaccactttgggtactgactcaggcattctacgagcacagatctcaaaagacgttgaaactcttgttgatgtaattgcttcatggacatcttcaaattctggtccaagactacttcgcccatgatcacccagcagtctgcgtacagaaatgttagtaacagtgaagagcaacaggatttaatgatgcattgtgagtaacaaaaagatgatacgagacgttggcaattaaggagttatgttaccttggccggtggaggaaggatgcatggcactggcaataggagcttttgtggacaaactatcttaacccattggcaaagaaacattacgcttcttaacagctggcataaagtcatcgtcatcagaatccacctctattgtttctttgatcaaagtttgactgtcaacatttggaggatttcccacaatttgacttggattggactgttctgcgcacggaatgtcaacgctgaaacactcctggcttgactgaattgttatacgtttgggattattcggaggacggtccacgtgcttcatgttttttagtcaaaattgcatgcataatacacagaactctaaacattaatctgttggatatgcggatg

SEQ ID NO: 20490 - DNA, 1872 bp, Zea Mays
acgaggcggagtcgccgcacgccctccgctttccgagtgacagccgcactcggccctcgtagctggaggagtgggggcgcgggagagatgataaggatggcggcagcgtctcagccgccatcgtcagccttgcggatgcacgggtgcggcggcgcggcttctgcgtcgtccgcgcccgtgcgcctcttcacggagtcgcggggtagagtcgtggcgtcgattgggaggggcaggaggcggaggcgcgccatctcgtgctgctcgtctccagacgcagatggccctcgccccgccgcgccaccgacctccgcagcgccttccgacgggtcgatacagctctattcccagatcgagagggtaatcacggaggcggcaaagcagtcccgggaaggctggggttcgactggagattggaccgaagtcgagggatcatgggtgttgagaccgaagtccttggagccatcatttgttgtccactttgttggaggaatttttgtcggagccgctccccagatcacataccgcttcttcctcgagtgtctcgcgaacaggggagctttggtgattgctacaccttatgcgagcggctttgaccatttcttcattgcagatgaagttcaatttaagtttgacaggtgtttgagaaacttggatgagcctgtaaatgatctcccaacgtttggtgttggacattcattgggatctgttatccacatgttgattggatcaagatatgctgtgcagcgaagtggaaatgtactgatgtcctttaacaacaaggaggcaagctctgcgatcccactattttcacctgtaattgttcctatggcacagagttttggccctatattctcccaattggcatcgtatccaacaatccgatttggggcagaagcagctattaagcagcttgagaatctaagcccacctgttgttaagcaacttctacctttacttcaacaacttcctccgttgtatatggacctaataaaagggcgggaggacttcattccaaaaccagaagagacacgccgcctgataaaatcctactatggaatttctcggaatctcttaataaagtttaaagatgatcaaattgatgaaacctctacccttgcacaagtactaagctctgaagcagctattagctcattgcttgatatgtcaattcgatcacttcctggggatcatgggttaccattacaacaggttcttcctgatgttccaccagcaatggctgatgcagtgaaccgcggaggtgaacttctgacaaatctgacaacaggcacaccatgggaggctgttgctaaggaggttggcaccactttgggtactgactcaggcattctacgagcacagatctcaaaagacgttgaaactcttgttgatgtaattgcttcatggacatcttcaaattctggtccaagactacttcgcccatgatcacccagcagtctgcgtacagaaatatgatacgagacgttggcaattaaggagttatgttaccttggccggtggaggaaggatgcatggcactggcaataggagcttttgtggacaaactatcttaacccattggcaaagaaacattacgcttcttaacagctggcataaagtcatcgtcatcagaatccacctctattgtttctttgatcaaagtttgactgtcaacatttggaggatttcccacaatttgacttggattggactgttctgcgcacggaatgtcaacgctgaaacactcctggcttgactgaattgttatacgtttgggattattcggaggacggtccacgtgcttcatgttttttagtcaaaattgcatgcataatacacagaactctaaacattaatctgttggatatgcggatg

SEQ ID NO: 20491 - DNA, 1912 bp, Zea Mays
acgaggcggagtcgccgcacgccctccgctttccgagtgacagccgcactcggccctcgtagctggaggagtgggggcgcgggagagatgataaggatggcggcagcgtctcagccgccatcgtcagccttgcggatgcacgggtgcggcggcgcggcttctgcgtcgtccgcgcccgtgcgcctcttcacggagtcgcggggtagagtcgtggcgtcgattgggaggggcaggaggcggaggcgcgccatctcgtgctgctcgtctccagacgcagatggccctcgccccgccgcgccaccgacctccgcagcgccttccgacgggtcgatacagctctattcccagatcgagagggtaatcacggaggcggcaaagcagtcccgggaaggctggggttcgactggagattggaccgaagtcgagggatcatgggtgttgagaccgaagtccttggagccatcatttgttgtccactttgttggaggaatttttgtcggagccgctccccagatcacataccgcttcttcctcgagtgtctcgcgaacaggggagctttggtgattgctacaccttatgcgagcggctttgaccatttcttcattgcagatgaagttcaatttaagtttgacaggtgtttgagaaacttggatgagcctgtaaatgatctcccaacgtttggtgttggacattcattgggatctgttatccacatgttgattggatcaagatatgctgtgcagcgaagtggaaatgtactgatgtcctttaacaacaaggaggcaagctctgcgatcccactattttcacctgtaattgttcctatggcacagagttttggccctatattctcccaattggcatcgtatccaacaatccgatttggggcagaagcagctattaagcagcttgagaatctaagcccacctgttgttaagcaacttctacctttacttcaacaacttcctccgttgtatatggacctaataaaagggcgggaggacttcattccaaaaccagaagagacacgccgcctgataaaatcctactatggaatttctcggaatctcttaataaagtttaaagatgatcaaattgatgaaacctctacccttgcacaagtactaagctctgaagcagctattagctcattgcttgatatgtcaattcgatcacttcctggggatcatgggttaccattacaacaggttcttcctgatgttccaccagcaatggctgatgcagtgaaccgcggaggtgaacttctgacaaatctgacaacaggcacaccatgggaggctgttgctaaggaggttggcaccactttgggtactgactcaggcattctacgagcacagatctcaaaagacgttgaaactcttgttgatgtaattgcttcatggacatcttcaaattctggtccaagactacttcgcccatgatcacccagcagtctgcgtacagaaatgttagtaacagtgaagagcaacaggatttaatgatgcattatgatacgagacgttggcaattaaggagttatgttaccttggccggtggaggaaggatgcatggcactggcaataggagcttttgtggacaaactatcttaacccattggcaaagaaacattacgcttcttaacagctggcataaagtcatcgtcatcagaatccacctctattgtttctttgatcaaagtttgactgtcaacatttggaggatttcccacaatttgacttggattggactgttctgcgcacggaatgtcaacgctgaaacactcctggcttgactgaattgttatacgtttgggattattcggaggacggtccacgtgcttcatgttttttagtcaaaattgcatgcataatacacagaactctaaacattaatctgttggatatgcggatg

SEQ ID NO: 20492 - DNA, 1169 bp, Zea Mays
ggcagtctagggatggaaagaggaggagcagtcgagcggggcgtgtttgatctgccgggcgcagcgactgcgggggaacgattgctttagagatgttttagttgtataggttacacgacggctggtcaatttcttaccaacgggtttacgcgcgcaggctggacggcaaggtagcgctgatcaccggcggcgccagcggcatcggggagtgcacggcgcggctcttcgtgaagcacggcgcgcgcgtcgttgtggcggacatccaggacgagcctggctcccgcctctgcgccgagctgggagccgacgccgccagctacgtgcactgcgacgtcaccgtcgaggacgacgtcgcggcggccgtggaccatgccgtggcccggttcggtgcgctggacatcatgttcaacaacgccggcatcggcggagcggcgtgccacaacatccgagagaacaccaaggaggacttcgagcgcgtgctgtccgtcaacctcgtcggcccgttcctgggcaccaagcacgcggcgcgggtcatggtgcccgccggccgcggtggctgcatcatcggcacgtccagcctggcatccgcggtggccggcgccgcgtcgcacgcgtacacgtgcgccaagcgcgcgctcgtggcgctcacggagaacgccgcggcggagctggggcgccatgggatccgggtcaactgcgtctcacccgccgcggccgccacacccctcgccacggggtatgtgggactggagggggaatcgttcgagcaagccatggaggccgttgccaacctcaagggtgtgcgcctgcgggtggcggacatttcagccgccgtgctctacctcgccagcgacgacgcacggtacattagcggacacaacctgctcctcgacgggggtttctccatcgtcaacccgtcctttgggatcttcaaagactgagctcgagcggtggacagagtcacagatatctctgtgattgcttggcagtgtgtgtttgctctgtgattgatcggcagagatctgctccagttccatgctttcgtacagagctattgattgtgacggcctcaattttagtttttattcggactatggttattacgtactacctcactcgctccgttcacaaatgtataacaccgtaattatttttcgagaactctatca

SEQ ID NO: 20493 - DNA, 1644 bp, Zea Mays
aattcaggcgaggccgacgggctcgcagcgcccgcggggcatccaagagcaggaggggataaagcagccctgcagcagctccctccttcacaagcgacgcgaagcaccgaggagaggcggcgagagttcttggtcggctagatggaaaaggcgggccagaagcggcggccgctgacggtgatggcatcctcatcgtcgcaggtggcagcagcgcggggcatgggcatgaccaacccactggcggagtggaccgaccgcgtcaggtcgctggaggccggcgtgcgggcgtggctagcgaagcagcccacccacgtcgaggccgccgtggtcacggcggtcggcgccgtgcagggcgccgcgctcggcgggctcatgggcacgcttgcgcccgacggcggggccgcgcttcctgtgccgccgccgccgccggggaccgacccaaaggtcttggcctccttcaagcaagcgcaggctttagcgggtggacccctggtgcaagcacgaaactttgcggtcatgactggtgcgaatgctggcatatcttgtgtcatgagaaggataagaggagtggaggatgtccagggcagtcagctatggtctaccccaacttgtttgggattggaaggctttgttgttgttgttgttgttgtgagctataatgcagcaatccattcagcttaatctttttccaagaaaaataaatcagattgcacatttaattccagttgaactcgttgtgctcaaattgcactattgcagttatcttcaacaggtttgtttagatgtctgtctcagttatagatcatttttttatttacatgattgacgatttcctcttctgcatgtagcatggcagcagcttttggttctggggctctattctccatcgtgagtggaatggggaccccaaatccagtagctaatgcaattacaactggtgttggttttgctgtatttcaaggtggttttttcatgatctctcaaaaattttcacagccacagagtggagatacatactattctcgtggaagaagcatgctgcaaaagttaggccttcagaactatgagaagaacttcaagaagggtctcctaactgatcaaaccttgccccttcttacggacagtgctctcagagatgtgaagatcccgcctggccccaggctcctcatacttgatcacattaaaagagatccagagttgacaaaagcaaattaagtgatcggcactgcggcactgcctcacggtgccagttcttttccccctcgagttgcagaaattggaccaggagaaccgtttaatttagctattcagtgacgacctctttggagcagtatttggttgtgcttactagtatatgttttctagtcatcattcacgcttttttttgagccgaagtgtttgcaaatcactctgatcttggaatgacagaattttgtattctcaaaggtttatgctgatcaatccagattttactactagtttagggatgtcaaacgaagggaaactgcaattcgcacattttatttggcttctggatggtagtttggttctgatctgtaacgtttagccctttgctaagctgtgtcctgcataaggctttgcggcctgattaatataagcacacatgttggaatttcaaatgaa

SEQ ID NO: 20494 - DNA, 2684 bp, Zea Mays
tttaatttactcttctgttattatttgcaagtttcctttataaaaaagaacagttgcaggtcccatgagagctttgatgtatgttgtacattgcacaccttacttctatagatgtttaatattctccctgcctgcctccagtagtcaatgacaactagcttaacaattaaccttacttatctgtactttacaagttttctttgtcctgagctatgatgcagcgctaagcatagcaggtcccaaaccctagtaaaggaagaggttgtgatagctttcaaaccaacgctataccttgtcatcttaatggagacgaaacctgaaagaaatccgttggagcgcaactctcctaacgacgcgccatattggaacctggatatggtcttaaataagaaagggttgtgtcgcaacttccttggtgacgtgtcgtgtcataatctaagcactatgtcaagtgagctgggcactatgttaattagacgagccggactatgaagttatgtgagagagttaaagcattgtctaggagaaataatgggaatctctataaaccaattttgtttttatgttcggaaggtcaaccatataagctattttcttaataagacaagtgattatatggaacaaaagaaggacctacacatggtttttattgatttggagaaggcttacgacaaaataccacaataccaaggaatgttatgtgatgggctttggacaaacataaagttttaacaaagtatattaaactcattaaggatatgcataccaatgttgtgactagcgtttgaacaagttatggagacatggatgacttcttgactagaataggactatatctagggtctgttttgagcccttagatgatgaatgaggtcacaaaggatatacaaggagatatcttttggtgaatggtttttatggatgatgtaatgctagttgatgaaaattggacagaactaaataggatagagttatggcgggggagactctagagtccaaaggttttagactcaatagaacttaaatcgaaatatatgagatgttactttggcactactacacaaaggaagaagatgttaatttgaaaggtcaagtagtgcccccaaaaaggatacatttttggtatttaggataattgctacagaaagacgaggatattaatgaagatgttagctataggattaaagaagggtggatgaagtggcgtcaaacatctagcgtttttatgtgacaagagcgtgctacaaaagttaaagacaagttttataggacgacaattagacctacaacgttgtatggtgtagaatattggtctacaaaaagacgacatgttcaatagataattgttgcgaaatacgtatgttgcgttggatttgtggccatacaagaagggatcgagtctaggacaatgacatacatgataggctaggaggtgcaccaattgaagaaaagcttgtccaacactggttgagatggcttagacatatccaacgaagaccgttcaagacaccaatgcgtagtggaatcctaagacgtaacagaaatgtgaagagaagcaggagaagaccgaagttgacatgggaagagacagtaaaggaagacttaaaaggatgaaatatatccaaagatttagccttcaataggagttcaaggaaaataactattcatgtgctttaaccttgacttatggtttgtgttgggtttcagctatggtctaccccaacttgtttgggattggaaggctttgttgttgttgttgttgttgtgagctataatgcagcaatccattcagcttaatctttttccaagaaaaataaatcagattgcacatttaattccagttgaactcgttgtgctcaaattgcactattgcagttatcttcaacagcatggcagcagcttttggttctggggctctattctccatcgtgagtggaatggggaccccaaatccagtagctaatgcaattacaactggtgttggttttgctgtatttcaaggtggttttttcatgatctctcaaaaattttcacagccacagagtggagatacatactattctcgtggaagaagcatgctgcaaaagttaggccttcagaactatgagaagaacttcaagaagggtctcctaactgatcaaaccttgccccttcttacggacagtgctctcagagatgtgaagatcccgcctggccccaggctcctcatacttgatcacattaaaagagatccagagttgacaaaagcaaattaagtgatcggcactgcggcactgcctcacggtgccagttcttttccccctcgagttgcagaaattggaccaggagaaccgtttaatttagctattcagtgacgacctctttggagcagtatttggttgtgcttactagtatatgttttctagtcatcattcacgcttttttttgagccgaagtgtttgcaaatcactctgatcttggaatgacagaattttgtattctcaaaggtttatgctgatcaatccagattttactactagtttagggatgtcaaacgaagggaaactgcaattcgcacattttatttggcttctggatggtagtttggttctgatctgtaacgtttagccctttgctaagctgtgtcctgcataaggctttgcggcctgattaatataagcacacatgttggaatttcaaatgaa

SEQ ID NO: 20495 - DNA, 1876 bp, Zea Mays
gtcccgtctcccgattcatcagatcccgacgcccccaccgacgccgttcactgttccctccgtccaaaaataaatccagcgtagaaacttgaaagatgaataaaactgctcctacgaaacgttcgcctgaaacccacacaggtgctgcggatggggaagaagcataggttctcaaagcctgaacggcgcgcggctgggggcatcggttgcgtctgcgtgtgctcgtccgatcgatcgaagtgacacccatgttgctgatgatcatcgtggatgacgccgggtcattcattccggcgatgaaccactccccctgggatggcgtaacagtggccgacttcgtcatgcctttcttcctcttcatcgtcggagtcgccctggcgctcgcgtacaagagagtcccggacaagttggacgccacgaaaaaggcagtgctccgtgcactgaagctgttttgtcttggtcttgtcctacaaggtggtttttttcatggtgttcgcagtctaacttttggtgtcgaccttcaagaaatacgtctgatgggtatacttcagagaattgcaatagcttatctgttgactgccctatgtgaaatttggctcaagggagatgaagatgtagattatggatacgatttgctcaagcgataccgctaccaactgttcgtaggcgcaatcgtggggatcacatacatgtctctgttgtacggtacatatgtccgtgactgggagtaccagacatcaggccctggctccatagagaagtctttctttgtgaaatgtggagtaagaggtgacaccagcccaggctgcaacgcggttggcatgatcgaccgtagaatcttgggtatccagcatctctacgggcggccagtttatgcacgatccaagcaatgcagcatcgactcgccacaaaatggcccccttcctcctgatgctccctcttggtgccaggcccccttcgaccctgaagggcttcttagttccgtgatggccattgtcacatgcttgattgggctccaatacggacacgtcatcgtacattttcagaaacacagggagaggataatgaactggctaatcccttccttcagcatgctggtcctagccttcgccatggacttccttggactgcgcatgaacaagccattatacaccctaagctacaccttagccaccgctggcgccgcagggctcctcttctgcggaatctacacgctggtcgacatctacgggtatcggcggccgaccgtcgccatggaatggatggggatgcacgcgctgatgatatacgtcctgatcgcttgcaacatcttgcccatattcatccacggcttctattggaaggagccccaaaacaaccttctgaagttcatcggaattggaccatgaggtgatgaactgatgacggacggtacatcgaatgcggatattaggagtctactccgacagagatagagaaacacgtgcattcaggccaagttttgctatacggccaatgcatcattgctgcgcacagagtgcgtctcttgtatatgataaaaagcctgctgtatataatgacgataccgtttggaaggaaaaatatagtagtatagagatcttacgtgaatgacggcggaaattctcaccgaagtcgcaaaattgtcacgatagtccgcgcagggggcgagcgcgcagctccatactgggatagagccactcggctcataatttgttgtgtttagattgattatatgtagaacgtagtggttttaaaatagaaaattatatttaaatgttcaaccatttagctgctcaaaatctcttgaacggagccgctcccggaacggagccgctccattccaaccggcgccggaaccaaatgctacctacaaaac

SEQ ID NO: 20496 - DNA, 1651 bp, Zea Mays
atctgatgccacaccaccatatatgcagcctgatgatcatcgtggatgacgccgggtcattcattccggcgatgaaccactccccctgggatggcgtaacagtggccgacttcgtcatgcctttcttcctcttcatcgtcggagtcgccctggcgctcgcgtacaagagagtcccggacaagttggacgccacgaaaaaggcagtgctccgtgcactgaagctgttttgtcttggtcttgtcctacaaggtggtttttttcatggtgttcgcagtctaacttttggtgtcgaccttcaagaaatacgtctgatgggtatacttcagagaattgcaatagcttatctgttgactgccctatgtgaaatttggctcaagggagatgaagatgtagattatggatacgatttgctcaagcgataccgctaccaactgttcgtaggcgcaatcgtggggatcacatacatgtctctgttgtacggtacatatgtccgtgactgggagtaccagacatcaggccctggctccatagagaagtctttctttgtgaaatgtggagtaagaggtgacaccagcccaggctgcaacgcggttggcatgatcgaccgtagaatcttgggtatccagcatctctacgggcggccagtttatgcacgatccaagcaatgcagcatcgactcgccacaaaatggcccccttcctcctgatgctccctcttggtgccaggcccccttcgaccctgaagggcttcttagttccgtgatggccattgtcacatgcttgattgggctccaatacggacacgtcatcgtacattttcagaaacacagggagaggataatgaactggctaatcccttccttcagcatgctggtcctagccttcgccatggacttccttggactgcgcatgaacaagccattatacaccctaagctacaccttagccaccgctggcgccgcagggctcctcttctgcggaatctacacgctggtcgacatctacgggtatcggcggccgaccgtcgccatggaatggatggggatgcacgcgctgatgatatacgtcctgatcgcttgcaacatcttgcccatattcatccacggcttctattggaaggagccccaaaacaaccttctgaagttcatcggaattggaccatgaggtgatgaactgatgacggacggtacatcgaatgcggatattaggagtctactccgacagagatagagaaacacgtgcattcaggccaagttttgctatacggccaatgcatcattgctgcgcacagagtgcgtctcttgtatatgataaaaagcctgctgtatataatgacgataccgtttggaaggaaaaatatagtagtatagagatcttacgtgaatgacggcggaaattctcaccgaagtcgcaaaattgtcacgatagtccgcgcagggggcgagcgcgcagctccatactgggatagagccactcggctcataatttgttgtgtttagattgattatatgtagaacgtagtggttttaaaatagaaaattatatttaaatgttcaaccatttagctgctcaaaatctcttgaacggagccgctcccggaacggagccgctccattccaaccggcgccggaaccaaatgctacctacaaaac

SEQ ID NO: 20497 - DNA, 1869 bp, Zea Mays
atgtcgatttgtgcaataacaaggcttgagcagggagtagaagacaacatggatattttggctatggggaagggacaaaattcagtgtctctgactggtgctatgaaccagaccaggtgcaatgactgtggtatggatcagaaatggacaaatcagatatttgactgttggaatggcccaagttcagtgttcctggctatacctatgagcctgtgttggactggtgcatggaagccatgttggtcagcccatatactgctggcacctcaagaatacttcctcactgcatgtggagcagatcagggacacctgcccttggtcaaggttaattctctccccagccctaggtttgtcgtaacccagagcctggcacgccagcacctagacgtggtgaccaaagccgcccgagtgctcacctcaccgtggccagaattcccagaagaagaagaagatgaaattcaagaagtgatttctgaagaggagtctgcttcagtgcctgatcatcaagtgatgggagccatctaactggggtttaatagagggatctagaactccgtctctgcaacaaaggcaagctccagtgcatgcaaccccttccttgtgtttttaaatgatttttacacactttaagtctagtgatatgtgcattaggtttataggagttgtttggaaaccctttgatgcattgactaccttgatatccattcctgttataggtacttctttggaagtatcaaatattgtttacaaaaatacttagccctgattagatcttgtggatagaggttgtcttttgcattaatgcctagctcagggggtatcctgaggaaggatgacttctacctgcaagaatattttcattgggagcatggtgggatcttactgcaaagttccctataatgctcttttcatcctaaggaacacaaacaatcctaaggatggaagtacttaaatcgggacttggaagaggaacaggtgatgctccacccaggttaattaaggattggatgcgtatgtaggcctgtatgatcaaggactatcttaactggcgacatgccctggatatgggacagggtaagcttgaacccgactattccatacatgaaaagacaatcgcgcactgggagtggagagatggcgagagtggcacataccctcctggcaaaggaccgcctaaaaggggtggtgagctctcgggtggcgcggacctattcatgcagtggaggatccgtgggaatggtagacatatgcaagagttacaataaacatatgtcgtgtggttagagaccctcagctgagtaaatcgattcggatcgccgttatatccccggagagtggagacttgatctctgacctgcaacctaagtcaggatgtaaacattatgagtaaaaaatgatgttgtattgatgagatggtgaaattagactagatgcaaccagagtctattaatatttaatctggcgttaaaatattgaaagtaaggactcactttagtaagctatttctgcaaaagtatctaagttgattctttctaaagccttttccttggttcctatttaaccaacatatccttgagagtcatttttccttagtcgggtaagacttgcgaaagtacacttcgtactcagggttttcgaacccatgttgttgtaggtgatgaggagtactctaggtgttcctgtggctggagggcgtttccagttctggaggaggattagttaggcttgtgtataagctttggagggttcctaccttcctgctattgtaataagttatgcactttgagtatattaggacttgtaataaatgtaactcttcctatgtaataaccttcagttttagaaatgaaaagaatgttttgtaaagtc

SEQ ID NO: 20498 - DNA, 780 bp, Zea Mays
ccaaaaccatagtaaccctacccttttgaaactcatggatcctataaatggtcttcgagtcctgatcattgatgaagataaagatgatgcaaaccatatgaaggacatgctccatcaatacaactttcatggccctggagctaatacagatggagaacaaagtaatgccacaaactcttctactaataaagagtatatgaataacgatatttatgaagtgcaaagctccacaggaagcaattcagtagatatgggccttgtgaactatccagaatctgaagatggtgaaactgtggagaaatgtcctaatgcataccaagaccctgaagttggcacatctcccaacaactaaagctacacctagattatgttgcattatggaggcgcatcaatttggacatagtagaatcaataattactatgatctaatatgagactaaataatcaataatagccatagtaatgctaatggaaatacatgtatcttcatgtaaaacaagatcctatgttcaaaacccatacataatgcaatgcccttttatagtagtaagttccttgttctattttcacaccattgttggtctttttattaatcatgacacagtagtataattatgcacatctatgatttttctcatggtggatttagcgaatcaatttacatgttgatgtatttgtttataaactgggttaaagttaagaccgatttatgacaaaccaaaacatcttatattgtggaactaaggaagtaatttagatatttaagtaatatgtgacaac

SEQ ID NO: 20499 - DNA, 2727 bp, Zea Mays
aaacagcagtgtcattatcgaggtgcctagtgactggttagatttggtatatcaaatcagatcacaggaaacattcagatctcatttaagaaaactaaaacaaaaaacggagaaaaatcaggtgattgcttcctttcctctctctccgttgcccaccacccccaagcccgcgatatattcggcgcagcccacaccttccagcgaatttccgtcacccatctccgcaccgcacccgcaacgcgtctctcttcctctcctggtcctcctgccactccgcctcaacttgctcggctattcccggattgcggctcggggttggtcattggccgtgagggcctttcaagaacgggcggcggcgctttacctgacgcaaattgcgccggtctcctgccttgctgcgcgcttgggggttgggctcaggaatgggggtagagcaggggctgcgtcgcctggctcgattcccatctctctgaacttagatggatgcatctgtaaacaccaagaagaaggttagtttctgtgggaacactggccacagccgctgcggtgaagttcatttagctgctgtgtgctcaggtttggtttgcatttccgttcaagtataaaggaagtagtatttgccattttggcatagcatttgaatagcacaggaacctagaaaacagtgttccagcagtactacgttacactggtgttatactattatagaaaacatggtggatgtggaactgttttataaggacactagtgatcacagcattagctctgaggaagaagatatgcttgtcaggagctgtagcaatctcaatgtgagctttggatatcattgtgattcttatcagagcttttctcctgaaaatgatcatggaaatgacatttctcctaagaacatgtttgggactaatacgatgatggggtcacggaatggctcatttacttgtttgtccggtgctgctattagtgcaaattttacattggcaaatacaaatatttgcaatggtcttattggcgaagaaattttaccagaactagattctccaaactccttcagaaaaattatttcatctccatcaatgtcaagattggactcgttctctacctcacaaggcagtcctgtgtcaactgagagctcaatatttgagatcagtaaaaatatttggaggtccagtgccccaacaactgtatcatccaattttctgactaatacagaggtgaaaatggctggcggagctgctggagaggatagagtccaagctgtgtgctcagagaaaaatggatggctgatttgtgggatatatgatgggtttaatgggagggatgcagctgattttcttgcggtaactctatatgataacatagtatattacttatacctgctggagaatcggataaggcaacaaaatggtttgtacaattcatcagaaagctctcttaatggtctcaaaagtgagttaacactagccatgagaaattcagaaaatgaaggcataaaattttctgaaacatttcgatctggtgtactgaattgcctttctactgctgttgagcaagctgagaatgactttttatgcatggttgaacaagagatggatgatagaccagatttagtttcggtagggtcttgtatcctggttgttcttcttcaaggaacagatctgtgcatcttaaatatgggggacagtagagctgtgcttgcttccatgccatatgtagaaaatggtgctttgaaggctactcaactgacagagacccactcgcttgaaaatcctttggagtaccaaaaacttttagctgaacatcccaatgattcttcagttgtcaggggtaacaaaataaaaggaaagctgaaggttactcgtgcttttggagttggctatctaaagcagaggaagttcaacgacgcactcatgggcattctgcgagtccgcgatttgagcagccctccatatgtttacacaaatccacacacattgagtcacaaagttacagatgatgatttgtttgttgtgcttggtagtgatggcttatttgatttcttcagcaatgatgaagttgttcggttggtttatcaatttatgcatgataatccaatgggggatcctgcaaaatatcttattgagcaacttatactcaaagcagccaaggaagcagctctaacagccgaagaattgatgaggatacctgttgggagtaggagaaagtaccacgatgatgtgactgtcattgttatcatccttggaaatgcacagaggacgatgactgcatcaacttccttgtgaaagaatggagaggtagagagacgggggctatcagctggtaaatttttgtgggttttttgcatacatgtattccaaaatacaattttttttcctgggaatcgcgtggtagtcaataaaaccaaataaaaatgtatatattgtttcgaaatttgggaagtgaacagaaccttttgttaaatcacagggtgcacctgggttcgtttgacctacttctgtacatgaatcaaacatggaggctcgtacttgagctaatgagtccatgagcagagtggtagatcgtttcagtttccgtctgccaattttttttctctgctaataagtatgtgctgtttgtgttgatcttagaattatgactcatggtccgaactcacttgaattgaagtctggttttctattttcttgccccgacaatattgtcaaatgtttatatttccaaaataaaagggga

SEQ ID NO: 20500 - DNA, 1958 bp, Zea Mays
ggtgcctagtgactggttagatttggtatatcaaatcagatcacaggaaacattcagatctcatttaagaaaactaaaacaaaaaacggagaaaaatcaggtgattgcttcctttcctctctctccgttgcccaccacccccaagcccgcgatatattcggcgcagcccacaccttccagcgaatttccgtcacccatctccgcaccgcacccgcaacgcgtctctcttcctctcctggtcctcctgccactccgcctcaacttgctcggctattcccggattgcggctcggggttggtcattggccgtgagggcctttcaagaacgggcggcggcgctttacctgacgcaaattgcgccggtctcctgccttgctgcgcgcttgggggttgggctcaggaatgggggtagagcaggggctgcgtcgcctggctcgattcccatctctctgaacttagatggatgcatctgtaaacaccaagaagaaggttagtttctgtgggaacactggccacagccgctgcggtgaagttcatttagctgctgtgtgctcaggtcgtatgcgaagcaaccccttctcgcttcagaggtgaaaatggctggcggagctgctggagaggatagagtccaagctgtgtgctcagagaaaaatggatggctgatttgtgggatatatgatgggtttaatgggagggatgcagctgattttcttgcggtaactctatatgataacatagtatattacttatacctgctggagaatcggataaggcaacaaaatggtttgtacaattcatcagaaagctctcttaatggtctcaaaagtgagttaacactagccatgagaaattcagaaaatgaaggcataaaattttctgaaacatttcgatctggtgtactgaattgcctttctactgctgttgagcaagctgagaatgactttttatgcatggttgaacaagagatggatgatagaccagatttagtttcggtagggtcttgtatcctggttgttcttcttcaaggaacagatctgtgcatcttaaatatgggggacagtagagctgtgcttgcttccatgccatatgtagaaaatggtgctttgaaggctactcaactgacagagacccactcgcttgaaaatcctttggagtaccaaaaacttttagctgaacatcccaatgattcttcagttgtcaggggtaacaaaataaaaggaaagctgaaggttactcgtgcttttggagttggctatctaaagcagaggaagttcaacgacgcactcatgggcattctgcgagtccgcgatttgagcagccctccatatgtttacacaaatccacacacattgagtcacaaagttacagatgatgatttgtttgttgtgcttggtagtgatggcttatttgatttcttcagcaatgatgaagttgttcggttggtttatcaatttatgcatgataatccaatgggggatcctgcaaaatatcttattgagcaacttatactcaaagcagccaaggaagcagctctaacagccgaagaattgatgaggatacctgttgggagtaggagaaagtaccacgatgatgtgactgtcattgttatcatccttggaaatgcacagaggacgatgactgcatcaacttccttgtgaaagaatggagaggtagagagacgggggctatcagctgggtgcacctgggttcgtttgacctacttctgtacatgaatcaaacatggaggctcgtacttgagctaatgagtccatgagcagagtggtagatcgtttcagtttccgtctgccaattttttttctctgctaataagtatgtgctgtttgtgttgatcttagaattatgactcatggtccgaactcacttgaattgaagtctggttttctattttcttgccccgacaatattgtcaaatgtttatatttccaaaataaaagggga

SEQ ID NO: 20501 - DNA, 1163 bp, Zea Mays
ggtgcctagtgactggttagatttggtatatcaaatcagatcacaggaaacattcagatctcatttaagaaaactaaaacaaaaaacggagaaaaatcaggtgattgcttcctttcctctctctccgttgcccaccacccccaagcccgcgatatattcggcgcagcccacaccttccagcgaatttccgtcacccatctccgcaccgcacccgcaacgcgtctctcttcctctcctggtcctcctgccactccgcctcaacttgctcggctattcccggattgcggctcggggttggtcattggccgtgagggcctttcaagaacgggcggcggcgctttacctgacgcaaattgcgccggtctcctgccttgctgcgcgcttgggggttgggctcaggaatgggggtagagcaggggctgcgtcgcctggctcgattcccatctctctgaacttagatggatgcatctgtaaacaccaagaagaaggttagtttctgtgggaacactggccacagccgctgcggtgaagttcatttagctgctgtgtgctcaggtcgtatgcgaagcaaccccttctcgcttcagctctaacagccgaagaattgatgaggatacctgttgggagtaggagaaagtaccacgatgatgtgactgtcattgttatcatccttggaaatgcacagaggacgatgactgcatcaacttccttgtgaaagaatggagaggtagagagacgggggctatcagctggtaaatttttgtgggttttttgcatacatgtattccaaaatacaattttttttcctgggaatcgcgtggtagtcaataaaaccaaataaaaatgtatatattgtttcgaaatttgggaagtgaacagaaccttttgttaaatcacagggtgcacctgggttcgtttgacctacttctgtacatgaatcaaacatggaggctcgtacttgagctaatgagtccatgagcagagtggtagatcgtttcagtttccgtctgccaattttttttctctgctaataagtatgtgctgtttgtgttgatcttagaattatgactcatggtccgaactcacttgaattgaagtctggttttctattttcttgccccgacaatattgtcaaatgtttatatttccaaaataaaagggga

SEQ ID NO: 20502 - DNA, 2746 bp, Zea Mays
ggtgcctagtgactggttagatttggtatatcaaatcagatcacaggaaacattcagatctcatttaagaaaactaaaacaaaaaacggagaaaaatcaggtgattgcttcctttcctctctctccgttgcccaccacccccaagcccgcgatatattcggcgcagcccacaccttccagcgaatttccgtcacccatctccgcaccgcacccgcaacgcgtctctcttcctctcctggtcctcctgccactccgcctcaacttgctcggctattcccggattgcggctcggggttggtcattggccgtgagggcctttcaagaacgggcggcggcgctttacctgacgcaaattgcgccggtctcctgccttgctgcgcgcttgggggttgggctcaggaatgggggtagagcaggggctgcgtcgcctggctcgattcccatctctctgaacttagatggatgcatctgtaaacaccaagaagaaggttagtttctgtgggaacactggccacagccgctgcggtgaagttcatttagctgctgtgtgctcaggtcgtatgcgaagcaaccccttctcgcttcagtattgcaggtttggtttgcatttccgttcaagtataaaggaagtagtatttgccattttggcatagcatttgaatagcacaggaacctagaaaacagtgttccagcagtactacgttacactggtgttatactattatagaaaacatggtggatgtggaactgttttataaggacactagtgatcacagcattagctctgaggaagaagatatgcttgtcaggagctgtagcaatctcaatgtgagctttggatatcattgtgattcttatcagagcttttctcctgaaaatgatcatggaaatgacatttctcctaagaacatgtttgggactaatacgatgatggggtcacggaatggctcatttacttgtttgtccggtgctgctattagtgcaaattttacattggcaaatacaaatatttgcaatggtcttattggcgaagaaattttaccagaactagattctccaaactccttcagaaaaattatttcatctccatcaatgtcaagattggactcgttctctacctcacaaggcagtcctgtgtcaactgagagctcaatatttgagatcagtaaaaatatttggaggtccagtgccccaacaactgtatcatccaattttctgactaatacagaggtgaaaatggctggcggagctgctggagaggatagagtccaagctgtgtgctcagagaaaaatggatggctgatttgtgggatatatgatgggtttaatgggagggatgcagctgattttcttgcggtaactctatatgataacatagtatattacttatacctgctggagaatcggataaggcaacaaaatggtttgtacaattcatcagaaagctctcttaatggtctcaaaagtgagttaacactagccatgagaaattcagaaaatgaaggcataaaattttctgaaacatttcgatctggtgtactgaattgcctttctactgctgttgagcaagctgagaatgactttttatgcatggttgaacaagagatggatgatagaccagatttagtttcggtagggtcttgtatcctggttgttcttcttcaaggaacagatctgtgcatcttaaatatgggggacagtagagctgtgcttgcttccatgccatatgtagaaaatggtgctttgaaggctactcaactgacagagacccactcgcttgaaaatcctttggagtaccaaaaacttttagctgaacatcccaatgattcttcagttgtcaggggtaacaaaataaaaggaaagctgaaggttactcgtgcttttggagttggctatctaaagcagaggaagttcaacgacgcactcatgggcattctgcgagtccgcgatttgagcagccctccatatgtttacacaaatccacacacattgagtcacaaagttacagatgatgatttgtttgttgtgcttggtagtgatggcttatttgatttcttcagcaatgatgaagttgttcggttggtttatcaatttatgcatgataatccaatgggggatcctgcaaaatatcttattgagcaacttatactcaaagcagccaaggaagcagctctaacagccgaagaattgatgaggatacctgttgggagtaggagaaagtaccacgatgatgtgactgtcattgttatcatccttggaaatgcacagaggacgatgactgcatcaacttccttgtgaaagaatggagaggtagagagacgggggctatcagctggtaaatttttgtgggttttttgcatacatgtattccaaaatacaattttttttcctgggaatcgcgtggtagtcaataaaaccaaataaaaatgtatatattgtttcgaaatttgggaagtgaacagaaccttttgttaaatcacagggtgcacctgggttcgtttgacctacttctgtacatgaatcaaacatggaggctcgtacttgagctaatgagtccatgagcagagtggtagatcgtttcagtttccgtctgccaattttttttctctgctaataagtatgtgctgtttgtgttgatcttagaattatgactcatggtccgaactcacttgaattgaagtctggttttctattttcttgccccgacaatattgtcaaatgtttatatttccaaaataaaagggga

SEQ ID NO: 20503 - DNA, 2471 bp, Zea Mays
ggtgcctagtgactggttagatttggtatatcaaatcagatcacaggaaacattcagatctcatttaagaaaactaaaacaaaaaacggagaaaaatcaggtgattgcttcctttcctctctctccgttgcccaccacccccaagcccgcgatatattcggcgcagcccacaccttccagcgaatttccgtcacccatctccgcaccgcacccgcaacgcgtctctcttcctctcctggtcctcctgccactccgcctcaacttgctcggctattcccggattgcggctcggggttggtcattggccgtgagtattgcaggtttggtttgcatttccgttcaagtataaaggaagtagtatttgccattttggcatagcatttgaatagcacaggaacctagaaaacagtgttccagcagtactacgttacactggtgttatactattatagaaaacatggtggatgtggaactgttttataaggacactagtgatcacagcattagctctgaggaagaagatatgcttgtcaggagctgtagcaatctcaatgtgagctttggatatcattgtgattcttatcagagcttttctcctgaaaatgatcatggaaatgacatttctcctaagaacatgtttgggactaatacgatgatggggtcacggaatggctcatttacttgtttgtccggtgctgctattagtgcaaattttacattggcaaatacaaatatttgcaatggtcttattggcgaagaaattttaccagaactagattctccaaactccttcagaaaaattatttcatctccatcaatgtcaagattggactcgttctctacctcacaaggcagtcctgtgtcaactgagagctcaatatttgagatcagtaaaaatatttggaggtccagtgccccaacaactgtatcatccaattttctgactaatacagaggtgaaaatggctggcggagctgctggagaggatagagtccaagctgtgtgctcagagaaaaatggatggctgatttgtgggatatatgatgggtttaatgggagggatgcagctgattttcttgcggtaactctatatgataacatagtatattacttatacctgctggagaatcggataaggcaacaaaatggtttgtacaattcatcagaaagctctcttaatggtctcaaaagtgagttaacactagccatgagaaattcagaaaatgaaggcataaaattttctgaaacatttcgatctggtgtactgaattgcctttctactgctgttgagcaagctgagaatgactttttatgcatggttgaacaagagatggatgatagaccagatttagtttcggtagggtcttgtatcctggttgttcttcttcaaggaacagatctgtgcatcttaaatatgggggacagtagagctgtgcttgcttccatgccatatgtagaaaatggtgctttgaaggctactcaactgacagagacccactcgcttgaaaatcctttggagtaccaaaaacttttagctgaacatcccaatgattcttcagttgtcaggggtaacaaaataaaaggaaagctgaaggttactcgtgcttttggagttggctatctaaagcagaggaagttcaacgacgcactcatgggcattctgcgagtccgcgatttgagcagccctccatatgtttacacaaatccacacacattgagtcacaaagttacagatgatgatttgtttgttgtgcttggtagtgatggcttatttgatttcttcagcaatgatgaagttgttcggttggtttatcaatttatgcatgataatccaatgggggatcctgcaaaatatcttattgagcaacttatactcaaagcagccaaggaagcagctctaacagccgaagaattgatgaggatacctgttgggagtaggagaaagtaccacgatgatgtgactgtcattgttatcatccttggaaatgcacagaggacgatgactgcatcaacttccttgtgaaagaatggagaggtagagagacgggggctatcagctggtaaatttttgtgggttttttgcatacatgtattccaaaatacaattttttttcctgggaatcgcgtggtagtcaataaaaccaaataaaaatgtatatattgtttcgaaatttgggaagtgaacagaaccttttgttaaatcacagggtgcacctgggttcgtttgacctacttctgtacatgaatcaaacatggaggctcgtacttgagctaatgagtccatgagcagagtggtagatcgtttcagtttccgtctgccaattttttttctctgctaataagtatgtgctgtttgtgttgatcttagaattatgactcatggtccgaactcacttgaattgaagtctggttttctattttcttgccccgacaatattgtcaaatgtttatatttccaaaataaaagggga

SEQ ID NO: 20504 - DNA, 2316 bp, Zea Mays
ggtgcctagtgactggttagatttggtatatcaaatcagatcacaggaaacattcagatctcatttaagaaaactaaaacaaaaaacggagaaaaatcaggtgattgcttcctttcctctctctccgttgcccaccacccccaagcccgcgatatattcggcgcagcccacaccttccagcgaatttccgtcacccatctccgcaccgcacccgcaacgcgtctctcttcctctcctggtcctcctgccactccgcctcaacttgctcggctattcccggattgcggctcggggttggtcattggccgtgaggtttggtttgcatttccgttcaagtataaaggaagtagtatttgccattttggcatagcatttgaatagcacaggaacctagaaaacagtgttccagcagtactacgttacactggtgttatactattatagaaaacatggtggatgtggaactgttttataaggacactagtgatcacagcattagctctgaggaagaagatatgcttgtcaggagctgtagcaatctcaatgtgagctttggatatcattgtgattcttatcagagcttttctcctgaaaatgatcatggaaatgacatttctcctaagaacatgtttgggactaatacgatgatggggtcacggaatggctcatttacttgtttgtccggtgctgctattagtgcaaattttacattggcaaatacaaatatttgcaatggtcttattggcgaagaaattttaccagaactagattctccaaactccttcagaaaaattatttcatctccatcaatgtcaagattggactcgttctctacctcacaaggcagtcctgtgtcaactgagagctcaatatttgagatcagtaaaaatatttggaggtccagtgccccaacaactgtatcatccaattttctgactaatacagaggtgaaaatggctggcggagctgctggagaggatagagtccaagctgtgtgctcagagaaaaatggatggctgatttgtgggatatatgatgggtttaatgggagggatgcagctgattttcttgcggtaactctatatgataacatagtatattacttatacctgctggagaatcggataaggcaacaaaatggtttgtacaattcatcagaaagctctcttaatggtctcaaaagtgagttaacactagccatgagaaattcagaaaatgaaggcataaaattttctgaaacatttcgatctggtgtactgaattgcctttctactgctgttgagcaagctgagaatgactttttatgcatggttgaacaagagatggatgatagaccagatttagtttcggtagggtcttgtatcctggttgttcttcttcaaggaacagatctgtgcatcttaaatatgggggacagtagagctgtgcttgcttccatgccatatgtagaaaatggtgctttgaaggctactcaactgacagagacccactcgcttgaaaatcctttggagtaccaaaaacttttagctgaacatcccaatgattcttcagttgtcaggggtaacaaaataaaaggaaagctgaaggttactcgtgcttttggagttggctatctaaagcagaggaagttcaacgacgcactcatgggcattctgcgagtccgcgatttgagcagccctccatatgtttacacaaatccacacacattgagtcacaaagttacagatgatgatttgtttgttgtgcttggtagtgatggcttatttgatttcttcagcaatgatgaagttgttcggttggtttatcaatttatgcatgataatccaatgggggatcctgcaaaatatcttattgagcaacttatactcaaagcagccaaggaagcagctctaacagccgaagaattgatgaggatacctgttgggagtaggagaaagtaccacgatgatgtgactgtcattgttatcatccttggaaatgcacagaggacgatgactgcatcaacttccttgtgaaagaatggagaggtagagagacgggggctatcagctgggtgcacctgggttcgtttgacctacttctgtacatgaatcaaacatggaggctcgtacttgagctaatgagtccatgagcagagtggtagatcgtttcagtttccgtctgccaattttttttctctgctaataagtatgtgctgtttgtgttgatcttagaattatgactcatggtccgaactcacttgaattgaagtctggttttctattttcttgccccgacaatattgtcaaatgtttatatttccaaaataaaagggga

SEQ ID NO: 20505 - DNA, 2548 bp, Zea Mays
ggtgcctagtgactggttagatttggtatatcaaatcagatcacaggaaacattcagatctcatttaagaaaactaaaacaaaaaacggagaaaaatcaggtgattgcttcctttcctctctctccgttgcccaccacccccaagcccgcgatatattcggcgcagcccacaccttccagcgaatttccgtcacccatctccgcaccgcacccgcaacgcgtctctcttcctctcctggtcctcctgccactccgcctcaacttgctcggctattcccggattgcggctcggggttggtcattggccgtgaggtaaacaccaagaagaaggttagtttctgtgggaacactggccacagccgctgcggtgaagttcatttagctgctgtgtgctcaggtttggtttgcatttccgttcaagtataaaggaagtagtatttgccattttggcatagcatttgaatagcacaggaacctagaaaacagtgttccagcagtactacgttacactggtgttatactattatagaaaacatggtggatgtggaactgttttataaggacactagtgatcacagcattagctctgaggaagaagatatgcttgtcaggagctgtagcaatctcaatgtgagctttggatatcattgtgattcttatcagagcttttctcctgaaaatgatcatggaaatgacatttctcctaagaacatgtttgggactaatacgatgatggggtcacggaatggctcatttacttgtttgtccggtgctgctattagtgcaaattttacattggcaaatacaaatatttgcaatggtcttattggcgaagaaattttaccagaactagattctccaaactccttcagaaaaattatttcatctccatcaatgtcaagattggactcgttctctacctcacaaggcagtcctgtgtcaactgagagctcaatatttgagatcagtaaaaatatttggaggtccagtgccccaacaactgtatcatccaattttctgactaatacagaggtgaaaatggctggcggagctgctggagaggatagagtccaagctgtgtgctcagagaaaaatggatggctgatttgtgggatatatgatgggtttaatgggagggatgcagctgattttcttgcggtaactctatatgataacatagtatattacttatacctgctggagaatcggataaggcaacaaaatggtttgtacaattcatcagaaagctctcttaatggtctcaaaagtgagttaacactagccatgagaaattcagaaaatgaaggcataaaattttctgaaacatttcgatctggtgtactgaattgcctttctactgctgttgagcaagctgagaatgactttttatgcatggttgaacaagagatggatgatagaccagatttagtttcggtagggtcttgtatcctggttgttcttcttcaaggaacagatctgtgcatcttaaatatgggggacagtagagctgtgcttgcttccatgccatatgtagaaaatggtgctttgaaggctactcaactgacagagacccactcgcttgaaaatcctttggagtaccaaaaacttttagctgaacatcccaatgattcttcagttgtcaggggtaacaaaataaaaggaaagctgaaggttactcgtgcttttggagttggctatctaaagcagaggaagttcaacgacgcactcatgggcattctgcgagtccgcgatttgagcagccctccatatgtttacacaaatccacacacattgagtcacaaagttacagatgatgatttgtttgttgtgcttggtagtgatggcttatttgatttcttcagcaatgatgaagttgttcggttggtttatcaatttatgcatgataatccaatgggggatcctgcaaaatatcttattgagcaacttatactcaaagcagccaaggaagcagctctaacagccgaagaattgatgaggatacctgttgggagtaggagaaagtaccacgatgatgtgactgtcattgttatcatccttggaaatgcacagaggacgatgactgcatcaacttccttgtgaaagaatggagaggtagagagacgggggctatcagctggtaaatttttgtgggttttttgcatacatgtattccaaaatacaattttttttcctgggaatcgcgtggtagtcaataaaaccaaataaaaatgtatatattgtttcgaaatttgggaagtgaacagaaccttttgttaaatcacagggtgcacctgggttcgtttgacctacttctgtacatgaatcaaacatggaggctcgtacttgagctaatgagtccatgagcagagtggtagatcgtttcagtttccgtctgccaattttttttctctgctaataagtatgtgctgtttgtgttgatcttagaattatgactcatggtccgaactcacttgaattgaagtctggttttctattttcttgccccgacaatattgtcaaatgtttatatttccaaaataaaagggga

SEQ ID NO: 20506 - DNA, 662 bp, Zea Mays
cgctcggttcttcgtctttgctcgctcgtttctaacttagcctgtcgccaccaagtcgatcgtcgcgccaccgtgcacagcgctgccagcacgcctgtcgttctcctccttgtgtcgtactcctcccttcactcgtttctaatccataccaccggtgccaagcatgtcgggagcgccaccgtgcatagcgctgccagcacgcctgttgttctcctccctgtgtcgtactcctcccttcactcatttctaattcataccatcggcaccaagcatgtcgggagcgccaccgtgctccacccagtgccgctgtggtcctttgcaggcttctcgagatggtgtcagccttcggttgttaaagtttgtatcaagaggcataaaggttcaaatccatatcaccaggagattctgtgcggcgagaatgcggcagaaaagttgctggtgaaggtgtgccacatgggaggatgatgatgctgaagaaaaatgagtcgaagcttgacaggtgatccgaagctgactgatgtcaaaagctgaagaccttgctggaaaaattttagagaaaaatcttgtaatatcattgtaaaaaatatttgtaatttaagaatcagatactaattctgtaatttgtgtatactttgtaatatatctttacctttttgtccatg

SEQ ID NO: 20507 - DNA, 1220 bp, Zea Mays
ctcgtttctaacttagcctgtcgccaccaagtcgatcgtcgcgccaccgtgcacagcgctgccagcacgcctgtcgttctcctccttgtgtcgtactcctcccttcactcgtttctaatccataccaccggtgccaagcatgtcgggagcgccaccgtgcatagcgctgccagcacgcctgttgttctcctccctgtgtcgtactcctcccttcactcatttctaattcataccatcggcaccaagcatgtcgggagcgccaccgtgctccacccagtgccgctgtggtcctttgcaggcttctcgagatggtgtcagccttcggttgttaaagtttgtatcaagaggcataaaggttcaaatccatatcaccaggagattctgtgcggcgagaatgcggcagaaaagttgctggtgaaggtgtgccacatgggaggtatgattacctaaggtcgaagcatcggtggaggaccccattacaaaagtgacaccagtggcgatattttggaacacatggaaagtgatgtttatcgtgatatgttgcaatgcatccaacgaacaaaatagattaaacgtcattagttatgctaaaagctaaaaattctaatagaagatcaattgaacttacttgaaacatggtctgcttctttgctatgtagttggaaaaatagtcgtcatgttgttggtcatagtcctaatgctaccaatcatattcgtgatattgcgcatctcctgtccatcacatagcctcattgcttcttgaatatgaagcaactcctcttgtgcgttgcttcatcgagaactagctccacaactctatgatgagggcactcccttctaagctctgacatgcttggagttattcactctatttgacatgtagtacctacaacacaagcaatttagaatatcaatttcgtacttgcattatagaatttgtgaaattatagtactatacctttcgtggctctttcgacccgctctggcatgcacgatagaaggaccaactagtagcactcgccaattacaatcctcttccaaatcattgaccatttcttgtccatattaaaaaaccaagcaaggtaactataaaatttgatacaataaatacaaagtatagacaactcaccagacatctagtgcacaactattctagatttgaaaagtatgttccatgatgtccatcaatataaacctcgatgaagctcaatgctactctg

SEQ ID NO: 20508 - DNA, 1525 bp, Zea Mays
aaaaaacctcgtctcgacggcgtggaaagaagccacgtgaagaccgcttctacagcacagaggcggcggcggctagggcacagaggaggcggcggcacgagctccgtctgcacgagatctggcggcgacatctacaccggctcaccggcgtccacgaggggaacgccactggctgaccggcgccatcccgtcggtgtccgcttctcgccgatctttacatcgatgtggccggccactggagtacgcccaagtggtaggcaactcgtcgagaccctcggctacacccaagaggaagcgaggacgcggacggtctgctccctcggctggaaatgcggcgaggatggcacgccggcgggcctcgtccactgagagatcgcggcggatgctctgcttccctccggcgtcctaatgagcgaggaagtggccgatctccctctgtgccgctgacggacgttgctttggcgagcggattttgtattgcgcgccggttttgtgttgtacgacgacgaccggctgcccgccttgtctcaactctcaagcacggagcagtagctggcaaacgttcgccttcaatcaattcaaatggagcttgcttcctgcctgcctgaaataccaaggctaaagtcgaagccgtgacgactgacgaacggccctgaggcaaactctttagttaccagcacatgagccaacttcatcagtcatagcagctgaatcgtcgtcagggatctttgctgttttgagttctgccttttctgaagacccttcaggtaggctaatggacgccggatgcagctctgtacatatatcaaaaagcgtggattaaccgaatggcctttttcagacatggattaaacccccaaggggatcaaacccccaaggggattgagtgaaaggaagggatacactcaatccctctctggattagatccgcttgggaattaatcccttgcaaccgaacaagccctaaagttaacacctccagacacaaggctaggtagctagcgctcgctgtccatcagtcagtcccctccccccctgtctcatctcttaaataattggggggcacgcctgattggactcgcaaactatggattcacatgccgcgactttcagcaagagcaaggcagggccggcctagctagtgggctagtttaaagtcagtcggtgatgacgtagtagggcaaatgacccggccagtaggtcaagggggcttggctgctgtttgctccattccatcagccgagagcgacgaggtgacgtccggaaaaatttcaaatctttgccattgccgtagcgtatactcgtgtggtgttggcaactttactttgccaattataaaaaaaatcgccgtatgagcagttcaaaggtgtatagttttttgtcacttttagcatcgtgccggtccatgtcacccgcccagcgtgaattaagcagagacaggtaaagagatctccttgctcggtcccgtcagaaaaattatgtatatgtcatgtcacatcaattttacttggtatcttaatccctt

SEQ ID NO: 20509 - DNA, 1473 bp, Zea Mays
cacagaggcggcggcggctagggcacagaggaggcggcggcacgagctccgtctgcacgagatctggcggcgacatctacaccggctcaccggcgtccacgaggggaacgccactggctgaccggcgccatcccgtcggtgtccgcttctcgccgtagatctttacatcgatgtggccggccactggagtacgcccaagtggtaggcaactcgtcgagaccctcggctacacccaagaggaagcgaggacgcggacggtctgctccctcggctggaaatgcggcgaggatggcacgccggcgggcctcgtccactgagagatcgcggcggatgctctgcttccctccggcgtcctaatgagcgaggaagtggccgatctccctctgtgccgctgacggacgttgctttggcgagcggattttgtattgcgcgccggttttgtgttgtacgacgacgaccggctgcccgccttgtctcaactctcaagcacggagcagtagctggcaaacgttcgccttcaatcaattcaaatggagcttgcttcctgcctgcctgaaataccaaggctaaagtcgaagccgtgacgactgacgaacggccctgaggcaaactctttagttaccagcacatgagccaacttcatcagtcatagcagctgaatcgtcgtcagggatctttgctgttttgagttctgccttttctgaagacccttcaggtaggctaatggacgccggatgcagctctgtacatatatcaaaaagcgtggattaaccgaatggcctttttcagacatggattaaacccccaaggggatcaaacccccaaggggattgagtgaaaggaagggatacactcaatccctctctggattagatccgcttgggaattaatcccttgcaaccgaacaagccctaaagttaacacctccagacacaaggctaggtagctagcgctcgctgtccatcagtcagtcccctccccccctgtctcatctcttaaataattggggggcacgcctgattggactcgcaaactatggattcacatgccgcgactttcagcaagagcaaggcagggccggcctagctagtgggctagtttaaagtcagtcggtgatgacgtagtagggcaaatgacccggccagtaggtcaagggggcttggctgctgtttgctccattccatcagccgagagcgacgaggtgacgtccggaaaaatttcaaatctttgccattgccgtagcgtatactcgtgtggtgttggcaactttactttgccaattataaaaaaaatcgccgtatgagcagttcaaaggtgtatagttttttgtcacttttagcatcgtgccggtccatgtcacccgcccagcgtgaattaagcagagacaggtaaagagatctccttgctcggtcccgtcagaaaaattatgtatatgtcatgtcacatcaattttacttggtatcttaatccctt

SEQ ID NO: 20510 - DNA, 406 bp, Zea Mays
ggccctctcccttgcaccgtcgacacgattatcggtgagctttgtcgatgtcggaagcgaagctgggaagcaggcgtcgatagtcgagctggtctggggaagggctgctcgcattggacggtttccctctgcgaatcaacaaggagccaggagcatcggatgccatgagtgccaccaagcaccggcgacctacaacatgtgcccttcgtcccaagatcgccaacgacaaatgtattcaactcgtccattgcaagatccaagctcgaaatagagagaagcaaacgaatcgcatcgttggtgtcgtcctcgtctttgattcgaccgagagccccagattgaagtcttgtcagtttcttcaattccaatccatgaagtggcttaggctaatgctaatacattgggaaat

SEQ ID NO: 20511 - DNA, 2137 bp, Zea Mays
gccccggcccaaagcaccagcaccggcgcggcggtccaaagccagaagcagaacagaaaacaactgagacagctagagcagagcccccttcacaccaaaaatttcctctttgcgtcgcgccccgtcagctgagtccccgcggatgggctcggtctcgcggggctagggtttggtcggtcgtctcgtcggcgtcgagggcgccggcgctgctagctagtagtagctcgctcgcgctagggttctcaggagccatggtgatgcagcgcttctcgtggccgtacggaggccggagcgcctccttgtgcggcagcttcaccgggtggagggagtatcccatggggctggtcggggccgagttccaggtcgtcttcgatctgcctcccggggtttaccagttagcagttttggacactcagctacctgttaaacaggcatttaaaataatgcatgacgagggtcttgctctggttcctctttgggatgaccatcagggaaccataacaggcatgctcactgcattagattttgtattaatgttgagaaagttgcagagaaatattcgagttactggcaatgaagagcttgaaatgcatcccatttctgcttggaaagaagcaaagctacagttttatggtgggcctgatggtgctgccatgcagagaaggccattaatccatgttaaggattccgatagtttggcggatgtggcactgactataatcagaaatgaaatatcttcagttcctatctttaagtgcatgccagattcatcaggagtgcctttccttaatcttgcaaccctccaggggattttgaaatttctttgctcgaagctacaagaacaggctggaggctgttcccttctgcacaatcagcttctcagcattcctattggtacatggtctccacatacggggaggtcaagtagcaggcatctcagaactttgctactgagttctcctttaaatacctgcctggattttctgcttgaagatagagtaagctcaattcctatagttgatgacaagggagcgctccatgatgtttactcactcagtgacatcatggctctggcgaagaatgatgtttatgctcgcatcgaacttgaacaagtgactgtgcaaaatgctttggatgtgcaataccaggtgcatggtcgacgacagtgttatacttgtttacagacaaataccttgctggaagtcttagagggattgtctattccaggagttcgacggcttgttgttattgaacaaagtaccagatttgtggaaggaatcatctcattgagagacatatttacatttctccttggatagcatctgtgtagccattccatacatgaaaaagcttgttgtacttggttcaaacgaaataaaaaggttacaaatgtgatagccatcttctatcttccttcttgatttggttcatattataccgcagacactacataattgagttgcaccgaaggaaagaacaggtaggtgctgcaggatggagaagtgttcagggggattttttgaaggaaatgaatctcgtggatttttcttccttggaatgaagtcgaaggacctcttcaaatgcgagcatatatatcttttttttgtggaaacatgaacgacgtcatgcaaatgattttcttgaagcattgctgtcattccagttctataagatttgaagtgtttctgtacaattacaatgcttttcatgaccccatttggttttgctttctgttttcaaacaactctgagatttggctcatgagaattgtatatgttcaattatcagtgcatcttggtgtgagtgacattaggcaacggaattttgttatgaaagactgaactgtacaagaaattgctatcataaggaaagcgaattaaggaattttggttgatgctcgaaatatgtcaattattcgcactgtgctagtgattatgtacagaatcagggaatgtctcgcatccaattagggagtgggttggttgggttggactgtgttatactgtctttggtggatcatgtaaaatatgtgatgcgatattgtagatgataatgtttgatattgtttaaaagtttgacattgtttgtagagtgaagtttaaaataaaagatgagatagatgataatgtttgatatt

SEQ ID NO: 20512 - DNA, 2479 bp, Zea Mays
gccccggcccaaagcaccagcaccggcgcggcggtccaaagccagaagcagaacagaaaacaactgagacagctagagcagagcccccttcacaccaaaaatttcctctttgcgtcgcgccccgtcagctgagtccccgcggatgggctcggtctcgcggggctagggtttggtcggtcgtctcgtcggcgtcgagggcgccggcgctgctagctagtagtagctcgctcgcgctagggttctcaggagccatggtgatgcagcgcttctcgtggccgtacggaggccggagcgcctccttgtgcggcagcttcaccgggtggagggagtatcccatggggctggtcggggccgagttccaggtcgtcttcgatctgcctcccggggtttaccagtaccggtttttggttgatggtgtctggaggtgtgatgagacgaaaccctttgtatgtgatgaatatggactgatcagcaatgaagtgcttgtggaaaacaatgtgcaacctgttgtgcagccagagccttctatcagaggaactaatttggatgaggatgcccccggagtcatcatctcagaacccaggcgtgcaaatagcagttttccgccatgtggtctctggaatattattacacaataccatatatgaagttgttcctctttctagcaagttagcagttttggacactcagctacctgttaaacaggcatttaaaataatgcatgacgagggtcttgctctggttcctctttgggatgaccatcagggaaccataacaggcatgctcactgcattagattttgtattaatgttgagaaagttgcagagaaatattcgagttactggcaatgaagagcttgaaatgcatcccatttctgcttggaaagaagcaaagctacagttttatggtgggcctgatggtgctgccatgcagagaaggccattaatccatgttaaggattccgatagtttggcggatgtggcactgactataatcagaaatgaaatatcttcagttcctatctttaagtgcatgccagattcatcaggagtgcctttccttaatcttgcaaccctccaggggattttgaaatttctttgctcgaagctacaagaacaggctggaggctgttcccttctgcacaatcagcttctcagcattcctattggtacatggtctccacatacggggaggtcaagtagcaggcatctcagaactttgctactgagttctcctttaaatacctgcctggattttctgcttgaagatagagtaagctcaattcctatagttgatgacaagggagcgctccatgatgtttactcactcagtgacatcatggctctggcgaagaatgatgtttatgctcgcatcgaacttgaacaagtgactgtgcaaaatgctttggatgtgcaataccaggtgcatggtcgacgacagtgttatacttgtttacagacaaataccttgctggaagtcttagagggattgtctattccaggagttcgacggcttgttgttattgaacaaagtaccagatttgtggaaggaatcatctcattgagagacatatttacatttctccttggatagcatctgtgtagccattccatacatgaaaaagcttgttgtacttggttcaaacgaaataaaaaggttacaaatgtgatagccatcttctatcttccttcttgatttggttcatattataccgcagacactacataattgagttgcaccgaaggaaagaacaggtaggtgctgcaggatggagaagtgttcaggtgattgtttcctgctcgaccagtccagccgccaattatttgcaggcttccagaattgttacttgcaaggggattttttgaaggaaatgaatctcgtggatttttcttccttggaatgaagtcgaaggacctcttcaaatgcgagcatatatatcttttttttgtggaaacatgaacgacgtcatgcaaatgattttcttgaagcattgctgtcattccagttctataagatttgaagtgtttctgtacaattacaatgcttttcatgaccccatttggttttgctttctgttttcaaacaactctgagatttggctcatgagaattgtatatgttcaattatcagtgcatcttggtgtgagtgacattaggcaacggaattttgttatgaaagactgaactgtacaagaaattgctatcataaggaaagcgaattaaggaattttggttgatgctcgaaatatgtcaattattcgcactgtgctagtgattatgtacagaatcagggaatgtctcgcatccaattagggagtgggttggttgggttggactgtgttatactgtctttggtggatcatgtaaaatatgtgatgcgatattgtagatgataatgtttgatattgtttaaaagtttgacattgtttgtagagtgaagtttaaaataaaagatgagatagatgataatgtttgatatt

SEQ ID NO: 20513 - DNA, 2422 bp, Zea Mays
gccccggcccaaagcaccagcaccggcgcggcggtccaaagccagaagcagaacagaaaacaactgagacagctagagcagagcccccttcacaccaaaaatttcctctttgcgtcgcgccccgtcagctgagtccccgcggatgggctcggtctcgcggggctagggtttggtcggtcgtctcgtcggcgtcgagggcgccggcgctgctagctagtagtagctcgctcgcgctagggttctcaggagccatggtgatgcagcgcttctcgtggccgtacggaggccggagcgcctccttgtgcggcagcttcaccgggtggagggagtatcccatggggctggtcggggccgagttccaggtcgtcttcgatctgcctcccggggtttaccagtaccggtttttggttgatggtgtctggaggtgtgatgagacgaaaccctttgtatgtgatgaatatggactgatcagcaatgaagtgcttgtggaaaacaatgtgcaacctgttgtgcagccagagccttctatcagaggaactaatttggatgagggtaccgttttgacaacaatgcccccggagtcatcatctcagaacccaggcgtgcaaatagcagttttccgccatgtggtctctggaatattattacacaataccatatatgaagttgttcctctttctagcaagttagcagttttggacactcagctacctgttaaacaggcatttaaaataatgcatgacgagggtcttgctctggttcctctttgggatgaccatcagggaaccataacaggcatgctcactgcattagattttgtattaatgttgagaaagagaaatattcgagttactggcaatgaagagcttgaaatgcatcccatttctgcttggaaagaagcaaagctacagttttatggtgggcctgatggtgctgccatgcagagaaggccattaatccatgttaaggattccgatagtttggcggatgtggcactgactataatcagaaatgaaatatcttcagttcctatctttaagtgcatgccagattcatcaggagtgcctttccttaatcttgcaaccctccaggggattttgaaatttctttgctcgaagctacaagaacaggctggaggctgttcccttctgcacaatcagcttctcagcattcctattggtacatggtctccacatacggggaggtcaagtagcaggcatctcagaactttgctactgagttctcctttaaatacctgcctggattttctgcttgaagatagagtaagctcaattcctatagttgatgacaagggagcgctccatgatgtttactcactcagtgacatcatggctctggcgaagaatgatgtttatgctcgcatcgaacttgaacaagtgactgtgcaaaatgctttggatgtgcaataccaggtgcatggtcgacgacagtgttatacttgtttacagacaaataccttgctggaagtcttagagggattgtctattccaggagttcgacggcttgttgttattgaacaaagtaccagatttgtggaaggaatcatctcattgagagacatatttacatttctccttggatagcatctgtgtagccattccatacatgaaaaagcttgttgtacttggttcaaacgaaataaaaaggttacaaatgtgatagccatcttctatcttccttcttgatttggttcatattataccgcagacactacataattgagttgcaccgaaggaaagaacaggtaggtgctgcaggatggagaagtgttcagggggattttttgaaggaaatgaatctcgtggatttttcttccttggaatgaagtcgaaggacctcttcaaatgcgagcatatatatcttttttttgtggaaacatgaacgacgtcatgcaaatgattttcttgaagcattgctgtcattccagttctataagatttgaagtgtttctgtacaattacaatgcttttcatgaccccatttggttttgctttctgttttcaaacaactctgagatttggctcatgagaattgtatatgttcaattatcagtgcatcttggtgtgagtgacattaggcaacggaattttgttatgaaagactgaactgtacaagaaattgctatcataaggaaagcgaattaaggaattttggttgatgctcgaaatatgtcaattattcgcactgtgctagtgattatgtacagaatcagggaatgtctcgcatccaattagggagtgggttggttgggttggactgtgttatactgtctttggtggatcatgtaaaatatgtgatgcgatattgtagatgataatgtttgatattgtttaaaagtttgacattgtttgtagagtgaagtttaaaataaaagatgagatagatgataatgtttgatatt

SEQ ID NO: 20514 - DNA, 2131 bp, Zea Mays
gccccggcccaaagcaccagcaccggcgcggcggtccaaagccagaagcagaacagaaaacaactgagacagctagagcagagcccccttcacaccaaaaatttcctctttgcgtcgcgccccgtcagctgagtccccgcggatgggctcggtctcgcggggctagggtttggtcggtcgtctcgtcggcgtcgagggcgccggcgctgctagctagtagtagctcgctcgcgctagggttctcaggagccatggtgatgcagcgcttctcgtggccgtacggaggccggagcgcctccttgtgcggcagcttcaccgggtggagggagtatcccatggggctggtcggggccgagttccaggtcgtcttcgatctgcctcccggggtttaccagttagcagttttggacactcagctacctgttaaacaggcatttaaaataatgcatgacgagggtcttgctctggttcctctttgggatgaccatcagggaaccataacaggcatgctcactgcattagattttgtattaatgttgagaaagagaaatattcgagttactggcaatgaagagcttgaaatgcatcccatttctgcttggaaagaagcaaagctacagttttatggtgggcctgatggtgctgccatgcagagaaggccattaatccatgttaaggattccgatagtttggcggatgtggcactgactataatcagaaatgaaatatcttcagttcctatctttaagtgcatgccagattcatcaggagtgcctttccttaatcttgcaaccctccaggggattttgaaatttctttgctcgaagctacaagaacaggctggaggctgttcccttctgcacaatcagcttctcagcattcctattggtacatggtctccacatacggggaggtcaagtagcaggcatctcagaactttgctactgagttctcctttaaatacctgcctggattttctgcttgaagatagagtaagctcaattcctatagttgatgacaagggagcgctccatgatgtttactcactcagtgacatcatggctctggcgaagaatgatgtttatgctcgcatcgaacttgaacaagtgactgtgcaaaatgctttggatgtgcaataccaggtgcatggtcgacgacagtgttatacttgtttacagacaaataccttgctggaagtcttagagggattgtctattccaggagttcgacggcttgttgttattgaacaaagtaccagatttgtggaaggaatcatctcattgagagacatatttacatttctccttggatagcatctgtgtagccattccatacatgaaaaagcttgttgtacttggttcaaacgaaataaaaaggttacaaatgtgatagccatcttctatcttccttcttgatttggttcatattataccgcagacactacataattgagttgcaccgaaggaaagaacaggtaggtgctgcaggatggagaagtgttcagggggattttttgaaggaaatgaatctcgtggatttttcttccttggaatgaagtcgaaggacctcttcaaatgcgagcatatatatcttttttttgtggaaacatgaacgacgtcatgcaaatgattttcttgaagcattgctgtcattccagttctataagatttgaagtgtttctgtacaattacaatgcttttcatgaccccatttggttttgctttctgttttcaaacaactctgagatttggctcatgagaattgtatatgttcaattatcagtgcatcttggtgtgagtgacattaggcaacggaattttgttatgaaagactgaactgtacaagaaattgctatcataaggaaagcgaattaaggaattttggttgatgctcgaaatatgtcaattattcgcactgtgctagtgattatgtacagaatcagggaatgtctcgcatccaattagggagtgggttggttgggttggactgtgttatactgtctttggtggatcatgtaaaatatgtgatgcgatattgtagatgataatgtttgatattgtttaaaagtttgacattgtttgtagagtgaagtttaaaataaaagatgagatagatgataatgtttgatatt

SEQ ID NO: 20515 - DNA, 2399 bp, Zea Mays
gccccggcccaaagcaccagcaccggcgcggcggtccaaagccagaagcagaacagaaaacaactgagacagctagagcagagcccccttcacaccaaaaatttcctctttgcgtcgcgccccgtcagctgagtccccgcggatgggctcggtctcgcggggctagggtttggtcggtcgtctcgtcggcgtcgagggcgccggcgctgctagctagtagtagctcgctcgcgctagggttctcaggagccatggtgatgcagcgcttctcgtggccgtacggaggccggagcgcctccttgtgcggcagcttcaccgggtggagggagtatcccatggggctggtcggggccgagttccaggtcgtcttcgatctgcctcccggggtttaccagtaccggtttttggttgatggtgtctggaggtgtgatgagacgaaaccctttgtatgtgatgaatatggactgatcagcaatgaagtgcttgtggaaaacaatgtgcaacctgttgtgcagccagagccttctatcagaggaactaatttggatgagggtaccgttttgacaacaatgcccccggagtcatcatctcagaacccaggcgtgcaaatagcagttttccgccatgtggtctctggaatattattacacaataccatatatgaagttgttcctctttctagcaagttagcagttttggacactcagctacctgttaaacaggcatttaaaataatgcatgacgagggtcttgctctggttcctctttgggatgaccatcagggaaccataacaggcatgctcactgcattagattttgtattaatgttgagaaagttgcagagaaatattcgagttactggcaatgaagagcttgaaatgcatcccatttctgcttggaaagaagcaaagctacagttttatggtgggcctgatggtgctgccatgcagagaaggccattaatccatgttaaggattccgatagtttggcggatgtggcactgactataatcagaaatgaaatatcttcagttcctatctttaagtgcatgccagattcatcaggagtgcctttccttaatcttgcaaccctccaggggattttgaaatttctttgctcgaagctacaagaacaggctggaggctgttcccttctgcacaatcagcttctcagcattcctattggtacatggtctccacatacggggaggtcaagtagcaggcatctcagaactttgctactgagttctcctttaaatacctgcctggattttctgcttgaagtgacatcatggctctggcgaagaatgatgtttatgctcgcatcgaacttgaacaagtgactgtgcaaaatgctttggatgtgcaataccaggtgcatggtcgacgacagtgttatacttgtttacagacaaataccttgctggaagtcttagagggattgtctattccaggagttcgacggcttgttgttattgaacaaagtaccagatttgtggaaggaatcatctcattgagagacatatttacatttctccttggatagcatctgtgtagccattccatacatgaaaaagcttgttgtacttggttcaaacgaaataaaaaggttacaaatgtgatagccatcttctatcttccttcttgatttggttcatattataccgcagacactacataattgagttgcaccgaaggaaagaacaggtaggtgctgcaggatggagaagtgttcaggctacagaatcattttcataggatctttgaaacagggggattttttgaaggaaatgaatctcgtggatttttcttccttggaatgaagtcgaaggacctcttcaaatgcgagcatatatatcttttttttgtggaaacatgaacgacgtcatgcaaatgattttcttgaagcattgctgtcattccagttctataagatttgaagtgtttctgtacaattacaatgcttttcatgaccccatttggttttgctttctgttttcaaacaactctgagatttggctcatgagaattgtatatgttcaattatcagtgcatcttggtgtgagtgacattaggcaacggaattttgttatgaaagactgaactgtacaagaaattgctatcataaggaaagcgaattaaggaattttggttgatgctcgaaatatgtcaattattcgcactgtgctagtgattatgtacagaatcagggaatgtctcgcatccaattagggagtgggttggttgggttggactgtgttatactgtctttggtggatcatgtaaaatatgtgatgcgatattgtagatgataatgtttgatattgtttaaaagtttgacattgtttgtagagtgaagtttaaaataaaagatgagatagatgataatgtttgatatt

SEQ ID NO: 20516 - DNA, 2449 bp, Zea Mays
gccccggcccaaagcaccagcaccggcgcggcggtccaaagccagaagcagaacagaaaacaactgagacagctagagcagagcccccttcacaccaaaaatttcctctttgcgtcgcgccccgtcagctgagtccccgcggatgggctcggtctcgcggggctagggtttggtcggtcgtctcgtcggcgtcgagggcgccggcgctgctagctagtagtagctcgctcgcgctagggttctcaggagccatggtgatgcagcgcttctcgtggccgtacggaggccggagcgcctccttgtgcggcagcttcaccgggtggagggagtatcccatggggctggtcggggccgagttccaggtcgtcttcgatctgcctcccggggtttaccagtaccggtttttggttgatggtgtctggaggtgtgatgagacgaaaccctttgtatgtgatgaatatggactgatcagcaatgaagtgcttgtggaaaacaatgtgcaacctgttgtgcagccagagccttctatcagaggaactaatttggatgagggtaccgttttgacaacaatgcccccggagtcatcatctcagaacccaggcgtgcaaatagcagttttccgccatgtggtctctggaatattattacacaataccatatatgaagttgttcctctttctagcaagttagcagttttggacactcagctacctgttaaacaggcatttaaaataatgcatgacgagggtcttgctctggttcctctttgggatgaccatcagggaaccataacaggcatgctcactgcattagattttgtattaatgttgagaaagttgcagagaaatattcgagttactggcaatgaagagcttgaaatgcatcccatttctgcttggaaagaagcaaagctacagttttatggtgggcctgatggtgctgccatgcagagaaggccattaatccatgttaaggattccgatagtttggcggatgtggcactgactataatcagaaatgaaatatcttcagttcctatctttaagtgcatgccagattcatcaggagtgcctttccttaatcttgcaaccctccaggggattttgaaatctacaagaacaggctggaggctgttcccttctgcacaatcagcttctcagcattcctattggtacatggtctccacatacggggaggtcaagtagcaggcatctcagaactttgctactgagttctcctttaaatacctgcctggattttctgcttgaagatagagtaagctcaattcctatagttgatgacaagggagcgctccatgatgtttactcactcagtgacatcatggctctggcgaagaatgatgtttatgctcgcatcgaacttgaacaagtgactgtgcaaaatgctttggatgtgcaataccaggtgcatggtcgacgacagtgttatacttgtttacagacaaataccttgctggaagtcttagagggattgtctattccaggagttcgacggcttgttgttattgaacaaagtaccagatttgtggaaggaatcatctcattgagagacatatttacatttctccttggatagcatctgtgtagccattccatacatgaaaaagcttgttgtacttggttcaaacgaaataaaaaggttacaaatgtgatagccatcttctatcttccttcttgatttggttcatattataccgcagacactacataattgagttgcaccgaaggaaagaacaggtaggtgctgcaggatggagaagtgttcaggctacagaatcattttcataggatctttgaaacagggggattttttgaaggaaatgaatctcgtggatttttcttccttggaatgaagtcgaaggacctcttcaaatgcgagcatatatatcttttttttgtggaaacatgaacgacgtcatgcaaatgattttcttgaagcattgctgtcattccagttctataagatttgaagtgtttctgtacaattacaatgcttttcatgaccccatttggttttgctttctgttttcaaacaactctgagatttggctcatgagaattgtatatgttcaattatcagtgcatcttggtgtgagtgacattaggcaacggaattttgttatgaaagactgaactgtacaagaaattgctatcataaggaaagcgaattaaggaattttggttgatgctcgaaatatgtcaattattcgcactgtgctagtgattatgtacagaatcagggaatgtctcgcatccaattagggagtgggttggttgggttggactgtgttatactgtctttggtggatcatgtaaaatatgtgatgcgatattgtagatgataatgtttgatattgtttaaaagtttgacattgtttgtagagtgaagtttaaaataaaagatgagatagatgataatgtttgatatt

SEQ ID NO: 20517 - DNA, 2523 bp, Zea Mays
gccccggcccaaagcaccagcaccggcgcggcggtccaaagccagaagcagaacagaaaacaactgagacagctagagcagagcccccttcacaccaaaaatttcctctttgcgtcgcgccccgtcagctgagtccccgcggatgggctcggtctcgcggggctagggtttggtcggtcgtctcgtcggcgtcgagggcgccggcgctgctagctagtagtagctcgctcgcgctagggttctcaggagccatggtgatgcagcgcttctcgtggccgtacggaggccggagcgcctccttgtgcggcagcttcaccgggtggagggagtatcccatggggctggtcggggccgagttccaggtcgtcttcgatctgcctcccggggtttaccagcaatgaagtgcttgtggaaaacaatgtgcaacctgttgtgcagccagagccttctatcagaggaactaatttggatgagggtaccgttttgacaacaatgcccccggagtcatcatctcagaacccaggcgtgcaaatagcagttttccgccatgtggtctctggaatattattacacaataccatatatgaagttgttcctctttctagcaagttagcagttttggacactcagctacctgttaaacaggcatttaaaataatgcatgacgagggtcttgctctggttcctctttgggatgaccatcagggaaccataacaggcatgctcactgcattagattttgtattaatgttgagaaagttgcagagaaatattcgagttactggcaatgaagagcttgaaatgcatcccatttctgcttggaaagaagcaaagctacagttttatggtgggcctgatggtgctgccatgcagagaaggccattaatccatgttaaggattccgatagtttggcggatgtggcactgactataatcagaaatgaaatatcttcagttcctatctttaagtgcatgccagattcatcaggagtgcctttccttaatcttgcaaccctccaggggattttgaaatttctttgctcgaagctacaagaacaggctggaggctgttcccttctgcacaatcagcttctcagcattcctattggtacatggtctccacatacggggaggtcaagtagcaggcatctcagaactttgctactgagttctcctttaaatacctgcctggattttctgcttgaagatagagtaagctcaattcctatagttgatgacaagggagcgctccatgatgtttactcactcagtgacatcatggctctggcgaagaatgatgtttatgctcgcatcgaacttgaacaagtgactgtgcaaaatgctttggatgtgcaataccaggtgcatggtcgacgacagtgttatacttgtttacagacaaataccttgctggaagtcttagagggattgtctattccaggagttcgacggcttgttgttattgaacaaagtaccagatttgtggaaggaatcatctcattgagagacatatttacatttctccttggatagcatctgtgtagccattccatacatgaaaaagcttgttgtacttggttcaaacgaaataaaaaggttacaaatgtgatagccatcttctatcttccttcttgatttggttcatattataccgcagacactacataattgagttgcaccgaaggaaagaacaggtaggtgctgcaggatggagaagtgttcaggtgattgtttcctgctcgaccagtccagccgccaattatttgcaggcttccagaattgttacttgcaagttaggagcttgactacctttttaagaacttgatttttctgtggttgtattctttgaacattgatacaggctacagaatcattttcataggatctttgaaacagggggattttttgaaggaaatgaatctcgtggatttttcttccttggaatgaagtcgaaggacctcttcaaatgcgagcatatatatcttttttttgtggaaacatgaacgacgtcatgcaaatgattttcttgaagcattgctgtcattccagttctataagatttgaagtgtttctgtacaattacaatgcttttcatgaccccatttggttttgctttctgttttcaaacaactctgagatttggctcatgagaattgtatatgttcaattatcagtgcatcttggtgtgagtgacattaggcaacggaattttgttatgaaagactgaactgtacaagaaattgctatcataaggaaagcgaattaaggaattttggttgatgctcgaaatatgtcaattattcgcactgtgctagtgattatgtacagaatcagggaatgtctcgcatccaattagggagtgggttggttgggttggactgtgttatactgtctttggtggatcatgtaaaatatgtgatgcgatattgtagatgataatgtttgatattgtttaaaagtttgacattgtttgtagagtgaagtttaaaataaaagatgagatagatgataatgtttgatatt

SEQ ID NO: 20518 - DNA, 2172 bp, Zea Mays
gccccggcccaaagcaccagcaccggcgcggcggtccaaagccagaagcagaacagaaaacaactgagacagctagagcagagcccccttcacaccaaaaatttcctctttgcgtcgcgccccgtcagctgagtccccgcggatgggctcggtctcgcggggctagggtttggtcggtcgtctcgtcggcgtcgagggcgccggcgctgctagctagtagtagctcgctcgcgctagggttctcaggagccatggtgatgcagcgcttctcgtggccgtacggaggccggagcgcctccttgtgcggcagcttcaccgggtggagggagtatcccatggggctggtcggggccgagttccaggtcgtcttcgatctgcctcccggggtttaccagttagcagttttggacactcagctacctgttaaacaggcatttaaaataatgcatgacgagggtcttgctctggttcctctttgggatgaccatcagggaaccataacaggcatgctcactgcattagattttgtattaatgttgagaaagttgcagagaaatattcgagttactggcaatgaagagcttgaaatgcatcccatttctgcttggaaagaagcaaagctacagttttatggtgggcctgatggtgctgccatgcagagaaggccattaatccatgttaaggattccgatagtttggcggatgtggcactgactataatcagaaatgaaatatcttcagttcctatctttaagtgcatgccagattcatcaggagtgcctttccttaatcttgcaaccctccaggggattttgaaatttctttgctcgaagctacaagaacaggctggaggctgttcccttctgcacaatcagcttctcagcattcctattggtacatggtctccacatacggggaggtcaagtagcaggcatctcagaactttgctactgagttctcctttaaatacctgcctggattttctgcttgaagatagagtaagctcaattcctatagttgatgacaagggagcgctccatgatgtttactcactcagtgacatcatggctctggcgaagaatgatgtttatgctcgcatcgaacttgaacaagtgactgtgcaaaatgctttggatgtgcaataccaggtgcatggtcgacgacagtgttatacttgtttacagacaaataccttgctggaagtcttagagggattgtctattccaggagttcgacggcttgttgttattgaacaaagtaccagatttgtggaaggaatcatctcattgagagacatatttacatttctccttggatagcatctgtgtagccattccatacatgaaaaagcttgttgtacttggttcaaacgaaataaaaaggttacaaatgtgatagccatcttctatcttccttcttgatttggttcatattataccgcagacactacataattgagttgcaccgaaggaaagaacaggtaggtgctgcaggatggagaagtgttcaggctacagaatcattttcataggatctttgaaacagggggattttttgaaggaaatgaatctcgtggatttttcttccttggaatgaagtcgaaggacctcttcaaatgcgagcatatatatcttttttttgtggaaacatgaacgacgtcatgcaaatgattttcttgaagcattgctgtcattccagttctataagatttgaagtgtttctgtacaattacaatgcttttcatgaccccatttggttttgctttctgttttcaaacaactctgagatttggctcatgagaattgtatatgttcaattatcagtgcatcttggtgtgagtgacattaggcaacggaattttgttatgaaagactgaactgtacaagaaattgctatcataaggaaagcgaattaaggaattttggttgatgctcgaaatatgtcaattattcgcactgtgctagtgattatgtacagaatcagggaatgtctcgcatccaattagggagtgggttggttgggttggactgtgttatactgtctttggtggatcatgtaaaatatgtgatgcgatattgtagatgataatgtttgatattgtttaaaagtttgacattgtttgtagagtgaagtttaaaataaaagatgagatagatgataatgtttgatatt

SEQ ID NO: 20519 - DNA, 2446 bp, Zea Mays
gccccggcccaaagcaccagcaccggcgcggcggtccaaagccagaagcagaacagaaaacaactgagacagctagagcagagcccccttcacaccaaaaatttcctctttgcgtcgcgccccgtcagctgagtccccgcggatgggctcggtctcgcggggctagggtttggtcggtcgtctcgtcggcgtcgagggcgccggcgctgctagctagtagtagctcgctcgcgctagggttctcaggagccatggtgatgcagcgcttctcgtggccgtacggaggccggagcgcctccttgtgcggcagcttcaccgggtggagggagtatcccatggggctggtcggggccgagttccaggtcgtcttcgatctgcctcccggggtttaccagtaccggtttttggttgatggtgtctggaggtgtgatgagacgaaaccctttgtatgtgatgaatatggactgatcagcaatgaagtgcttgtggaaaacaatgtgcaacctgttgtgcagccagagccttctatcagaggaactaatttggatgaggatgcccccggagtcatcatctcagaacccaggcgtgcaaatagcagttttccgccatgtggtctctggaatattattacacaataccatatatgaagttgttcctctttctagcaagttagcagttttggacactcagctacctgttaaacaggcatttaaaataatgcatgacgagggtcttgctctggttcctctttgggatgaccatcagggaaccataacaggcatgctcactgcattagattttgtattaatgttgagaaagttgcagagaaatattcgagttactggcaatgaagagcttgaaatgcatcccatttctgcttggaaagaagcaaagctacagttttatggtgggcctgatggtgctgccatgcagagaaggccattaatccatgttaaggattccgatagtttggcggatgtggcactgactataatcagaaatgaaatatcttcagttcctatctttaagtgcatgccagattcatcaggagtgcctttccttaatcttgcaaccctccaggggattttgaaatttctttgctcgaagctacaagaacaggctggaggctgttcccttctgcacaatcagcttctcagcattcctattggtacatggtctccacatacggggaggtcaagtagcaggcatctcagaactttgctactgagttctcctttaaatacctgcctggattttctgcttgaagatagagtaagctcaattcctatagttgatgacaagggagcgctccatgatgtttactcactcagtgacatcatggctctggcgaagaatgatgtttatgctcgcatcgaacttgaacaagtgactgtgcaaaatgctttggatgtgcaataccaggtgcatggtcgacgacagtgttatacttgtttacagacaaataccttgctggaagtcttagagggattgtctattccaggagttcgacggcttgttgttattgaacaaagtaccagatttgtggaaggaatcatctcattgagagacatatttacatttctccttggatagcatctgtgtagccattccatacatgaaaaagcttgttgtacttggttcaaacgaaataaaaaggttacaaatgtgatagccatcttctatcttccttcttgatttggttcatattataccgcagacactacataattgagttgcaccgaaggaaagaacaggtaggtgctgcaggatggagaagtgttcaggctacagaatcattttcataggatctttgaaacagggggattttttgaaggaaatgaatctcgtggatttttcttccttggaatgaagtcgaaggacctcttcaaatgcgagcatatatatcttttttttgtggaaacatgaacgacgtcatgcaaatgattttcttgaagcattgctgtcattccagttctataagatttgaagtgtttctgtacaattacaatgcttttcatgaccccatttggttttgctttctgttttcaaacaactctgagatttggctcatgagaattgtatatgttcaattatcagtgcatcttggtgtgagtgacattaggcaacggaattttgttatgaaagactgaactgtacaagaaattgctatcataaggaaagcgaattaaggaattttggttgatgctcgaaatatgtcaattattcgcactgtgctagtgattatgtacagaatcagggaatgtctcgcatccaattagggagtgggttggttgggttggactgtgttatactgtctttggtggatcatgtaaaatatgtgatgcgatattgtagatgataatgtttgatattgtttaaaagtttgacattgtttgtagagtgaagtttaaaataaaagatgagatagatgataatgtttgatatt

SEQ ID NO: 20520 - DNA, 464 bp, Zea Mays
atggtgggcgaggggaggcgggaacgagcggcggaggaggtgaagctcgacatccgcaacgtgctcatggcgctcgaatccctcaagaaggagtccctcaagaagaagaagggcgacaaggatagagcagtcgggccgtcctctaggaagaagcacgcagaggccgcgcagcagcaagcgccaccacagaaggaggtattctgggctcccgcgtcgctcaccaccaagtcctgtgcagatgtcgagtacgacgacgatgactcgatgcgtcccgccgccgagcccaccaaggaggaggaggacatcgagggagctgtgtgcagcgccccctgtcgccgcgctgtcaagaatactaccccctccccctcgcgcaacatggtggatgcacgggccagtaccggtgctgaggatcccatggtcgtggacgtcgtcgtgacgcaactgatgccggaggaggaggcgct

SEQ ID NO: 20521 - DNA, 1946 bp, Zea Mays
cctgtatatatatatataaataaataattaattatgtaagccttcctcctctcctaatcactcacactcattgcttccctgcaccttttccttgatccacttgtcaaacaaacccttgcaagctgcaaaccactccctgccctttttgttctccttctctacactaccactccttggtttgggaattgggacgagacatgagcggagaggagcctccactaaccaacccttaatcagagtccttaaccctgattagttcgctgcctccctcctaatcccccagctctagagctcattcagcaggctcatcacacgccctctgcgtctctgttgcccagctagcagctgtaccggttcttttcgggggccagggccagggccagggtcagggacaaggagcgagagctcgccgtacgcgagccgggcggtatgtcgaacgccggcgaggccagaggcgtggggacgggccgcgggtcgcggctaccgcggtggacgcggcaggagatactggtgctcatcgaggggaagcgggtggtggagaggagcggccgtggccgcggccgcggccgggtacggggaggagagggcgccggcgccggcggagcggctgcaaagccgaccaagtgggcggcggtggcggagtactgccggcgccacggcgtggaccgcggccccgtgcagtgccgcaagcgctggagcaacctcgccggggactacaagaagatcagggagtgggagcgcggctacgcggccaggaaggaggcctccttctgggccatgcgcaacgacgcgcgccgcgagaggcgcctcccgggcttcttcgaccaggaggtctacgacatcctcgagggccgcggcgccgggaatgcggcggcgctggaggacgcggaggccaaggaggaggaggaggtcaaggcgaaggcggtgctccacactggccgcgggatccaagggggcggcctcttctcctcgtctgaggacgaggatgaccaagaagacgacgcggccacgccaagtccgacgccgacaccgacaccggcgccggcgccggcgccggctgcggtggtcgtgccgatccccggagagcaagctgtcccgttcttcgcgcgtgcctcctctctttcagtgcatgttacagagaagacggatgacgtgctgcccaggcaagcgagctccgagcaaggcacatcaaaagaaaagcagccggagcagatcaccgaggactcgccagcggcgcagtgcgggcagaagaggcagcgcagcgatgacaatgcctccggaagagccgcgaccaacctgcaggggcagctggttgaaatcctagaccggagcagccagatggtggcagcgcagctagaggcgcagaacatgaacagccgactggatagggagcagaggaaggatcaggtgagcagcctgcttggtgtgcttggcaaggtggctgatgccctctacagaattgctgataagctatagccgccactgtgagtgtgtcttgagcacagtaaataatcgctgcaagaatgtacagattggtacaggttgttggcgtcctattgttattgtggattggttctgaaatttggtcagaaacctgaaatgggatgccccattttttaacccatgggatgtagcatttgtatgcccgtatggccccaaaactgtgtattcttacagaggaatggaagtgcatatctgatgacacaatcttgggtcagttaggtttcctctaatttgatttctgcaagcagaataaactaaaaattttaaaaaaataagtccgtactgtttgacacaatcagactgcagaaggtttcagctaagacaacttaccagtgaagtttgtggaaatttctaatattgacatcctatgtgactcccggtataataaattgtaaacaacaaggaacatgggggaaaagtagttcaacatagttaattagctc

SEQ ID NO: 20522 - DNA, 3588 bp, Zea Mays
agaaaaagcccatgttgggagggggtaacgtgcgacccactccaccgatgcagcgcaatagcgcaagctctcgccgccttcctcctctccttatcctcctgacctcctctgacctctgcccccccctccattcccatttcccacgcggcaggcagctagccctacctctggtctcctctgccacctcctcccctgccacctcctcccctgcctagggtgcgccttcctcgccggacgccggcgcagggtcgggacgcttccgctgccgcgcgttccacgacccctctctgggagacgaaactcggcgccggcttggtagatacagacctgggattgccttttcctagttcagcatggagggcactctagttcagtctgcggttgttccaaccgtttacagaagcagctcaggtcggttccgtgtgcgtgcaagggccagaaccaatgctacaatggtgcgaaatatgccaacaaggactcttactcttggtggtttccaaggattgcgtcagacaaactttttagacacgaggtccgtgatcaagcgtgactttggatcgatcgtggcaagtcagattgcaagaccgcgtggatcagcctcaagaggggtggttcgtgccatgtttgagcgcttcactgagaaagcaatcaaggtgattatgcttgcacaggaggaggcaaggcgcctgggacataactttgttgggacagagcagattttgctggggcttattggtgagggcacgggtattgcggcgaaggttctgaagtctatgggaatcaatcttaaggatgcccgagttgaagtcgagaagataattggacgtggcagtgggtttgtggctgttgaaatcccattcacacctcgtgcaaaacgtgtattggaattgtcccttgaagaagctcgtcaacttgggcataactatgtaggatctgaacacttgctccttgggctacttcgtgagggtgaaggtgttgctgctcgtgtgcttgaaagccttggcgctgatccaaacaacatccgcacccaggtcataagaatggttggggaaagcacagaagctgttggggctggagttggtggaggaagcagtggccagaagatgcccacacttgaagaatacggtactaatttgacaaaattagcagaagagggcaaattggacccagtcgtttggtagacaagatcagattgagcgtgttactcagattttgggcaggcggacaaagaaacaacccctgcctaattggagagcctggtgttggaaaagactgctattgctgaggggcttgctcagcgtattgccaatggggatgttcctgaaacaatttgaaggaaagaaggttattactcttgacatggggctccttgttgctggaactaaataccgaggagagtttgaagagagactaaagaaacttatggaggaaattaagcaaaatgaagacattattctctttattgatgaagtgcacacactgattggagcaggtgcagcagaaggtgcgattgatgctgctaatattttgaagccagctcttgctagaggtgaacttcagtgcattggtgccacaacactggatgagtataggaagcatatagagaaagatcctgccttggaaagaaggtttcaaccagttaaggttccagagcctactgtggatgaaacaatacagatcttaagaggacttcgtgagagatatgaacttcatcacaaactgagatacacagatgatgctttaattgctgctgcacagctgtcttatcagtatatcagcgatcgtttcctgcctgacaaagccattgacttgattgatgaagctggatctcgtgttaggctgaggcatgcgcagctccctgatgaagccaaagagctggacaaagagctgcggcagataaccaagcagaaaaatgaggctgtacgtggccaagatttcgagaaggctggcgaattaagggaccgagaaatggagcttaaggctcaaattacagccattattgacaagagcaaggaaatgattaaagcagagactgaatctggtgaagtcggtccgcttgttactgaggcagacattcaacatattgtctcctcttggactggaattcctgtggagaaagtgtcatcggatgagtctgaccgcctcctaaagatggaagagacgctgcatacacgtatcattggacaggatgaggctgtcaaagctattagccgtgctatccgccgtgctcgtgttggcctcaagaatccaaataggccaattgccagcttcatattctctggaccgactggagttggcaaatcagagcttgcaaaggccctggcggcctactactttggctcggaggaggctatgatcaggcttgacatgagtgagttcatggagcggcatactgtctccaaactcattggatcacctccaggttatgttgggtacactgagggaggccaactaactgaagcagtccgtcgccgcccgtacacagttgttctctttgatgagattgagaaggcacatccagatgttttcaacatgatgcttcagatcttagaagatgggcggttaactgatagcaaggggcgcactgttgatttcaagaacacactattgatcatgacatctaatgtcgggagcagtgtcattgagaagggaggtcgcaagattgggttcgaccttgattatgatgagaaagacacaagctataacaggatcaagagccttgtgactgaggagttgaagcagtacttccggccagagttcttgaacagattggatgagatgattgtattccggcagctgactaaattggaggtgaaagagattgcagacattatgctgaaagaagtgtttgacaggctgaaggccaaggacattaatctccaggtgacggagaagttccgagatagagttgttgacgaaggttataacccgagctatggtgccagacctttgcggcgtgctatcatgaggcttctggaggatagtctggcagagaagatgctggctggtgaggtgaaagaaggtgactctgccatcgttgatgtggattcagatggcaaggtaatagtcctgaatggtggtagcggtgttgctgagccactggaacctgctctcagtacctaaccgaggttaaaatctttgggccgaaatggccttctttacaagtcagctgggctcttcgtgatggtaaagtagactgttattacttggccgctccattagttgctttatctttcattgatttttttttgttggaagtgaggcagtagggtcactatggaaacgaatagacggagaggcattagccgaaatgaatgtttttcagtttgatgcacttgtattattaggccttgctagcaacaaggtgcagatgcctctccgtttgctgttgtactttagtgtaacttaccttccgaatgtattattaggcgttgctagcaacaagatacggaggttatacatttgattttcagtaaaaaggtagactctttgttgcgccgcagctgttttattgtctgcgcactgcagtgttcgttcatcttggctttaggtagacgtggaagtggatttggagaaactgaagttcaa

SEQ ID NO: 20523 - DNA, 3478 bp, Zea Mays
cccactccaccgatgcagcgcaatagcgcaagctctcgccgccttcctcctctccttatcctcctgacctcctctgacctctgcccccccctccattcccatttcccacgcggcaggcagctagccctacctctggtctcctctgccacctcctcccctgccacctcctcccctgcctagggtgcgccttcctcgccggacgccggcgcagggtcgggacgcttccgctgccgcgcgttccacgacccctctctgggagacgaaactcggcgccggcttggtagatacagacctgggattgccttttcctagttcagcatggagggcactctagttcagtctgcggttgttccaaccgtttacagaagcagctcaggtcggttccgtgtgcgtgcaagggccagaaccaatgctacaatggtgcgaaatatgccaacaaggactcttactcttggtggtttccaaggattgcgtcagacaaactttttagacacgaggtccgtgatcaagcgtgactttggatcgatcgtggcaagtcagattgcaagaccgcgtggatcagcctcaagaggggtggttcgtgccatgtttgagcgcttcactgagaaagcaatcaaggtgattatgcttgcacaggaggaggcaaggcgcctgggacataactttgttgggacagagcagattttgctggggcttattggtgagggcacgggtattgcggcgaaggttctgaagtctatgggaatcaatcttaaggatgcccgagttgaagtcgagaagataattggacgtggcagtgggtttgtggctgttgaaatcccattcacacctcgtgcaaaacgtgtattggaattgtcccttgaagaagctcgtcaacttgggcataactatgtaggatctgaacacttgctccttgggctacttcgtgagggtgaaggtcataagaatggttggggaaagcacagaagctgttggggctggagttggtggaggaagcagtggccagaagatgcccacacttgaagaatacggtactaatttgacaaaattagcagaagagtcgtttggtagacaagatcagattgagcgtgttactcagattttgggcaggcggacaaagaaacaacccctgcctaattggagagcctggtgttggaaaagactgctattgctgaggggcttgctcagcgtattgccaatggggatgttcctgaaacaatttgaaggaaagaaggttattactcttgacatggggctccttgttgctggaactaaataccgaggagagtttgaagagagactaaagaaacttatggaggaaattaagcaaaatgaagacattattctctttattgatgaagtgcacacactgattggagcaggtgcagcagaaggtgcgattgatgctgctaatattttgaagccagctcttgctagaggtgaacttcagtgcattggtgccacaacactggatgagtataggaagcatatagagaaagatcctgccttggaaagaaggtttcaaccagttaaggttccagagcctactgtggatgaaacaatacagatcttaagaggacttcgtgagagatatgaacttcatcacaaactgagatacacagatgatgctttaattgctgctgcacagctgtcttatcagtatatcagcgatcgtttcctgcctgacaaagccattgacttgattgatgaagctggatctcgtgttaggctgaggcatgcgcagctccctgatgaagccaaagagctggacaaagagctgcggcagataaccaagcagaaaaatgaggctgtacgtggccaagatttcgagaaggctggcgaattaagggaccgagaaatggagcttaaggctcaaattacagccattattgacaagagcaaggaaatgattaaagcagagactgaatctggtgaagtcggtccgcttgttactgaggcagacattcaacatattgtctcctcttggactggaattcctgtggagaaagtgtcatcggatgagtctgaccgcctcctaaagatggaagagacgctgcatacacgtatcattggacaggatgaggctgtcaaagctattagccgtgctatccgccgtgctcgtgttggcctcaagaatccaaataggccaattgccagcttcatattctctggaccgactggagttggcaaatcagagcttgcaaaggccctggcggcctactactttggctcggaggaggctatgatcaggcttgacatgagtgagttcatggagcggcatactgtctccaaactcattggatcacctccaggttatgttgggtacactgagggaggccaactaactgaagcagtccgtcgccgcccgtacacagttgttctctttgatgagattgagaaggcacatccagatgttttcaacatgatgcttcagatcttagaagatgggcggttaactgatagcaaggggcgcactgttgatttcaagaacacactattgatcatgacatctaatgtcgggagcagtgtcattgagaagggaggtcgcaagattgggttcgaccttgattatgatgagaaagacacaagctataacaggatcaagagccttgtgactgaggagttgaagcagtacttccggccagagttcttgaacagattggatgagatgattgtattccggcagctgactaaattggaggtgaaagagattgcagacattatgctgaaagaagtgtttgacaggctgaaggccaaggacattaatctccaggtgacggagaagttccgagatagagttgttgacgaaggttataacccgagctatggtgccagacctttgcggcgtgctatcatgaggcttctggaggatagtctggcagagaagatgctggctggtgaggtgaaagaaggtgactctgccatcgttgatgtggattcagatggcaaggtaatagtcctgaatggtggtagcggtgttgctgagccactggaacctgctctcagtacctaaccgaggttaaaatctttgggccgaaatggccttctttacaagtcagctgggctcttcgtgatggtaaagtagactgttattacttggccgctccattagttgctttatctttcattgatttttttttgttggaagtgaggcagtagggtcactatggaaacgaatagacggagaggcattagccgaaatgaatgtttttcagtttgatgcacttgtattattaggccttgctagcaacaaggtgcagatgcctctccgtttgctgttgtactttagtgtaacttaccttccgaatgtattattaggcgttgctagcaacaagatacggaggttatacatttgattttcagtaaaaaggtagactctttgttgcgccgcagctgttttattgtctgcgcactgcagtgttcgttcatcttggctttaggtagacgtggaagtggatttggagaaactgaagttcaa

SEQ ID NO: 20524 - DNA, 3531 bp, Zea Mays
ccaccgatgcagcgcaatagcgcaagctctcgccgccttcctcctctccttatcctcctgacctcctctgacctctgcccccccctccattcccatttcccacgcggcaggcagctagccctacctctggtctcctctgccacctcctcccctgccacctcctcccctgcctagggtgcgccttcctcgccggacgccggcgcagggtcgggacgcttccgctgccgcgcgttccacgacccctctctgggagacgaaactcggcgccggcttggtagatacagacctgggattgccttttcctagttcagcatggagggcactctagttcagtctgcggttgttccaaccgtttacagaagcagctcaggtcggttccgtgtgcgtgcaagggccagaaccaatgctacaatggtgcgaaatatgccaacaaggactcttactcttggtggtttccaaggattgcgtcagacaaactttttagacacgaggtccgtgatcaagcgtgactttggatcgatcgtggcaagtcagattgcaagaccgcgtggatcagcctcaagaggggtggttcgtgccatgtttgagcgcttcactgagaaagcaatcaaggtgattatgcttgcacaggaggaggcaaggcgcctgggacataactttgttgggacagagcagattttgctggggcttattggtgagggcacgggtattgcggcgaaggttctgaagtctatgggaatcaatcttaaggatgcccgagttgaagtcgagaagataattggacgtggcagtgggtttgtggctgttgaaatcccattcacacctcgtgcaaaacgtgtattggaattgtcccttgaagaagctcgtcaacttgggcataactatgtaggatctgaacacttgctccttgggctacttcgtgagggtgaaggtgttgctgctcgtgtgcttgaaagccttggcgctgatccaaacaacatccgcacccaggtcataagaatggttggggaaagcacagaagctgttggggctggagttggtggaggaagcagtggccagaagatgcccacacttgaagaatacggtactaatttgacaaaattagcagaagagtcgtttggtagacaagatcagattgagcgtgttactcagattttgggcaggcggacaaagaaacaacccctgcctaattggagagcctggtgttggaaaagactgctattgctgaggggcttgctcagcgtattgccaatggggatgttcctgaaacaatttgaaggaaagaaggttattactcttgacatggggctccttgttgctggaactaaataccgaggagagtttgaagagagactaaagaaacttatggaggaaattaagcaaaatgaagacattattctctttattgatgaagtgcacacactgattggagcaggtgcagcagaaggtgcgattgatgctgctaatattttgaagccagctcttgctagaggtgaacttcagtgcattggtgccacaacactggatgagtataggaagcatatagagaaagatcctgccttggaaagaaggtttcaaccagttaaggttccagagcctactgtggatgaaacaatacagatcttaagaggacttcgtgagagatatgaacttcatcacaaactgagatacacagatgatgctttaattgctgctgcacagctgtcttatcagtatatcagcgatcgtttcctgcctgacaaagccattgacttgattgatgaagctggatctcgtgttaggctgaggcatgcgcagctccctgatgaagccaaagagctggacaaagagctgcggcagataaccaagcagaaaaatgaggctgtacgtggccaagatttcgagaaggctggcgaattaagggaccgagaaatggagcttaaggctcaaattacagccattattgacaagagcaaggaaatgattaaagcagagactgaatctggtgaagtcggtccgcttgttactgaggcagacattcaacatattgtctcctcttggactggaattcctgtggagaaagtgtcatcggatgagtctgaccgcctcctaaagatggaagagacgctgcatacacgtatcattggacaggatgaggctgtcaaagctattagccgtgctatccgccgtgctcgtgttggcctcaagaatccaaataggccaattgccagcttcatattctctggaccgactggagttggcaaatcagagcttgcaaaggccctggcggcctactactttggctcggaggaggctatgatcaggcttgacatgagtgagttcatggagcggcatactgtctccaaactcattggatcacctccaggttatgttgggtacactgagggaggccaactaactgaagcagtccgtcgccgcccgtacacagttgttctctttgatgagattgagaaggcacatccagatgttttcaacatgatgcttcagatcttagaagatgggcggttaactgatagcaaggggcgcactgttgatttcaagaacacactattgatcatgacatctaatgtcgggagcagtgtcattgagaagggaggtcgcaagattgggttcgaccttgattatgatgagaaagacacaagctataacaggatcaagagccttgtgactgaggagttgaagcagtacttccggccagagttcttgaacagattggatgagatgattgtattccggcagctgactaaattggaggtgaaagagattgcagacattatgctgaaagaagtgtttgacaggctgaaggccaaggacattaatctccaggtgacggagaagttccgagatagagttgttgacgaaggttataacccgagctatggtgccagacctttgcggcgtgctatcatgaggcttctggaggatagtctggcagagaagatgctggctggtgaggtgaaagaaggtgactctgccatcgttgatgtggattcagatggcaaggtaatagtcctgaatggtggtagcggtgttgctgagccactggaacctgctctcagtacctaaccgaggttaaaatctttgggccgaaatggccttctttacaagtcagctgggctcttcgtgatggtaaagtagactgttattacttggccgctccattagttgctttatctttcattgatttttttttgttggaagtgaggcagtagggtcactatggaaacgaatagacggagaggcattagccgaaatgaatgtttttcagtttgatgcacttgtattattaggccttgctagcaacaaggtgcagatgcctctccgtttgctgttgtactttagtgtaacttaccttccgaatgtattattaggcgttgctagcaacaagatacggaggttatacatttgattttcagtaaaaaggtagactctttgttgcgccgcagctgttttattgtctgcgcactgcagtgttcgttcatcttggctttaggtagacgtggaagtggatttggagaaactgaagttcaa

SEQ ID NO: 20525 - DNA, 3430 bp, Zea Mays
ctccattcccatttcccacgcggcaggcagctagccctacctctggtctcctctgccacctcctcccctgccacctcctcccctgcctagggtgcgccttcctcgccggacgccggcgcagggtcgggacgcttccgctgccgcgcgttccacgacccctctctgggagacgaaactcggcgccggcttggtagatacagacctgggattgccttttcctagttcagcatggagggcactctagttcagtctgcggttgttccaaccgtttacagaagcagctcaggtcggttccgtgtgcgtgcaagggccagaaccaatgctacaatggtgcgaaatatgccaacaaggactcttactcttggtggtttccaaggattgcgtcagacaaactttttagacacgaggtccgtgatcaagcgtgactttggatcgatcgtggcaagtcagattgcaagaccgcgtggatcagcctcaagaggggtggttcgtgccatgtttgagcgcttcactgagaaagcaatcaaggtgattatgcttgcacaggaggaggcaaggcgcctgggacataactttgttgggacagagcagattttgctggggcttattggtgagggcacgggtattgcggcgaaggttctgaagtctatgggaatcaatcttaaggatgcccgagttgaagtcgagaagataattggacgtggcagtgggtttgtggctgttgaaatcccattcacacctcgtgcaaaacgtgtattggaattgtcccttgaagaagctcgtcaacttgggcataactatgtaggatctgaacacttgctccttgggctacttcgtgagggtgaaggaactgatgttcgatatgatgttcaggtcataagaatggttggggaaagcacagaagctgttggggctggagttggtggaggaagcagtggccagaagatgcccacacttgaagaatacggtactaatttgacaaaattagcagaagagggcaaattggacccagtcgtttggtagacaagatcagattgagcgtgttactcagattttgggcaggcggacaaagaaacaacccctgcctaattggagagcctggtgttggaaaagactgctattgctgaggggcttgctcagcgtattgccaatggggatgttcctgaaacaatttgaaggaaagaaggttattactcttgacatggggctccttgttgctggaactaaataccgaggagagtttgaagagagactaaagaaacttatggaggaaattaagcaaaatgaagacattattctctttattgatgaagtgcacacactgattggagcaggtgcagcagaaggtgcgattgatgctgctaatattttgaagccagctcttgctagaggtgaacttcagtgcattggtgccacaacactggatgagtataggaagcatatagagaaagatcctgccttggaaagaaggtttcaaccagttaaggttccagagcctactgtggatgaaacaatacagatcttaagaggacttcgtgagagatatgaacttcatcacaaactgagatacacagatgatgctttaattgctgctgcacagctgtcttatcagtatatcagcgatcgtttcctgcctgacaaagccattgacttgattgatgaagctggatctcgtgttaggctgaggcatgcgcagctccctgatgaagccaaagagctggacaaagagctgcggcagataaccaagcagaaaaatgaggctgtacgtggccaagatttcgagaaggctggcgaattaagggaccgagaaatggagcttaaggctcaaattacagccattattgacaagagcaaggaaatgattaaagcagagactgaatctggtgaagtcggtccgcttgttactgaggcagacattcaacatattgtctcctcttggactggaattcctgtggagaaagtgtcatcggatgagtctgaccgcctcctaaagatggaagagacgctgcatacacgtatcattggacaggatgaggctgtcaaagctattagccgtgctatccgccgtgctcgtgttggcctcaagaatccaaataggccaattgccagcttcatattctctggaccgactggagttggcaaatcagagcttgcaaaggccctggcggcctactactttggctcggaggaggctatgatcaggcttgacatgagtgagttcatggagcggcatactgtctccaaactcattggatcacctccaggttatgttgggtacactgagggaggccaactaactgaagcagtccgtcgccgcccgtacacagttgttctctttgatgagattgagaaggcacatccagatgttttcaacatgatgcttcagatcttagaagatgggcggttaactgatagcaaggggcgcactgttgatttcaagaacacactattgatcatgacatctaatgtcgggagcagtgtcattgagaagggaggtcgcaagattgggttcgaccttgattatgatgagaaagacacaagctataacaggatcaagagccttgtgactgaggagttgaagcagtacttccggccagagttcttgaacagattggatgagatgattgtattccggcagctgactaaattggaggtgaaagagattgcagacattatgctgaaagaagtgtttgacaggctgaaggccaaggacattaatctccaggtgacggagaagttccgagatagagttgttgacgaaggttataacccgagctatggtgccagacctttgcggcgtgctatcatgaggcttctggaggatagtctggcagagaagatgctggctggtgaggtgaaagaaggtgactctgccatcgttgatgtggattcagatggcaaggtaatagtcctgaatggtggtagcggtgttgctgagccactggaacctgctctcagtacctaaccgaggttaaaatctttgggccgaaatggccttctttacaagtcagctgggctcttcgtgatggtaaagtagactgttattacttggccgctccattagttgctttatctttcattgatttttttttgttggaagtgaggcagtagggtcactatggaaacgaatagacggagaggcattagccgaaatgaatgtttttcagtttgatgcacttgtattattaggccttgctagcaacaaggtgcagatgcctctccgtttgctgttgtactttagtgtaacttaccttccgaatgtattattaggcgttgctagcaacaagatacggaggttatacatttgattttcagtaaaaaggtagactctttgttgcgccgcagctgttttattgtctgcgcactgcagtgttcgttcatcttggctttaggtagacgtggaagtggatttggagaaactgaagttcaa

SEQ ID NO: 20526 - DNA, 3544 bp, Zea Mays
ttcccatttcccacgcggcaggcagctagccctacctctggtctcctctgccacctcctcccctgccacctcctcccctgcctagggtgcgccttcctcgccggacgccggcgcagggtcgggacgcttccgctgccgcgcgttccacgacccctctctgggagacgaaactcggcgccgtaatctccccgttcccatttccccgtccgaatttgtgaagggtgtctgtcggcgcgtcgtggttgggagtgagggcttgttggatggcttggtagatacagacctgggattgccttttcctagttcagcatggagggcactctagttcagtctgcggttgttccaaccgtttacagaagcagctcaggtcggttccgtgtgcgtgcaagggccagaaccaatgctacaatggtgcgaaatatgccaacaaggactcttactcttggtggtttccaaggattgcgtcagacaaactttttagacacgaggtccgtgatcaagcgtgactttggatcgatcgtggcaagtcagattgcaagaccgcgtggatcagcctcaagaggggtggttcgtgccatgtttgagcgcttcactgagaaagcaatcaaggtgattatgcttgcacaggaggaggcaaggcgcctgggacataactttgttgggacagagcagattttgctggggcttattggtgagggcacgggtattgcggcgaaggttctgaagtctatgggaatcaatcttaaggatgcccgagttgaagtcgagaagataattggacgtggcagtgggtttgtggctgttgaaatcccattcacacctcgtgcaaaacgtgtattggaattgtcccttgaagaagctcgtcaacttgggcataactatgtaggatctgaacacttgctccttgggctacttcgtgagggtgaaggtgttgctgctcgtgtgcttgaaagccttggcgctgatccaaacaacatccgcacccaggtcataagaatggttggggaaagcacagaagctgttggggctggagttggtggaggaagcagtggccagaagatgcccacacttgaagaatacggtactaatttgacaaaattagcagaagagggcaaattggacccagtcgtttggtagacaagatcagattgagcgtgttactcagattttgggcaggcggacaaagaaacaacccctgcctaattggagagcctggtgttggaaaagactgctattgctgaggggcttgctcagcgtattgccaatggggatgttcctgaaacaatttgaaggaaagaaggttattactcttgacatggggctccttgttgctggaactaaataccgaggagagtttgaagagagactaaagaaacttatggaggaaattaagcaaaatgaagacattattctctttattgatgaagtgcacacactgattggagcaggtgcagcagaaggtgcgattgatgctgctaatattttgaagccagctcttgctagaggtgaacttcagtgcattggtgccacaacactggatgagtataggaagcatatagagaaagatcctgccttggaaagaaggtttcaaccagttaaggttccagagcctactgtggatgaaacaatacagatcttaagaggacttcgtgagagatatgaacttcatcacaaactgagatacacagatgatgctttaattgctgctgcacagctgtcttatcagtatatcagcgatcgtttcctgcctgacaaagccattgacttgattgatgaagctggatctcgtgttaggctgaggcatgcgcagctccctgatgaagccaaagagctggacaaagagctgcggcagataaccaagcagaaaaatgaggctgtacgtggccaagatttcgagaaggctggcgaattaagggaccgagaaatggagcttaaggctcaaattacagccattattgacaagagcaaggaaatgattaaagcagagactgaatctggtgaagtcggtccgcttgttactgaggcagacattcaacatattgtctcctcttggactggaattcctgtggagaaagtgtcatcggatgagtctgaccgcctcctaaagatggaagagacgctgcatacacgtatcattggacaggatgaggctgtcaaagctattagccgtgctatccgccgtgctcgtgttggcctcaagaatccaaataggccaattgccagcttcatattctctggaccgactggagttggcaaatcagagcttgcaaaggccctggcggcctactactttggctcggaggaggctatgatcaggcttgacatgagtgagttcatggagcggcatactgtctccaaactcattggatcacctccaggttatgttgggtacactgagggaggccaactaactgaagcagtccgtcgccgcccgtacacagttgttctctttgatgagattgagaaggcacatccagatgttttcaacatgatgcttcagatcttagaagatgggcggttaactgatagcaaggggcgcactgttgatttcaagaacacactattgatcatgacatctaatgtcgggagcagtgtcattgagaagggaggtcgcaagattgggttcgaccttgattatgatgagaaagacacaagctataacaggatcaagagccttgtgactgaggagttgaagcagtacttccggccagagttcttgaacagattggatgagatgattgtattccggcagctgactaaattggaggtgaaagagattgcagacattatgctgaaagaagtgtttgacaggctgaaggccaaggacattaatctccaggtgacggagaagttccgagatagagttgttgacgaaggttataacccgagctatggtgccagacctttgcggcgtgctatcatgaggcttctggaggatagtctggcagagaagatgctggctggtgaggtgaaagaaggtgactctgccatcgttgatgtggattcagatggcaaggtaatagtcctgaatggtggtagcggtgttgctgagccactggaacctgctctcagtacctaaccgaggttaaaatctttgggccgaaatggccttctttacaagtcagctgggctcttcgtgatggtaaagtagactgttattacttggccgctccattagttgctttatctttcattgatttttttttgttggaagtgaggcagtagggtcactatggaaacgaatagacggagaggcattagccgaaatgaatgtttttcagtttgatgcacttgtattattaggccttgctagcaacaaggtgcagatgcctctccgtttgctgttgtactttagtgtaacttaccttccgaatgtattattaggcgttgctagcaacaagatacggaggttatacatttgattttcagtaaaaaggtagactctttgttgcgccgcagctgttttattgtctgcgcactgcagtgttcgttcatcttggctttaggtagacgtggaagtggatttggagaaactgaagttcaa

SEQ ID NO: 20527 - DNA, 1990 bp, Zea Mays
accgccctgtgcctgcagctgcaccctgcagcgctcactcgctcactgactcactcccctcccctggcctcctcctcctcctcctctctctctctccactatctcccacagccgaaccaacatgcaggggcgcagcagggacgccgccaccattgctgcagcggtggcgtgcgcagctgtgctgctcctcggcgacgcctggagcgtctcggcgcaggcggcggcggaggaggacaagataagcgccctgccggggcagccgccggtgggcttcgcacagtactccggttacatcccggtggacgccgcggggaagcgctccctcttctactacttcgccgaggcggaggcggatccggcggccaagccgctcgtgctctggctcaatggagggcctgggtgctcatccgtgggagtgggggcgttctcagagaatgggccgttcaggcctagcggcaatgcgctaacgaggaacgagtacagctggaacaaagacccatataattcgtctttgggtgttttggatttctgaagccagagacaacttgaagttcttgcaaggctggttcgccaggttcccgcagtacaagggcagggacctgtatatcacaggagagagctacgctggccactacgttccacagttagcccagcgcatggttgagttcaacaagaaggagaagctattcaacctgaaaggcattgctcttggcaaccctgtgctggagttctccaccgacttcaactcgcgggcggagttcttctggtcgcacggcctgatatcggactccacctacaacatcttcacgacggtgtgcaactactcgcggtacgtgagcgagtactaccgcggctccctgagcacggcctgcgacagggtgatgagccaggtggcgagggagacgagcaggttcgtcgacaagtacgacgtcaccctggacgtctgcatctcgtcggtgctcatgcagtcccaggtcctcgtccctcagcaagggagcagggagctggacgtgtgcgtggaggacgagacgatgcggtacctgaaccggaaggacgtgcagcaggccatgcacgcgcgcctcgacggcgtgcagaggtggacggtctgcagcaggtgaaggccaaagcgtgtgcctacgactcttgtcttgccttgccttttgcgtgctcagctagctctctcttactggctgactgcctgcgctgcgctgcgttcacgattgatggatggatgtatatgtagcagcgttctggagtacaagcagctggacctccagatcccgaccgtgaacaccgtgggcgcgctcgtgaaggcgggcatccccgcgctggtgtacagcggcgaccaggactcggtgatcccgctgacgggcagcaggacgctggtggggcggctggcggccaggctccggctcaacgccacggcgccgtaccgggcctggttccaggggaagcaggtgggcgggtggacgcaggtgttcggcggcggcgccctgtccttcgccacggtgcgcggcgcgtcccacgaggcgcccttctcgcagcccgagcgctcgctcggcctcttcagggcgttcctcgccggacagcagttgccggaatcgttccagtgacgacggaacgttcctcttcctcgtctagtgtatgttcattgtaagcgtgtacgtgcagctcaccgtatgtcgtcatcatccggccgctcgacactggcaaaacaacccaaatgggttcttgttcttctccaggtgtaatcaggacgaaaataatatcattgggagggatgagattgtgtgtcgtcggatataccgcggacggctttcaatgttgtaggcttagtacaactgtaatatgcacatgctggttcaaatttggcatgtgaggcgaagaacctggagatttggaaccagaaatcgatcgtggatgacggagaccaaccgcgccacccacgtatcaatcctcggttacgagtagtattggacgtaattaagac

SEQ ID NO: 20528 - DNA, 1910 bp, Zea Mays
accgccctgtgcctgcagctgcaccctgcagcgctcactcgctcactgactcactcccctcccctggcctcctcctcctcctcctctctctctctccactatctcccacagccgaaccaacatgcaggggcgcagcagggacgccgccaccattgctgcagcggtggcgtgcgcagctgtgctgctcctcggcgacgcctggagcgtctcggcgcaggcggcggcggaggaggacaagataagcgccctgccggggcagccgccggtgggcttcgcacagtactccggttacatcccggtggacgccgcggggaagcgctccctcttctactacttcgccgaggcggaggcggatccggcggccaagccgctcgtgctctggctcaatggagggcctgggtgctcatccgtgggagtgggggcgttctcagagaatgggccgttcaggcctagcggcaatgcgctaacgaggaacgagtacagctggaacaaagaggccaatatgctgtatctggagagccctgcaggggttggcttttcatactccactgatcctgccttctatgagggtgttggtgacagcatgacagagacaacttgaagttcttgcaaggctggttcgccaggttcccgcagtacaagggcagggacctgtatatcacaggagagagctacgctggccactacgttccacagttagcccagcgcatggttgagttcaacaagaaggagaagctattcaacctgaaaggcattgctcttggcaaccctgtgctggagttctccaccgacttcaactcgcgggcggagttcttctggtcgcacggcctgatatcggactccacctacaacatcttcacgacggtgtgcaactactcgcggtacgtgagcgagtactaccgcggctccctgagcacggcctgcgacagggtgatgagccaggtggcgagggagacgagcaggttcgtcgacaagtacgacgtcaccctggacgtctgcatctcgtcggtgctcatgcagtcccaggtcctcgtccctcagcaagggagcagggagctggacgtgtgcgtggaggacgagacgatgcggtacctgaaccggaaggacgtgcagcaggccatgcacgcgcgcctcgacggcgtgcagaggtggacggtctgcagcagcgttctggagtacaagcagctggacctccagatcccgaccgtgaacaccgtgggcgcgctcgtgaaggcgggcatccccgcgctggtgtacagcggcgaccaggactcggtgatcccgctgacgggcagcaggacgctggtggggcggctggcggccaggctccggctcaacgccacggcgccgtaccgggcctggttccaggggaagcaggtgggcgggtggacgcaggtgttcggcggcggcgccctgtccttcgccacggtgcgcggcgcgtcccacgaggcgcccttctcgcagcccgagcgctcgctcggcctcttcagggcgttcctcgccggacagcagttgccggaatcgttccagtgacgacggaacgttcctcttcctcgtctagtgtatgttcattgtaagcgtgtacgtgcagctcaccgtatgtcgtcatcatccggccgctcgacactggcaaaacaacccaaatgggttcttgttcttctccaggtgtaatcaggacgaaaataatatcattgggagggatgagattgtgtgtcgtcggatataccgcggacggctttcaatgttgtaggcttagtacaactgtaatatgcacatgctggttcaaatttggcatgtgaggcgaagaacctggagatttggaaccagaaatcgatcgtggatgacggagaccaaccgcgccacccacgtatcaatcctcggttacgagtagtattggacgtaattaagac

SEQ ID NO: 20529 - DNA, 1902 bp, Zea Mays
accgccctgtgcctgcagctgcaccctgcagcgctcactcgctcactgactcactcccctcccctggcctcctcctcctcctcctctctctctctccactatctcccacagccgaaccaacatgcaggggcgcagcagggacgccgccaccattgctgcagcggtggcgtgcgcagctgtgctgctcctcggcgacgcctggagcgtctcggcgcaggcggcggcggaggaggacaagataagcgccctgccggggcagccgccggtgggcttcgcacagtactccggttacatcccggtggacgccgcggggaagcgctccctcttctactacttcgccgaggcggaggcggatccggcggccaagccgctcgtgctctggctcaatggagggcctgggtgctcatccgtgggagtgggggcgttctcagagaatgggccgttcaggcctagcggcaatgcgctaacgaggaacgagtacagctggaacaaagaggccaatatgctgtatctggagagccctgcaggggttggcttttcatactccactgatcctgccttctatgagggtgttggtgacagcatgacagccagagacaacttgaagttcttgcaaggctggttcgccaggttcccgcagtacaagggcagggacctgtatatcacaggagagagctacgctggccactacgttccacagttagcccagcgcatggttgagttcaacaagaaggagaagctattcaacctgaaaggcattgctcttggcaaccctgtgctggagttctccaccgacttcaactcgcgggcggagttcttctggtcgcacggcctgatatcggactccacctacaacatcttcacgacggtgtgcaactactcgcggtacgtgagcgagtactaccgcggctccctgagcacggcctgcgacagggtgatgagccaggtggcgagggagacgagcaggttcgtcgacaagtacgacgtcaccctggacgtctgcatctcgtcggtgctcatgcagtcccagcaagggagcagggagctggacgtgtgcgtggaggacgagacgatgcggtacctgaaccggaaggacgtgcagcaggccatgcacgcgcgcctcgacggcgtgcagaggtggacggtctgcagcagcagcgttctggagtacaagcagctggacctccagatcccgaccgtgaacaccgtgggcgcgctcgtgaaggcgggcatccccgcgctggtgtacagcggcgaccaggactcggtgatcccgctgacgggcagcaggacgctggtggggcggctggcggccaggctccggctcaacgccacggcgccgtaccgggcctggttccaggggaagcaggtgggcgggtggacgcaggtgttcggcggcggcgccctgtccttcgccacggtgcgcggcgcgtcccacgaggcgcccttctcgcagcccgagcgctcgctcggcctcttcagggcgttcctcgccggacagcagttgccggaatcgttccagtgacgacggaacgttcctcttcctcgtctagtgtatgttcattgtaagcgtgtacgtgcagctcaccgtatgtcgtcatcatccggccgctcgacactggcaaaacaacccaaatgggttcttgttcttctccaggtgtaatcaggacgaaaataatatcattgggagggatgagattgtgtgtcgtcggatataccgcggacggctttcaatgttgtaggcttagtacaactgtaatatgcacatgctggttcaaatttggcatgtgaggcgaagaacctggagatttggaaccagaaatcgatcgtggatgacggagaccaaccgcgccacccacgtatcaatcctcggttacgagtagtattggacgtaattaagac

SEQ ID NO: 20530 - DNA, 633 bp, Zea Mays
actgcccatgctgcccgtgtcgccccacgtgccgctacgcctgcctccccatagcaacgtgtcgcgcccccctatcgcaccgttgtgcagcacggtcctaccttgacgcatgcactgtgttccatgcactcgatcttgctattgcacccacacttgccacatccaccacaaacacaccaccggtgttgcagccaccctgtcgtgcccctgcactcacgcaggacaccaatgtgcaccgcctagtctaccccaccgtggtgttgtcgggcactattcaaccttttgtcgataagactcaagaatttgttgatcgtgcctttagtttgttagcaatcacaatgggtatgatgtgttatgcatatgtacaaattatcgcaactataaatgtaaggacagaagaacgatgacactccacctttatacacatggtttcataccaagttgtgaagtgtggatgcaccacaacaagtcacaccgtcaacctgtaagaaaacttatctgatccaaaagcaaattcattcacttgcttgtctacacattttgtatttaatttactcgaaatatttccaaccccggatagcgagtttgacagtgtgtgaatgttagtgtgcacaaggatttgtggtagttatc

SEQ ID NO: 20531 - DNA, 660 bp, Zea Mays
actgcccatgctgcccgtgtcgccccacgtgccgctacgcctgcctccccatagcaacgtgtcgcgcccccctatcgcaccgttgtgcagcacggtcctaccttgacgcatgcactgtgttccatgcactcgatcttgctattgcacccacacttgccacatccaccacaaacacaccaccggtgttgcagccaccctgtcgtgcccctgcactcacgcaggacaccaatgtgcaccgcctagtctaccccaccgtggtgttgtcgggcactattcaaccttttgtcgataagcatgattatgtgtgaggatcggtgaagactcaagaatttgttgatcgtgcctttagtttgttagcaatcacaatgggtatgatgtgttatgcatatgtacaaattatcgcaactataaatgtaaggacagaagaacgatgacactccacctttatacacatggtttcataccaagttgtgaagtgtggatgcaccacaacaagtcacaccgtcaacctgtaagaaaacttatctgatccaaaagcaaattcattcacttgcttgtctacacattttgtatttaatttactcgaaatatttccaaccccggatagcgagtttgacagtgtgtgaatgttagtgtgcacaaggatttgtggtagttatc

SEQ ID NO: 20532 - DNA, 1040 bp, Zea Mays
actgcccatgctgcccgtgtcgccccacgtgccgctacgcctgcctccccatagcaacgtgtcgcgcccccctatcgcaccgttgtgcagcacggtcctaccttgacgcatgcactgtgttccatgcactcgatcttgctattgcacccacacttgccacatccaccacaaacacaccaccggtgttgcagccaccctgtcgtgcccctgcactcacgcaggacaccaatgtgcaccgcctagtctaccccaccgtggtgttgtcgggcactattcaaccttttgtcgataaggagacacaaatgtcattaccaaagtaaagcacaacagagcagaactaaactctcattgtggatctccatctccacaagaatattgaatgaagacacacactccttcagctcttggtattcttctgattccacaacattacctctttcttctaagaagactggacagtggttgtgcatccacacaacaaatttggatatagcaagggtgagtacatacacactcaacaagtatcccactttgggtaaaatggacatgctacatagtggactagcttattaagcatttgattttagttggtcaatttttagtttaacactaaaagcataactaacatccccttttgtcaaaacagtaatcatcataaaatagttacagtccagtaaccataaaacattcactatgctcccatagtgaaccaagtaaaaaagcattatgtactccatatgtaaccctttaactttgttccattttgcaaactctagtttgtgagggcccaagccactcttaaccgtgaccacgactgatatattagtttacactctcaagagattgtacaactttatccataggttgtgttgaacatatgttaaggggtttcaagatccgtacacctctctcaagaaagtgtggcagggttcactatgagaccttcacaaagtgtcatcctatgtgtatcaattcatagccacatgccctagaagcaatctttgataactccttgttaatgttggaaattttcaaatggc

SEQ ID NO: 20533 - DNA, 1997 bp, Zea Mays
cgtcagcctatccaccctcctccgccgctcgcctgcccgctgctgcgcttcaccccgctctcgcctcccgccgccgcgccgtcccggtcgcgatggccctgcgctccccggatctgcggtggctcggatcgctcacgaggcccggccgccttgcaccatccccactcgccgcgctcgcctccccacggcgccgccgccgcgcaccgtccccttcgccctcgccctccgactcctccaccccatctaccgcccctacatccgacagtgggccgggagcggaggggatggaggggctggagtggaagaagatcagtgccaagaggttcgggatcaaggagtccatgatcccccccgaggcctggaacgtactacaccgcctccgcagcagaggatatgatgtgtaccttgttggtggttgtgttcgagatctcataatgaaaaagacgccaaaggatttcgacataataacaacagctgatcttaggtgaaagacactttcttaggatcagctgttatagtaggaaggcgttttcccatatgtcatgtacatgagaacaattccatcgttgaggtgtcaagttttaatacttgtgcaaggggatcaagtggtagccagatttacaattcaaagagccaaaattgtagcaagaatgattttgttcgctggaagaactgccaaaggagggacttcacaattaatgggttaatgtttaacccatattcagaaaagatctatgattacttgggaggcattgaagatattaagaaagctaaggtccgtactgtaattcctgctggcacttcgtttcaggaggactgtgcccgtattctacgtgcaatcagaattgcagctcgtttagggttcagcttccccaaagaaacagcttattatgtgagaacacttgcttgctcagtggcaagacttgataaggcaaggatactcatggagatgaactatatgcttgcttatggttcagctgaagcttctttgaggttgttgtggaggtttggcctccttgaacatttgttgccctttcaggcagcatatttctcttcgactcgttttaagaggaaggataaaggaactaatatgctacttgtcttattttctaagctggataattttcttgcaccgaacaggccatgtcacaatagtctatggataagccttttagcttttcatgaagcattggcacgcaaaccatgtgatcctttgatagtggctacttttgcactagccttttacctgggaggtgatatgtctttggcagtggatatcggaaaatcaatcaaccgacaacatgatactggctttcgggagctcttagaacccaaagtctggactgataagcatttggcaggtgaagtacaaagctttgctgcattgatgaagcaggcattaactgaaatgactgatgagtatcatgtcgcaaatgctatggcaaaaatccctcaagcaccttcctcagatcttgtatttataccactacaagcctacctgaaggttctcaaatttatcgagtgtgttcaatatggcaaaaaggagcgtggccatgaaccaaaacgcgatgggatgatcaattaccataacctgtctaatggtacacatgcagaaataagaaacctctttacactggtggtttttgacacactgtaccctacagacacggaggatgaaaatgactgcagttcttagagagacatcatgattgggatgaattcaatactttgccagacatcaataaatactccatttgtcccaaaatatatttctttctagtcttttttttggtccacattcatcctaatgatagtgaatgtagacatacatacaaactatattcgtagattaattaatgaatgtttgtttagtttaaaacgaattatattttgggactgagagagtaataaataataaatagccagggacaactggagctgctgcatcagagtgaaggcaaaaacattggacgtcattgcttggtctgatgctgttg

SEQ ID NO: 20534 - DNA, 1965 bp, Zea Mays
ccctcctccgccgctcgcctgcccgctgctgcgcttcaccccgctctcgcctcccgccgccgcgccgtcccggtcgcgatggccctgcgctccccggatctgcggtggctcggatcgctcacgaggcccggccgccttgcaccatccccactcgccgcgctcgcctccccacggcgccgccgccgcgcaccgtccccttcgccctcgccctccgactcctccaccccatctaccgcccctacatccgacagtgggccgggagcggaggggatggaggggctggagtggaagaagatcagtgccaagaggttcgggatcaaggagtccatgatcccccccgaggcctggaacgtactacaccgcctccgcagcagaggatatgatgtgtaccttgttggtggttgtgttcgagatctcataatgaaaaagacgccaaaggatttcgacataataacaacagctgatcttaggcaggtgaaagacactttcttaggatcagctgttatagtaggaaggcgttttcccatatgtcatgtacatgagaacaattccatcgttgaggtgtcaagttttaatacttgtgcaaggggatcaagtggtagccagatttacaattcaaagagccaaaattgtagcaagaatgattttgttcgctggaagaactgccaaaggagggacttcacaattaatgggttaatgtttaacccatattcagaaaagatctatgattacttgggaggcattgaagatattaagaaagctaaggtccgtactgtaattcctgctggcacttcgtttcaggaggactgtgaattgcagctcgtttagggttcagcttccccaaagaaacagcttattatgtgagaacacttgcttgctcagtggcaagacttgataaggcaaggatactcatggagatgaactatatgcttgcttatggttcagctgaagcttctttgaggttgttgtggaggtttggcctccttgaacatttgttgccctttcaggcagcatatttctcttcgactcgttttaagaggaaggataaaggaactaatatgctacttgtcttattttctaagctggataattttcttgcaccgaacaggccatgtcacaatagtctatggataagccttttagcttttcatgaagcattggcacgcaaaccatgtgatcctttgatagtggctacttttgcactagccttttacctgggaggtgatatgtctttggcagtggatatcggaaaatcaatcaaccgacaacatgatactggctttcgggagctcttagaacccaaagtctggactgataagcatttggcaggtgaagtacaaagctttgctgcattgatgaagcaggcattaactgaaatgactgatgagtatcatgtcgcaaatgctatggcaaaaatccctcaagcaccttcctcagatcttgtatttataccactacaagcctacctgaaggttctcaaatttatcgagtgtgttcaatatggcaaaaaggagcgtggccatgaaccaaaacgcgatgggatgatcaattaccataacctgtctaatggtacacatgcagaaataagaaacctctttacactggtggtttttgacacactgtaccctacagacacggaggatgaaaatgactgcagttcttagagagacatcatgattgggatgaattcaatactttgccagacatcaataaatactccatttgtcccaaaatatatttctttctagtcttttttttggtccacattcatcctaatgatagtgaatgtagacatacatacaaactatattcgtagattaattaatgaatgtttgtttagtttaaaacgaattatattttgggactgagagagtaataaataataaatagccagggacaactggagctgctgcatcagagtgaaggcaaaaacattggacgtcattgcttggtctgatgctgttg

SEQ ID NO: 20535 - DNA, 2019 bp, Zea Mays
ctcgcctgcccgctgctgcgcttcaccccgctctcgcctcccgccgccgcgccgtcccggtcgcgatggccctgcgctccccggatctgcggtggctcggatcgctcacgaggcccggccgccttgcaccatccccactcgccgcgctcgcctccccacggcgccgccgccgcgcaccgtccccttcgccctcgccctccgactcctccaccccatctaccgcccctacatccgacagtgggccgggagcggaggggatggaggggctggagtggaagaagatcagtgccaagaggttcgggatcaaggagtccatgatcccccccgaggcctggaacgtactacaccgcctccgcagcagaggatatgatgtgtaccttgttggtggttgtgttcgagatctcataatgaaaaagacgccaaaggatttcgacataataacaacagctgatcttaggcaggttataactcaaattaacaatgatgtgatcatgatgtagcggtattactggaatgaaggtctactcaagttttgaggcatcatgtgatggagctattctttcactgaaacgcgtagatattttaagtttgctgtcatagttttgcaaatagcaggtgtcaagttttaatacttgtgcaaggggatcaagtggtagccagatttacaattcaaagagccaaaattgtagcaagaatgattttgttcgctggaagaactgccaaaggagggacttcacaattaatgggttaatgtttaacccatattcagaaaagatctatgattacttgggaggcattgaagatattaagaaagctaaggtccgtactgtaattcctgctggcacttcgtttcaggaggactgtgaattgcagctcgtttagggttcagcttccccaaagaaacagcttattatgtgagaacacttgcttgctcagtggcaagacttgataaggcaaggatactcatggagatgaactatatgcttgcttatggttcagctgaagcttctttgaggttgttgtggaggtttggcctccttgaacatttgttgccctttcaggcagcatatttctcttcgactcgttttaagaggaaggataaaggaactaatatgctacttgtcttattttctaagctggataattttcttgcaccgaacaggccatgtcacaatagtctatggataagccttttagcttttcatgaagcattggcacgcaaaccatgtgatcctttgatagtggctacttttgcactagccttttacctgggaggtgatatgtctttggcagtggatatcggaaaatcaatcaaccgacaacatgatactggctttcgggagctcttagaacccaaagtctggactgataagcatttggcaggtgaagtacaaagctttgctgcattgatgaagcaggcattaactgaaatgactgatgagtatcatgtcgcaaatgctatggcaaaaatccctcaagcaccttcctcagatcttgtatttataccactacaagcctacctgaaggttctcaaatttatcgagtgtgttcaatatggcaaaaaggagcgtggccatgaaccaaaacgcgatgggatgatcaattaccataacctgtctaatggtacacatgcagaaataagaaacctctttacactggtggtttttgacacactgtaccctacagacacggaggatgaaaatgactgcagttcttagagagacatcatgattgggatgaattcaatactttgccagacatcaataaatactccatttgtcccaaaatatatttctttctagtcttttttttggtccacattcatcctaatgatagtgaatgtagacatacatacaaactatattcgtagattaattaatgaatgtttgtttagtttaaaacgaattatattttgggactgagagagtaataaataataaatagccagggacaactggagctgctgcatcagagtgaaggcaaaaacattggacgtcattgcttggtctgatgctgttg

SEQ ID NO: 20536 - DNA, 1946 bp, Zea Mays
cgcctgcccgctgctgcgcttcaccccgctctcgcctcccgccgccgcgccgtcccggtcgcgatggccctgcgctccccggatctgcggtggctcggatcgctcacgaggcccggccgccttgcaccatccccactcgccgcgctcgcctccccacggcgccgccgccgcgcaccgtccccttcgccctcgccctccgactcctccaccccatctaccgcccctacatccgacagtgggccgggagcggaggggatggaggggctggagtggaagaagatcagtgccaagaggttcgggatcaaggagtccatgatcccccccgaggcctggaacgtactacaccgcctccgcagcagaggatatgatgtgtaccttgttggtggttgtgttcgagatctcataatgaaaaagacgccaaaggatttcgacataataacaacagctgatcttaggtgaaagacactttcttaggatcagctgttatagtaggaaggcgttttcccatatgtcatgtacatgagaacaattccatcgttgaggtgtcaagttttaatacttgtgcaaggggatcaagtggtagccagatttacaattcaaagagccaaaattgtagcaagaatgattttgttcgctggaagaactgccaaaggagggacttcacaattaatgggttaatgtttaacccatattcagaaaagatctatgattacttgggaggcattgaagatattaagaaagctaaggtccgtactgtaattcctgctggcacttcgtttcaggaggactgtgaattgcagctcgtttagggttcagcttccccaaagaaacagcttattatgtgagaacacttgcttgctcagtggcaagacttgataaggcaaggatactcatggagatgaactatatgcttgcttatggttcagctgaagcttctttgaggttgttgtggaggtttggcctccttgaacatttgttgccctttcaggcagcatatttctcttcgactcgttttaagaggaaggataaaggaactaatatgctacttgtcttattttctaagctggataattttcttgcaccgaacaggccatgtcacaatagtctatggataagccttttagcttttcatgaagcattggcacgcaaaccatgtgatcctttgatagtggctacttttgcactagccttttacctgggaggtgatatgtctttggcagtggatatcggaaaatcaatcaaccgacaacatgatactggctttcgggagctcttagaacccaaagtctggactgataagcatttggcaggtgaagtacaaagctttgctgcattgatgaagcaggcattaactgaaatgactgatgagtatcatgtcgcaaatgctatggcaaaaatccctcaagcaccttcctcagatcttgtatttataccactacaagcctacctgaaggttctcaaatttatcgagtgtgttcaatatggcaaaaaggagcgtggccatgaaccaaaacgcgatgggatgatcaattaccataacctgtctaatggtacacatgcagaaataagaaacctctttacactggtggtttttgacacactgtaccctacagacacggaggatgaaaatgactgcagttcttagagagacatcatgattgggatgaattcaatactttgccagacatcaataaatactccatttgtcccaaaatatatttctttctagtcttttttttggtccacattcatcctaatgatagtgaatgtagacatacatacaaactatattcgtagattaattaatgaatgtttgtttagtttaaaacgaattatattttgggactgagagagtaataaataataaatagccagggacaactggagctgctgcatcagagtgaaggcaaaaacattggacgtcattgcttggtctgatgctgttg

SEQ ID NO: 20537 - DNA, 2016 bp, Zea Mays
cgcctgcccgctgctgcgcttcaccccgctctcgcctcccgccgccgcgccgtcccggtcgcgatggccctgcgctccccggatctgcggtggctcggatcgctcacgaggcccggccgccttgcaccatccccactcgccgcgctcgcctccccacggcgccgccgccgcgcaccgtccccttcgccctcgccctccgactcctccaccccatctaccgcccctacatccgacagtgggccgggagcggaggggatggaggggctggagtggaagaagatcagtgccaagaggttcgggatcaaggagtccatgatcccccccgaggcctggaacgtactacaccgcctccgcagcagaggatatgatgtgtaccttgttggtggttgtgttcgagatctcataatgaaaaagacgccaaaggatttcgacataataacaacagctgatcttaggcaggttataactcaaattaacaatgatgtgatcatgatgtagcggtattactggaatgaaggtctactcaagttttgaggcatcatgtgatggagctattctttcactgaaacgcgtagatattttaagtttgctgtcatagttttgcaaatagcaggtgaaagacactttcttaggatcagctgttatagtaggaaggcgttttcccatatgtcatgtacatgagaacaattccatcgttgaggtgtcaagttttaatacttgtgcaaggggatcaagtggtagccagatttacaattcaaagagccaaaattgtagcaagaatgattttgttcgctggaagaactgccaaaggagggacttcacaattaatgggttaatgtttaacccatattcagaaaagatctatgattacttgggaggcattgaagatattaagaaagctaaggtccgtactgtaattcctgctggcacttcgtttcaggaggactgtgcccgtattctacgtgcaatcagaattgcagctcgtttagggttcagcttccccaaagaaacagcttattatgtgagaacacttgcttgctcagtggcaagacttgataaggcaaggatactcatggagatgaactatatgcttgcttatggttcagctgaagcttctttgaggttgttgtggaggtttggcctccttgaacatttgttgccctttcaggcagcatatttctcttcgactcgttttaagaggaaggataaaggaactaatatgctacttgtcttattttctaagctggataattttcttgcaccgaacaggccatgtcacaatagtctatgtggatatcggaaaatcaatcaaccgacaacatgatactggctttcgggagctcttagaacccaaagtctggactgataagcatttggcaggtgaagtacaaagctttgctgcattgatgaagcaggcattaactgaaatgactgatgagtatcatgtcgcaaatgctatggcaaaaatccctcaagcaccttcctcagatcttgtatttataccactacaagcctacctgaaggttctcaaatttatcgagtgtgttcaatatggcaaaaaggagcgtggccatgaaccaaaacgcgatgggatgatcaattaccataacctgtctaatggtacacatgcagaaataagaaacctctttacactggtggtttttgacacactgtaccctacagacacggaggatgaaaatgactgcagttcttagagagacatcatgattgggatgaattcaatactttgccagacatcaataaatactccatttgtcccaaaatatatttctttctagtcttttttttggtccacattcatcctaatgatagtgaatgtagacatacatacaaactatattcgtagattaattaatgaatgtttgtttagtttaaaacgaattatattttgggactgagagagtaataaataataaatagccagggacaactggagctgctgcatcagagtgaaggcaaaaacattggacgtcattgcttggtctgatgctgttg

SEQ ID NO: 20538 - DNA, 1659 bp, Zea Mays
gtatgatgtgaggatgtcttgcttggaaacaatgatcttggtttacttaaacttttgttctttatagatttcagtgtattcttatgttgccttttgatggcagtgacaaatcattcatatcagacaatcctgaatattttacaaaggtgaaagacactttcttaggatcagctgttatagtaggaaggcgttttcccatatgtcatgtacatgagaacaattccatcgttgaggtgtcaagttttaatacttgtgcaaggggatcaagtggtagccagatttacaattcaaagagccaaaattgtagcaagaatgattttgttcgctggaagaactgccaaaggagggacttcacaattaatgggttaatgtttaacccatattcagaaaagatctatgattacttgggaggcattgaagatattaagaaagctaaggtccgtactgtaattcctgctggcacttcgtttcaggaggactgtgcccgtattctacgtgcaatcagaattgcagctcgtttagggttcagcttccccaaagaaacagcttattatgtgagaacacttgcttgctcagtggcaagacttgataaggcaaggatactcatggagatgaactatatgcttgcttatggttcagctgaagcttctttgaggttgttgtggaggtttggcctccttgaacatttgttgccctttcaggcagcatatttctcttcgactcgttttaagaggaaggataaaggaactaatatgctacttgtcttattttctaagctggataattttcttgcaccgaacaggccatgtcacaatagtctatggataagccttttagcttttcatgaagcattggcacgcaaaccatgtgatcctttgatagtggctacttttgcactagccttttacctgggaggtgatatgtctttggcagtggatatcggaaaatcaatcaaccgacaacatgatactggctttcgggagctcttagaacccaaagtctggactgataagcatttggcaggtgaagtacaaagctttgctgcattgatgaagcaggcattaactgaaatgactgatgagtatcatgtcgcaaatgctatggcaaaaatccctcaagcaccttcctcagatcttgtatttataccactacaagcctacctgaaggttctcaaatttatcgagtgtgttcaatatggcaaaaaggagcgtggccatgaaccaaaacgcgatgggatgatcaattaccataacctgtctaatggtacacatgcagaaataagaaacctctttacactggtggtttttgacacactgtaccctacagacacggaggatgaaaatgactgcagttcttagagagacatcatgattgggatgaattcaatactttgccagacatcaataaatactccatttgtcccaaaatatatttctttctagtcttttttttggtccacattcatcctaatgatagtgaatgtagacatacatacaaactatattcgtagattaattaatgaatgtttgtttagtttaaaacgaattatattttgggactgagagagtaataaataataaatagccagggacaactggagctgctgcatcagagtgaaggcaaaaacattggacgtcattgcttggtctgatgctgttg

SEQ ID NO: 20539 - DNA, 1466 bp, Zea Mays
cattcatatcagacaatcctgaatattttacaaaggtgaaagacactttcttaggatcagctgttatagtaggaaggcgttttcccatatgtcatgtacatgagaacaattccatcgttgaggtgtcaagttttaatacttgtgcaaggggatcaagtggtagccagatttacaattcaaagagccaaaattgtagcaagaatgattttgttcgctggaagaactgccaaaggagggacttcacaattaatgggttaatgtttaacccatattcagaaaagatctatgattacttgggaggcattgaagatattaagaaagctaaggtccgtactgtaattcctgctggcacttcgtttcaggaggactgtgaattgcagctcgtttagggttcagcttccccaaagaaacagcttattatgtgagaacacttgcttgctcagtggcaagacttgataaggcaaggatactcatggagatgaactatatgcttgcttatggttcagctgaagcttctttgaggttgttgtggaggtttggcctccttgaacatttgttgccctttcaggtcttattttctaagctggataattttcttgcaccgaacaggccatgtcacaatagtctatggataagccttttagcttttcatgaagcattggcacgcaaaccatgtgatcctttgatagtggctacttttgcactagccttttacctgggaggtgatatgtctttggcagtggatatcggaaaatcaatcaaccgacaacatgatactggctttcgggagctcttagaacccaaagtctggactgataagcatttggcaggtgaagtacaaagctttgctgcattgatgaagcaggcattaactgaaatgactgatgagtatcatgtcgcaaatgctatggcaaaaatccctcaagcaccttcctcagatcttgtatttataccactacaagcctacctgaaggttctcaaatttatcgagtgtgttcaatatggcaaaaaggagcgtggccatgaaccaaaacgcgatgggatgatcaattaccataacctgtctaatggtacacatgcagaaataagaaacctctttacactggtggtttttgacacactgtaccctacagacacggaggatgaaaatgactgcagttcttagagagacatcatgattgggatgaattcaatactttgccagacatcaataaatactccatttgtcccaaaatatatttctttctagtcttttttttggtccacattcatcctaatgatagtgaatgtagacatacatacaaactatattcgtagattaattaatgaatgtttgtttagtttaaaacgaattatattttgggactgagagagtaataaataataaatagccagggacaactggagctgctgcatcagagtgaaggcaaaaacattggacgtcattgcttggtctgatgctgttg

SEQ ID NO: 20540 - DNA, 560 bp, Zea Mays
gccataaacactgaattattcaatttgcacttcacaatcaattaatcatggtagcaaaaatcatgcttagaagagtactagcacacgaatcatggcaagaatcatgctttaagggtgctatcacaggccacagagataatgcaaccaacaaccatagtttaactctcacaaatggtgccagtggcggctacctagagtgcaggaatggccaacctaaactctggaatacggtcacgaagaggtggggaaacaattgaggtagtgaaaacaggtaactgctggaagaaacggaaacagaaaccaacagctacacagaatatttctgcagtaccacaatacatctaatgcatgcccaaactctgctatcttcaatgttcaacccggcttgaaccacaagcagatactgtcgaatcttcgtactgtacttgtatcattcctcacagttcatgtctttatgcgcaccacaaacgaacctgtcatcaagaacacgatttagataactgccatgagttcacataaggcaaaaccaaaatccatgcaataggcactgaaaatatgaa

SEQ ID NO: 20541 - DNA, 171 bp, Zea Mays
atggaggatgcgaggaacgcactcactctctgcctgcgagaagtcggcgacgcggagcgcccagatggccagatgtcgaagaatccagaccagacggaggcgaggcctagcgcggagggcggcggctcccgagcggatggaggcagtggaggcggacgtgcgcggatgtag

SEQ ID NO: 20542 - DNA, 584 bp, Zea Mays
cggagggcaagggaaggcgcaggcgacgcggcgtgcgtacacgatgcgagtagcctctcctcttgtcgctagatcgttgtcgtctcgcttagcttgtggaatgaaggcgtcatcaaggtctgatgcgaacgcgactacggctttcggtggtgctcctctcctactccatggtgctcctctcctactccctcttctttctcgctggcatcttcgactcgctcctcttcatccaggtactgagtacagcggtgatccggaggagccgaacatgtcggcaccaagggagcggcttctagaggcgacatggtcagagatgccttacagcaaagtctagcgaggctacgccgccccaattccatcgttgcttgtttcgtcaaacatcatgatcccataccaggtgtattcaatccttttttgttttattaaatggtgaaatggcattatagtggttatgtcgtgtttgataatagcattcggacgaagcctttcaaaataatggcaaagtgtcgaaacccacttctcataatggtataattctaaatttctcttgttcacgttatttcattgcatattgtaagagtttg

SEQ ID NO: 20543 - DNA, 1143 bp, Zea Mays
cgaaaatatgggccacaacccatatacgcaggtcaccaaaccgcgacccaccgtcctgcgaagcccacatccacatcctcctctcctctggccatcttccccgctcttcattcgctagacgacacaacaccgcgttcagccgctctagaaccctagctccccgccccgcgagatggccactgccgacggcgagccccagcccgtggccaccgaccccgcccaggtccaggctccggcaccggcaccggcaccctacccttccccggccaagcgcaagcccgaggcggatgtggaagccgacgccaaccttgcgccccctaaagccgcgcgtcccgacgtcgacgaggaggccgccgctgtggccgaggctgccagggccagtgctcgcgcggctgacaagggtaagggcaagatggtagtcgaggaggaggaggaggaggaggaggaggaggaagacgacagcgaggagagcagcgacgacgacgagggcggcggcggcggcagcagcgatgacgacgagctcgttgaagacccgatggccgaggtagacctcagcaacatcctcccctcgcggacccgccgccgcgcccccccgcagcccggggcgtacctcgtcactccggaggaggctgccgcggaggacgacgacgacgacgctgacgtggttcctgaggaggatgagggagcggagggagaggagagcgattaaggctgcctcggcacggactcactaggaatgatgaatggtggcttttggtgctgggtatctgtaccatcctgtgcctggggaccctagtagatgaacgtgctttctgttaggttttgttcgtggatagcctaatcttcattcggcaatcattatgagttgtgcctgtcaccatgatttatatggcatcagtagtagggtgttacttgagggacacacgtttagttctaactttgtagtaaggcttagtatctggtgaacgatcatgattgaacagttaacggttcgcctctgcggctccagacttgcagcttccagcagctattgaccttatgcttttgatggcgacgcactacgtttcccgtttcccttcgtgcttctgttatccggcagctgttgtacaactagctcttggcaaggtcttgcagatggaattg

SEQ ID NO: 20544 - DNA, 472 bp, Zea Mays
gttctgtgcagattgatacgcattacatatgttgtgtttttgcacctatgccttgtatttctggaatgatgaatggtggcttttggtgctgggtatctgtaccatcctgtgcctggggaccctagtagatgaacgtgctttctgttaggttttgttcgtggatagcctaatcttcattcggcaatcattatgagttgtgcctgtcaccatgatttatatggcatcagtagtagggtgttacttgagggacacacgtttagttctaactttgtagtaaggcttagtatctggtgaacgatcatgattgaacagttaacggttcgcctctgcggctccagacttgcagcttccagcagctattgaccttatgcttttgatggcgacgcactacgtttcccgtttcccttcgtgcttctgttatccggcagctgttgtacaactagctcttggcaaggtcttgcagatggaattg

SEQ ID NO: 20545 - DNA, 468 bp, Zea Mays
cgggactgaaacgtgatgtgctcaataaatctccgcattgttgtagagctcggagccacgaatgatgaatggtggcttttggtgctgggtatctgtaccatcctgtgcctggggaccctagtagatgaacgtgctttctgttaggttttgttcgtggatagcctaatcttcattcggcaatcattatgagttgtgcctgtcaccatgatttatatggcatcagtagtagggtgttacttgagggacacacgtttagttctaactttgtagtaaggcttagtatctggtgaacgatcatgattgaacagttaacggttcgcctctgcggctccagacttgcagcttccagcagctattgaccttatgcttttgatggcgacgcactacgtttcccgtttcccttcgtgcttctgttatccggcagctgttgtacaactagctcttggcaaggtcttgcagatggaattg

SEQ ID NO: 20546 - DNA, 2452 bp, Zea Mays
cttatccggaagcggtggatagggacacatgcgcccgcccgggtcgcatcccgacccgcgccaccggtccgaccagaccgccgaccggctcagccggttcaccacttctcacttcacctgcctgccgcttcctgctttcccgttcctgaaagagagagaagcatatcctcactctagtctctctcgccccatccccttccccgtccctcctccagctccctctcctccggctgctgcccctccaccgtccgcccctcctccccgctgccggccacttccggacttccccgccgcgttacctcctcctcctggcgcttcccgcttggcggttgcctgggatttacccccgctctgttcccctttcggggaacgccttcagaggcaggacgggtacttggtccgggaggcgcggcgacggcgacagcggcgagtgattttcggtcgccagagggagagttttttttaacggggttttggtgggaaggaaggaggcggccgcgagtaggcgagacgttcatgggttagatctggcggtccggcggcgcggatctgagcgaggtttcggtggagagatcgggtggtggtcactatcttcgcctcatttcgagtagatggagcgtctcatggccaaatcgggcatgctcctgagggagttagatttgcaggaaaatgatgtggaggaccgtgggcccagatggctttccttccctgattcctgcacttcgctggtctccttgaatttcgcttgcatcaaaggggaggtgaattctggtgcgttggagagacttgttgctaggtctccaaatctacgcagtttgaggttgaatcgttctgtttcagtagacacactctcaaagatactattgcgagccccaaatttggaagacttggggacaggtaatctgacagatgagttccaagctgagtcctattccaggcttactagtgctctggagaaatgcaaaaagctgagaagtctgtctggattttgggatgcttctcctatttgtgttccgtatatctatcccctctgtcatcaactaacaggcctaaacttgagttatactcccacactggattattctgatctagctaaaatggtcagccgctgtgtgaaactccagcgtctctgggtgagttcccttctctttgtgttggcttgatatttctgtacgttgagagaaccacataatgaatttgatcctccacaggtactggattgcatttcagataagggtttgcaagtggtggcctccagttgcaaggacctacaagaactcagggtgtttccatcagaattttatgttcctggtgcttctgcagtgacagaggagggacttgttgcaatatcgtcaggctgcccaaaactgacctctttgctgtatttctgtcaccagatgaccaatgaagcgctaattactgtagctaataactgcccaaatttcatcagatttagactctgtatccttgagccaaagaagccagatgccatgacaggccagccgttagatgaaggttttggtgcgattgtccgtgaatgcaaagggctaagacgtctgtcaatatcaggtcttctcacagacaaggttttcatgtatattggaaaacatgcaaaatacctcgaaatgctttctatagcatttgctggagatagtgataaggggatgatggacgtgatgaacgggtgcaagaatctgaggaagcttgagatcagagacagtccatttggcgatgttgcactcttgggaaatgttgccaagtatgagacaatgcgatccctttggatgtcttcatgcaatgtcacattaaaggggtgccaggtccttgcatcgaagatgccgatgctcaatgtggagatcatgaatgaactagatggaagtagtgaaatggagaaccatggagacctctctaaagtggacaagttatatgtttaccgcacaactgctggagcgagggatgatgcaccaaattttgttaagatcctacagagctagccgcgactacccttatatcttcccaccttgagagggtcaggaaaagccacactggcctgcgcccttatcgtggagcaacacgaccgggaatccatcatcatcctctgtaccaccgcccccctccctttcagtgtctggtcatatggccacccaggcccccctttattacctgtgaattctcccactcgagaggaggggaccgaacggataactttttctagccatgtaacatctctagtgtacttgtctccatttgcttttgacattggcacggtggattgtgttgctggcgtcgctgttgtagtgttttgtttcgcaaacctgagaattatcgggacattccggggacgacgctctgtttcttgctcctgtgaatgcatggactgcatgtaatatttgatggccttgcaggatttatcgtacacacttttcgcccttgcatatttctcgtctcagcc

SEQ ID NO: 20547 - DNA, 3000 bp, Zea Mays
agccggttcaccacttctcacttcacctgcctgccgcttcctgctttcccgttcctgaaagagagagaagcatatcctcactctagtctctctcgccccatccccttccccgtccctcctccagctccctctcctccggctgctgcccctccaccgtccgcccctcctccccgctgccggccacttccggacttccccgccgcgttacctcctcctcctggcgcttcccgcttggcggttgcctgggatttacccccgctctgttcccctttcggggaacgccttcagaggcaggacgggtacttggtccgggaggcgcggcgacggcgacagcggcgagtgattttcggtcgccagagggagagttttttttaacggggttttggtgggaaggaaggaggcggccgcgagtaggcgagacgttcatgggttagatctggcggtccggcggcgcggatctgagcgaggtttcggtggagagatcgggtggtggtcactatcttcgcctcatttcgagtagatggagcgtctcatggccaaatcgggcatgtatggcggattctgctactgtctgaagcagcgttgcctgcagatctgaaagtcacttggtctccttgcccagttgaccttactgaatgacattgctttccgcggtttgactgtcattacatccttttcggtgtctgatcaaaaatttttagcacgagatgacgtgcttctagttgttgttgatatcttgtcctgagttgagtaaacctgaagctggaaaggagcggatcacattcgtgctcttgctcttgttgacttctaggtctatcttagatacctagaggctggaaggggtcagatccagttcctgtggtcctagtaacaaggtcctcttgggggaaggcgccatgacctacttccccgaggaggtggtagagcacatcttcagcttcttgccatcgcacagcgaccggaacacggtctcccttgtgtgcaaggtgtggtatgaggtcgagaggctgagccgacgagcggtgttcgtagggaactgctacgctgtgcgccctgagcgtgtggtgctgcggttccccaatataaaggccctcacggtgaaggggaagcctcactttgcagacttcaaccttgtgccgcctgattggggtggctacgcagggccatggattgatgcagcagcaaggagctgtgttggtctcgaggagttgcgcatgaagcggatggttgtgtttgatgagaaccttgagctgctagctcggtcattcctgagattcaaagtccttgtccttatcagctgcgaggggtttagcaccgatggtctagctgctattgcgagtcactgcaagctcctgagggagttagatttgcaggaaaatgatgtggaggaccgtgggcccagatggctttccttccctgattcctgcacttcgctggtctccttgaatttcgcttgcatcaaaggggagacacactctcaaagatactattgcgagccccaaatttggaagacttggggacaggtaatctgacagatgagttccaagctgagtcctattccaggcttactagtgctctggagaaatgcaaaaagctgagaagtctgtctggattttgggatgcttctcctatttgtgttccgtatatctatcccctctgtcatcaactaacaggcctaaacttgagttatactcccacactggattattctgatctagctaaaatggtcagccgctgtgtgaaactccagcgtctctgggtactggattgcatttcagataagggtttgcaagtggtggcctccagttgcaaggacctacaagaactcagggtgtttccatcagaattttatgttcctggtgcttctgcagtgacagaggagggacttgttgcaatatcgtcaggctgcccaaaactgacctctttgctgtatttctgtcaccagatgaccaatgaagcgctaattactgtagctaataactgcccaaatttcatcagatttagactctgtatccttgagccaaagaagccagatgccatgacaggccagccgttagatgaaggttttggtgcgattgtccgtgaatgcaaagggctaagacgtctgtcaatatcaggtcttctcacagacaaggttttcatgtatattggaaaacatgcaaaatacctcgaaatgctttctatagcatttgctggagatagtgataaggggatgatggacgtgatgaacgggtgcaagaatctgaggaagcttgagatcagagacagtccatttggcgatgttgcactcttgggaaatgttgccaagtatgagacaatgcgatccctttggatgtcttcatgcaatgtcacattaaaggggtgccaggtccttgcatcgaagatgccgatgctcaatgtggagatcatgaatgaactagatggaagtagtgaaatggagaaccatggagacctctctaaagtggacaagttatatgtttaccgcacaactgctggagcgagggatgatgcaccaaattttgttaagatcctacagagctagccgcgactacccttatatcttcccaccttgagagggtcaggaaaagccacactggcctgcgcccttatcgtggagcaacacgaccgggaatccatcatcatcctctgtaccaccgcccccctccctttcagtgtctggtcatatggccacccaggcccccctttattacctgtgaattctcccactcgagaggaggggaccgaacggataactttttctagccatgtaacatctctagtgtacttgtctccatttgcttttgacattggcacggtggattgtgttgctggcgtcgctgttgtagtgttttgtttcgcaaacctgagaattatcgggacattccggggacgacgctctgtttcttgctcctgtgaatgcatggactgcatgtaatatttgatggccttgcaggatttatcgtacacacttttcgcccttgcatatttctcgtctcagcc

SEQ ID NO: 20548 - DNA, 3020 bp, Zea Mays
aagcatatcctcactctagtctctctcgccccatccccttccccgtccctcctccagctccctctcctccggctgctgcccctccaccgtccgcccctcctccccgctgccggccacttccggacttccccgccgcgttacctcctcctcctggcgcttcccgcttggcggttgcctgggatttacccccgctctgttcccctttcggggaacgccttcagaggcaggacgggtacttggtccgggaggcgcggcgacggcgacagcggcgagtgattttcggtcgccagagggagagttttttttaacggggttttggtgggaaggaaggaggcggccgcgagtaggcgagacgttcatgggttagatctggcggtccggcggcgcggatctgagcgaggtttcggtggagagatcgggtggtggtcactatcttcgcctcatttcgagtagatggagcgtctcatggccaaatcgggcatgtatggcggattctgctactgtctgaagcagcgttgcctgcagatctgaaagtcacttggtctccttgcccagttgaccttactgaatgacattgctttccgcggtttgactgtcattacatccttttcggtgtctgatcaaaaatttttagcacgagatgacgtgcttctagttgttgttgatatcttgtcctgagttgagtaaacctgaagctggaaaggagcggatcacattcgtgctcttgctcttgttgacttctaggtctatcttagatacctagaggctggaaggggtcagatccagttcctgtggtcctagtaacaaggtcctcttgggggaaggcgccatgacctacttccccgaggaggtggtagagcacatcttcagcttcttgccatcgcacagcgaccggaacacggtctcccttgtgtgcaaggtgtggtatgaggtcgagaggctgagccgacgagcggtgttcgtagggaactgctacgctgtgcgccctgagcgtgtggtgctgcggttccccaatataaaggccctcacggtgaaggggaagcctcactttgcagacttcaaccttgtgccgcctgattggggtggctacgcagggccatggattgatgcagcagcaaggagctgtgttggtctcgaggagttgcgcatgaagcggatggttgtgtttgatgagaaccttgagctgctagctcggtcattcctgagattcaaagtccttgtccttatcagctgcgaggggtttagcaccgatggtctagctgctattgcgagtcactgcaagctcctgagggagttagatttgcaggaaaatgatgtggaggaccgtgggcccagatggctttccttccctgattcctgcacttcgctggtctccttgaatttcgcttgcatcaaaggggaggtgaattctgtagacacactctcaaagatactattgcgagccccaaatttggaagacttggggacaggtaatctgacagatgagttccaagctgagtcctattccaggcttactagtgctctggagaaatgcaaaaagctgagaagtctgtctggattttgggatgcttctcctatttgtgttccgtatatctatcccctctgtcatcaactaacaggcctaaacttgagttatactcccacactggattattctgatctagctaaaatggtcagccgctgtgtgaaactccagcgtctctgggtactggattgcatttcagataagggtttgcaagtggtggcctccagttgcaaggacctacaagaactcagggtgtttccatcagaattttatgttcctggtgcttctgcagtgacagaggagggacttgttgcaatatcgtcaggctgcccaaaactgacctctttgctgtatttctgtcaccagatgaccaatgaagcgctaattactgtagctaataactgcccaaatttcatcagatttagactctgtatccttgagccaaagaagccagatgccatgacaggccagccgttagatgaaggttttggtgcgattgtccgtgaatgcaaagggctaagacgtctgtcaatatcaggtcttctcacagacaaggttttcatgtatattggaaaacatgcaaaatacctcgaaatgctttctatagcatttgctggagatagtgataaggggatgatggacgtgatgaacgggtgcaagaatctgaggaagcttgagatcagagacagtccatttggcgatgttgcactcttgggaaatgttgccaagtatgagacaatgcgatccctttggatgtcttcatgcaatgtcacattaaaggggtgccaggtccttgcatcgaagatgccgatgctcaatgtggagatcatgaatgaactagatggaagtagtgaaatggagaaccatggagacctctctaaagtggacaagttatatgtttaccgcacaactgctggagcgagggatgatgcaccaaattttgttaagatcctacagagctagccgcgactacccttatatcttcccaccttgagagatggtcggtggaatccggcatgcctggggccagggcaacagtggtaagttcttgaatcgtctccccttttgcagggtcaggaaaagccacactggcctgcgcccttatcgtggagcaacacgaccgggaatccatcatcatcctctgtaccaccgcccccctccctttcagtgtctggtcatatggccacccaggcccccctttattacctgtgaattctcccactcgagaggaggggaccgaacggataactttttctagccatgtaacatctctagtgtacttgtctccatttgcttttgacattggcacggtggattgtgttgctggcgtcgctgttgtagtgttttgtttcgcaaacctgagaattatcgggacattccggggacgacgctctgtttcttgctcctgtgaatgcatggactgcatgtaatatttgatggccttgcaggatttatcgtacacacttttcgcccttgcatatttctcgtctcagcc

SEQ ID NO: 20549 - DNA, 622 bp, Zea Mays
cggataccggcgttatggataggcacgagcggtgccgacgtaccatgtcgtgacgaggaaaattctagcgatccgcgcgcggcaggcctgaagagtcacgctagtcccaaagaaacaagcgagtacccagagcagccgaccctggctagctctagcttgtgtagttgagttcttgtatttgcttgaatctgcaaaaaaaaactagagacaaaaggaggacgggaaacggagagaaggatcatggactacagcatgcagggatccaaggactcgtactcgccgcaagttcacaaccacttgtacccggactctcagccagggctgtatcctcctccgccgcaggggggctacggctacggctaccagtaccagggctaccttggcgaatcggcgaaccctccttattactactacactggcagctggcccgagcagcccccagctccgtccgacggcgccccctttcgctaccgctacctgcaggaccaggacgatgccgactgcatcaccttcctcagaggatggtttcccgtgtgttggagtgctgaatgaaaacttgttcgagtttttgcctgagtcagtcagtcggtcggtcgtctggcaaataaaacaagaaactact

SEQ ID NO: 20550 - DNA, 712 bp, Zea Mays
gcaggcctgaagagtcacgctagtcccaaagaaacaagcgagtacccagagcagccgaccctggctagctctagcttgtgtagttgagttcttgtatttgcttgaatctgcaaaaaaaaactagagacaaaaggaggacgggaaacggagagaaggatcatggactacagcatgcagggatccaaggactcgtactcgccgcaaggggggctacggctacggctaccagtaccagggctaccttggcgaatcggcgaaccctccttattactactacactggcagctggcccgagcagcccccagctccgtccgacggcgccccctttcgctaccgctacctgcaggaccaggacgatgccgactgcatcaccttcctcagaggatgtcttgctggtctgtgctgctgctgcttactggagcgatgctgcatctaaggaggatggcgtgcagtgctgctgcctggagcacgcatgtatgcagcagtgtggtggtgacataataataataataataagctgctgcggcagcagagatgacggttcctgcgttgacggcgccatccatgtaaaaccaaggagcagcttgccatcatcatgtctctcgtcgtccttggtcttcaactcctcatatctttgagagagagagagagagagcgcaaccggacaccggagcaacatggtttttctctgctcggacagattgcgacgcga

SEQ ID NO: 20551 - DNA, 1017 bp, Zea Mays
ctatctttgagtaggcggtccacaggcaaatcccctatctccaacctgtgaacggtgaaccccgatcgaatgacgccgacggcgaacctcctcctcccggctcccccattcgtccccatctctgatgtgcgccgcctccagctccccccgcgcgtccgccaccagcctcgtccctgctggaagggcgtggagtggggctccatacagacccggatggtctcttctttcgttggtagccaggaatttggggaagactttgcgtgctttccaaccaaccattagagagctacaggatgtatcaagggagttcaggagcactcttgaacgagaaatcggaattgatgaggtttcccaatcaacgaactataggcccacaaccatgaataacaaccaacaacctgctgccgacccaaatgtcaagcctgaaccagcaccttatactagcgaggaactaatgaaagtaactgaagaacaaattgctgcatcagctgctgctgcttggaatccacaacagcctgccacgtcgcaacagcaagaagaagcgcccactactccaagaagtgaggacgctcctacatcaggaggaagcgatggtcctgctgctccagctcgtgctgtgagtgactctgatccaaaccaagtgaataagtcacagaaggcggaaggagagagatgactccgcttgacagtttgacactggacggaaagagcacagtgcataggtcaggacgagcagtcatgttttttttttttcattttgtagacgatgaaatagttgtatgagagcgttttcgatggttaggcttgttttgtagcagcatgggccaggtagatgaaaaaaaggctatgcgtatattatttcccacgttgtgtggccgcaattgtttttcaatcgtaagagtaacttcaagacactctctgtattctttttaattgctaggaatagatttttttgtaaaaaattttcttcaaaagcttatttaaatgattatctgaatatatctatttttttatttc

SEQ ID NO: 20552 - DNA, 656 bp, Zea Mays
ctccgagtaacaaaccgagcacacggtccgcctgaaatcccaccaacgtcaccctcaatcgaacttcttcgtggagtataagagagacatcggggacccttcgaccctcatccatctcgcccaagtgccacggaaccgtgagtgggggataggatttcctgcggtggtgaccacggaccgccgacgtgattctctgccatcgatgggacttggaacgcaggattgagccatgtgttcgccgaggcaccccgtgtgtgttggtgggcttctcgggcatggacatcaaccaggatcgagggaattcctcaccggcgttcgagactcaccgtgggtaggagtccctgggtcgccatacctggtcaagaacaagtaccgccagatgaggagcagcaaggatgtcgcgatgagttcatgagaggtctaggtcgtcgtctcctagtcaacaatggatgtggtggatcgttgtcttcttatgatgtaataacttagctattttctcttctaaagacaaaagaggatttcacaccttggatcatgtacctaaagtgacccttaggaatagtacccctaatcctaggaataaaaaattatcatttttgtatgtatctatgcgcctgaatgcctgttcttatgaaccttgtttgatttggttcttt

SEQ ID NO: 20553 - DNA, 1297 bp, Zea Mays
ccggtgacgggggatacggcggcatcgtccccctcggcccctcctccatccccggcgcggcggcgccagcagccggcctgcaggttttgcaggtttcacacttcttatcatggatgataagaacaaagtcaagaaggaaatagatggcccccttggacccccacctcgcaaggggggacttaaattcgcaccaaaagtacctcagaagaaacctgccaaggttgtcccaaagaaggaaccggttgaagagagaaaggaggatgctttggataaggagttattgatgaaacttaagatgtcgcaaaacaagtatccctcaagaattaagtccgacgaaaagccaagaagtggtacacaggttgcatttggacaaggaaactcttattatgcaagaaattttcccatgcccaaaaaggattcttcagcaggtggagcttcgaagttaccaaaagaatatgcagaaccatgggactatagccatgattatcctgttactctcccactaaggaagccctactctggaaatcctgaaattctggatgaggaagaatttggagaatcttctgccagcaggacccaagatgatgaattatctgcagcagagcagcttggattaatggatatgtcgtcggaatcacagttcctcttcttccagttgccatcctctcttcctttaccgaggcagccacaatcaggtgctgaccctaacgaagtccgcgatgagaaacgtgaggacatgaggccatcatcgcacaatggctcgaaactcaaagaggttcctgaaggctatatggggaaaatgctcgtatataagagtggtaaagtgaagatgaagataggagacactctctttgatgtttcatttggctcgaattgcatgttttcccaggaggttgcagcaatcaacatcagagaaaaacattgctgtacggtgggagagatcagcaagcgtgctatcatcaccccagatattaactacatgttgggttctgttgacaagatggaagaatagtccattggtttctttcgcgcaaaccatatagaccatattatgccattacaagatagttttgctttcttatagagaacgacctgtgataccctctcagacttcttcaagaaaagatgcctcaaacaaaggaatgtgcctaatttgacactgccgttagtttccacagcaaacgcataacacaactagactagacaggtctgcggacctttctcgatgccaacgtcggtagttcggatatgcctgctaattggttcagtttgcttcactgaaggctgcaggtctgat

SEQ ID NO: 20554 - DNA, 1480 bp, Zea Mays
acaacacaaccaagagccaacagagcaacgcccaggcacacacgacacgaaccaggcaaccagctgccgagggaggaaccctagcggaacactgtgcaggtgacggcggcgcgctaccggtgacgggggatacggcggcatcgtccccctcggcccctcctccatccccggcgcggcggcgccagcagccggcctgcaggttttgcaggtttcacacttcttatcatggatgataagaacaaagtcaagaaggaaatagatggcccccttggacccccacctcgcaaggggggacttaaattcgcaccaaaagtacctcagaagaaacctgccaaggttgtcccaaagaaggaaccggttgaagagagaaaggaggatgctttggataaggagttattgatgaaacttaagatgtcgcaaaacaagtatccctcaagaattaagtccgacgaaaagcgtaagaatcctggtttttgttcaccacatgctttatagtctaaatcttatcactgcctgtgaaaattcaagaagtggtacacaggttgcatttggacaaggaaactcttattatgcaagaaattttcccatgcccaaaaaggattcttcagcaggtggagcttcgaagttaccaaaagaatatgcagaaccatgggactatagccatgattatcctgttactctcccactaaggaagccctactctggaaatcctgaaattctggatgaggaagaatttggagaatcttctgccagcaggacccaagatgatgaattatctgcagcagagcagcttggattaatggatatgtcgtcggaatcacagttcctcttcttccagttgccatcctctcttcctttaccgaggcagccacaatcaggtgctgaccctaacgaagtccgcgatgagaaacgtgaggacatgaggccatcatcgcacaatggctcgaaactcaaagaggttcctgaaggctatatggggaaaatgctcgtatataagagtggtaaagtgaagatgaagataggagacactctctttgatgtttcatttggctcgaattgcatgttttcccaggaggttgcagcaatcaacatcagagaaaaacattgctgtacggtgggagagatcagcaagcgtgctatcatcaccccagatattaactacatgttgggttctgttgacaagatggaagaatagtccattggtttctttcgcgcaaaccatatagaccatattatgccattacaagatagttttgctttcttatagagaacgacctgtgataccctctcagacttcttcaagaaaagatgcctcaaacaaaggaatgtgcctaatttgacactgccgttagtttccacagcaaacgcataacacaactagactagacaggtctgcggacctttctcgatgccaacgtcggtagttcggatatgcctgctaattggttcagtttgcttcactgaaggctgcaggtctgat

SEQ ID NO: 20555 - DNA, 2332 bp, Zea Mays
acaacacaaccaagagccaacagagcaacgcccaggcacacacgacacgaaccaggcaaccagctgccgagggaggaaccctagcggaacactgtgcaggtgacggcggcgcgctaccggtgacgggggatacggcggcatcgtccccctcggcccctcctccatccccggcgcggcggcgccagcagccggcctgcaggttttgcaggtttcacacttcttatcatggatgataagaacaaagtcaagaaggaaatagatggcccccttggacccccacctcgcaaggggggacttaaattcgcaccaaaagtacctcagaagaaacctgccaaggttgtcccaaagaaggaaccggttgaagagagaaaggaggatgctttggataaggagttattgatgaaacttaagatgtcgcaaaacaagtatccctcaagaattaagtccgacgaaaagcgtaagaatcctggtttttgttcaccacatgctttatagtctaaatcttatcactgcctgtgaaaattgtaagttcctacttcctatcattgagcatgctcaaggcttgtcatcaattgttattgattagtcacatagcgtgaaagggcctctaattgagttggttaggtgggctacggtgctgcggtatatgggtggggcaggggtttggaggttttctcgacctgcgtgaggtcttcttaatataatgttatggaggcggtcttacctccacaggtcgagtttttttattagtcacatagcattttctcgacagttttacagttttaacttcaataaatatttctaagtatgaatctttgaggctgtagattgaacactcttgattcattccttaccacttgataaaaactggcaatataacaattgcatatgtcgcacacttataggagcaagagcaatcttatttactatgttatatatttatcttccgtacttcacttgaaaatcatttttcaatcctaaaataatatttgttgcaacattgtgagtagttttgagctgataaaatacaagtatgtgatttggtttgcatctttgtatgatgtgctctgagttggctaattataattgtatgctttgggtgggggattcatctatatttaatacagggacatacttctgcattaggttgtcttaaaaatgcattacgtagagcatgtaccaaaatttttattagctataattgatgtttagtacatatagtataaaaggcaaggtttttgttacaaagaaaatactctctgtttgtgtgtgtgtttgcttaagtgttatggattattcattttttgtaaatttagtgatatttttatttgacctgctgcacacctagctaatagttcatttctctgttggcatagcaagaagtggtacacaggttgcatttggacaaggaaactcttattatgcaagaaattttcccatgcccaaaaaggattcttcagcaggtggagcttcgaagttaccaaaagaatatgcagaaccatgggactatagccatgattatcctgttactctcccactaaggaagccctactctggaaatcctgaaattctggatgaggaagaatttggagaatcttctgccagcaggacccaagatgatgaattatctgcagcagagcagcttggattaatggatatgtcgtcggaatcacagttcctcttcttccagttgccatcctctcttcctttaccgaggcagccacaatcaggtgctgaccctaacgaagtccgcgatgagaaacgtgaggacatgaggccatcatcgcacaatggctcgaaactcaaagaggttcctgaaggctatatggggaaaatgctcgtatataagagtggtaaagtgaagatgaagataggagacactctctttgatgtttcatttggctcgaattgcatgttttcccaggaggttgcagcaatcaacatcagagaaaaacattgctgtacggtgggagagatcagcaagcgtgctatcatcaccccagatattaactacatgttgggttctgttgacaagatggaagaatagtccattggtttctttcgcgcaaaccatatagaccatattatgccattacaagatagttttgctttcttatagagaacgacctgtgataccctctcagacttcttcaagaaaagatgcctcaaacaaaggaatgtgcctaatttgacactgccgttagtttccacagcaaacgcataacacaactagactagacaggtctgcggacctttctcgatgccaacgtcggtagttcggatatgcctgctaattggttcagtttgcttcactgaaggctgcaggtctgat

SEQ ID NO: 20556 - DNA, 1362 bp, Zea Mays
cacgtatggctgtttgccttgttgaaagcctgaatctgaagccatgtccatgggcgtgtgtgtgtatatatataggatcaagactacccagccaggttctacagaccctcaaaaccttaatcgttagatcatcgccgttctcatgaaggttttgcaggtttcacacttcttatcatggatgataagaacaaagtcaagaaggaaatagatggcccccttggacccccacctcgcaaggggggacttaaattcgcaccaaaagtacctcagaagaaacctgccaaggttgtcccaaagaaggaaccggttgaagagagaaaggaggatgctttggataaggagttattgatgaaacttaagatgtcgcaaaacaagtatccctcaagaattaagtccgacgaaaagccaagaagtggtacacaggttgcatttggacaaggaaactcttattatgcaagaaattttcccatgcccaaaaaggattcttcagcaggtggagcttcgaagttaccaaaagaatatgcagaaccatgggactatagccatgattatcctgttactctcccactaaggaagccctactctggaaatcctgaaattctggatgaggaagaatttggagaatcttctgccagcaggacccaagatgatgaattatctgcagcagagcagcttggattaatggatatgtcgtcggaatcacagttcctcttcttccagttgccatcctctcttcctttaccgaggcagccacaatcaggtgctgaccctaacgaagtccgcgatgagaaacgtgaggacatgaggccatcatcgcacaatggctcgaaactcaaagaggttcctgaaggctatatggggaaaatgctcgtatataagagtggtaaagtgaagatgaagataggagacactctctttgatgtttcatttggctcgaattgcatgttttcccaggaggttgcagcaatcaacatcagagaaaaacattgctgtacggtgggagagatcagcaagcgtgctatcatcaccccagatattaactacatgttgggttctgttgacaagatggaagaatagtccattggtttctttcgcgcaaaccatatagaccatattatgccattacaagatagttttgctttcttatagagaacgacctgtgataccctctcagacttcttcaagaaaagatgcctcaaacaaaggaatgtgcctaatttgacactgccgttagtttccacagcaaacgcataacacaactagactagacaggtctgcggacctttctcgatgccaacgtcggtagttcggatatgcctgctaattggttcagtttgcttcactgaaggctgcaggtctgat

SEQ ID NO: 20557 - DNA, 2180 bp, Zea Mays
cagaccctcaaaaccttaatcgttagatcatcgccgttctcatgaaggttttgcaggtttcacacttcttatcatggatgataagaacaaagtcaagaaggaaatagatggcccccttggacccccacctcgcaaggggggacttaaattcgcaccaaaagtacctcagaagaaacctgccaaggttgtcccaaagaaggaaccggttgaagagagaaaggaggatgctttggataaggagttattgatgaaacttaagatgtcgcaaaacaagtatccctcaagaattaagtccgacgaaaagcgtaagaatcctggtttttgttcaccacatgctttatagtctaaatcttatcactgcctgtgaaaattgtaagttcctacttcctatcattgagcatgctcaaggcttgtcatcaattgttattgattagtcacatagcgtgaaagggcctctaattgagttggttaggtgggctacggtgctgcggtatatgggtggggcaggggtttggaggttttctcgacctgcgtgaggtcttcttaatataatgttatggaggcggtcttacctccacaggtcgagtttttttattagtcacatagcattttctcgacagttttacagttttaacttcaataaatatttctaagtatgaatctttgaggctgtagattgaacactcttgattcattccttaccacttgataaaaactggcaatataacaattgcatatgtcgcacacttataggagcaagagcaatcttatttactatgttatatatttatcttccgtacttcacttgaaaatcatttttcaatcctaaaataatatttgttgcaacattgtgagtagttttgagctgataaaatacaagtatgtgatttggtttgcatctttgtatgatgtgctctgagttggctaattataattgtatgctttgggtgggggattcatctatatttaatacagggacatacttctgcattaggttgtcttaaaaatgcattacgtagagcatgtaccaaaatttttattagctataattgatgtttagtacatatagtataaaaggcaaggtttttgttacaaagaaaatactctctgtttgtgtgtgtgtttgcttaagtgttatggattattcattttttgtaaatttagtgatatttttatttgacctgctgcacacctagctaatagttcatttctctgttggcatagcaagaagtggtacacaggttgcatttggacaaggaaactcttattatgcaagaaattttcccatgcccaaaaaggattcttcagcaggtggagcttcgaagttaccaaaagaatatgcagaaccatgggactatagccatgattatcctgttactctcccactaaggaagccctactctggaaatcctgaaattctggatgaggaagaatttggagaatcttctgccagcaggacccaagatgatgaattatctgcagcagagcagcttggattaatggatatgtcgtcggaatcacagttcctcttcttccagttgccatcctctcttcctttaccgaggcagccacaatcaggtgctgaccctaacgaagtccgcgatgagaaacgtgaggacatgaggccatcatcgcacaatggctcgaaactcaaagaggttcctgaaggctatatggggaaaatgctcgtatataagagtggtaaagtgaagatgaagataggagacactctctttgatgtttcatttggctcgaattgcatgttttcccaggaggttgcagcaatcaacatcagagaaaaacattgctgtacggtgggagagatcagcaagcgtgctatcatcaccccagatattaactacatgttgggttctgttgacaagatggaagaatagtccattggtttctttcgcgcaaaccatatagaccatattatgccattacaagatagttttgctttcttatagagaacgacctgtgataccctctcagacttcttcaagaaaagatgcctcaaacaaaggaatgtgcctaatttgacactgccgttagtttccacagcaaacgcataacacaactagactagacaggtctgcggacctttctcgatgccaacgtcggtagttcggatatgcctgctaattggttcagtttgcttcactgaaggctgcaggtctgat

SEQ ID NO: 20558 - DNA, 1287 bp, Zea Mays
gtttggcaaggttcagtgtccttgggcagggcatgcaaacctgcgtggagctgaagacaggccacgtatgattggtccatgcgttgctggcacccttggagtctctcttcctcatgctgtggttgagctcggtgacacctgctccttattcaatgatataaaacttgattcagtgaggatgctccctgtccttaagtctggtccgtgtttatcaccagagtgacacagctcttgagttcaagtcgatatacatcctctccccagccaatagctcggtctgcccttgtgcttagcgctccaacactcagtctggtgaccacgctcacccaactgctcacctcaccgtggccgagacgcttggagcaattgcatccccgggtggtcagaacagtgccacgctgccgcagaacagagtcgtggacagctccaccgctggctttccaatccatgttgatctcgaatgatcttgtgcgagcactgaaggtgtgaacacctagaagaagtggtgtttgaaggagtctactccagtgcctgctcatcaagtggatggagctatctaactaaaggttgggtagaaggatctagaacctcttctctgcaacaaaggcaagccccggtgcatttgccccttccttgtatttttaaaaagacttttatacacttaagtctagtgaaatgggcattaagtttataggaattgcttagaaactatttgatgcattggctaccttgatatccatacctttatagatacttctgatgaagtatcaaaatatgatttacaaaaatgcttagccctgcttagatcttgtggatagaggttgtcttttgcattaatgcctagctcaggggttatcttgaggaaggatgacttctacctgcaagaatattttcattgggagcatggtgggatcttactgcaaagttccctataatgctcttttcatccttaggaacacaaaacaatcctaagggtggaagtacttaacttgagacttgggctaggaacaggtgatgctccacctaggttaattaaggattggatgtgtatgtaggcctgtatgatcaaggactatcttaactggccacatgccctggatatgggacagagtaagcttgaacctggctattccatacgtgaaaagacaaccgcgcactaggcgtgggagatggtgggagtagcgtgtaccctctggctagaggctggacggaggagtattgtgctctcgggtagcgcagaccagttcatgttgtggaggatctgtgggaatgttgacatatgcaggg

SEQ ID NO: 20559 - DNA, 1429 bp, Zea Mays
gtttggcaaggttcagtgtccttgggcagggcatgcaaacctgcgtggagctgaagacaggccacgtatgattggtccatgcgttgctggcacccttggagtctctcttcctcatgctgtggttgagctcggtgacacctgctccttattcaatgatataaaacttgattcagtgaggatgctccctgtccttaagtctggtccgtgtttatcaccagagtgacacagctcttgagttcaagtcgatatacatcctctccccagccaatagctcggtctgcccttgtgcttagcgctccaacactcagtctggtgaccacgctcacccaactgctcacctcaccgtggccgagacgcttggagcaattgcatccccgggtggtcagaacagtgccacgctgccgcagaacagagtcgtggacagctccaccgctggctttccaatccatgttgatctcgaatgatcttgtgcgagcactgaaggtgtggtaggtcgtcgacgtcgtggccagcgagggcgggtgcttggctcgagcatgaaaacattggagcttgttaacatggacgtgttttgacggtgattatgatgcgcctgaggtcagcgccgctgtggctggttgggccggctgaaacacctagaagaagtggtgtttgaaggagtctactccagtgcctgctcatcaagtggatggagctatctaactaaaggttgggtagaaggatctagaacctcttctctgcaacaaaggcaagccccggtgcatttgccccttccttgtatttttaaaaagacttttatacacttaagtctagtgaaatgggcattaagtttataggaattgcttagaaactatttgatgcattggctaccttgatatccatacctttatagatacttctgatgaagtatcaaaatatgatttacaaaaatgcttagccctgcttagatcttgtggatagaggttgtcttttgcattaatgcctagctcaggggttatcttgaggaaggatgacttctacctgcaagaatattttcattgggagcatggtgggatcttactgcaaagttccctataatgctcttttcatccttaggaacacaaaacaatcctaagggtggaagtacttaacttgagacttgggctaggaacaggtgatgctccacctaggttaattaaggattggatgtgtatgtaggcctgtatgatcaaggactatcttaactggccacatgccctggatatgggacagagtaagcttgaacctggctattccatacgtgaaaagacaaccgcgcactaggcgtgggagatggtgggagtagcgtgtaccctctggctagaggctggacggaggagtattgtgctctcgggtagcgcagaccagttcatgttgtggaggatctgtgggaatgttgacatatgcaggg

SEQ ID NO: 20560 - DNA, 829 bp, Zea Mays
gttcagtgtccttgggcagggcatgcaaacctgcgtggagctgaagacaggccacgtatgattggtccatgcgttgctggcacccttggagtctctcttcctcatgctgtggttgagctcggtgacacctgctccttattcaatgatataaaacttgattcagtgaggatgctccctgtccttaagtctggtccgtgtttatcaccagagtgacacagctcttgagttcaagtcgatatacatcctctccccagccaatagctcggtctgcccttgtgcttagcgctccaacactcagtctggtgaccacgctcacccaactgctcacctcaccgtggccgagacgcttggagcaattgcatccccgggtggtcagaacagtgccacgctgccgcagaacagagtcgtggacagctccaccgctggctttccaatccatgttgatctcgaatgatcttgtgcgagcactgaaggtgtggtgatgaggagtattcaaggagttcctgaagctaggagggcgtttccagttctgggggaggattagttaggtttgggtataagctttggagggttcctaccttcttgctattgtaataagttatgcactttgagtatatcaggacttgtaataaatgtaactcttcctatgtaatgaccttcagttttagaaatgaaaataatattttgtaaagtctttcgctcttatctccgaagtgtgtgtatcgaatgtgattactgtaatatacatgaatgtgggagatccttaggatgatgagttcaggttgttgaactcgtgatagccttgttaagttacctggtacacatgcat

SEQ ID NO: 20561 - DNA, 2052 bp, Zea Mays
gcagggcatgcaaacctgcgtggagctgaagacaggccacgtatgattggtccatgcgttgctggcacccttggagtctctcttcctcatgctgtggttgagctcggtgacacctgctccttattcaatgatataaaacttgattcagtgaggatgctccctgtccttaagtctggtccgtgtttatcaccagagtgacacagctcttgagttcaagtcgatatacatcctctccccagccaatagctcggtctgcccttgtgcttagcgctccaacactcagtctggtgaccacgctcacccaactgctcacctcaccgtggccgagacgcttggagcaattgcatccccgggtggtcagaacagtgccacgctgccgcagaacagagtcgtggacagctccaccgctggctttccaatccatgttgatctcgaatgatcttgtgcgagcactgaaggtgtggtaggtcgtcgacgtcgtggccagcgagggcgggtgcttggctcgagcatgaaaacattggagcttgttaacatggacgtgttttgacggtgattatgatgcgcctgaggtcagcgccgctgtggctggttgggccggctgagtgagtttgggcctgatattgttctaagttttgtcttttctattagctgagagatttgaaatggtgccaaaatttgtagaaaattccaaaaatcatgggacaaaatttgttggatgtataaaatcaaaagctctctaggaaagttggtttctggatttttaggttggttaccaaatattaagggatttaaatgtgctcttggaaggattgtttggattttaaaaataaaattacagtgccaaaacttatgaaattttttgggtaacattttttggtcatttgagtttgtggtaaaggtttgaggctgttcagaatccatttgctctgaaaactttgtaagccccaaaataaaatggttaatccctaatcaagtgtgagttagtgctttggaaaggggataagtttatctaaggaagagatgcagtttcttaagaagttttaagcttttggatgagatataagttggattagttccctggtttacctaagcgaattcaaattggtcacttttattaagtgctaggttgtctagatgtgtatgcctatcatatacttatttaggagtgtttatattccccacctctccttgtgagagtttgcatttcatatcataacataagcatacatgtatttgtaattgacttgtagaacacctagaagaagtggtgtttgaaggagtctactccagtgcctgctcatcaagtggatggagctatctaactaaaggttgggtagaaggatctagaacctcttctctgcaacaaaggcaagccccggtgcatttgccccttccttgtatttttaaaaagacttttatacacttaagtctagtgaaatgggcattaagtttataggaattgcttagaaactatttgatgcattggctaccttgatatccatacctttatagatacttctgatgaagtatcaaaatatgatttacaaaaatgcttagccctgcttagatcttgtggatagaggttgtcttttgcattaatgcctagctcaggggttatcttgaggaaggatgacttctacctgcaagaatattttcattgggagcatggtgggatcttactgcaaagttccctataatgctcttttcatccttaggaacacaaaacaatcctaagggtggaagtacttaacttgagacttgggctaggaacaggtgatgctccacctaggttaattaaggattggatgtgtatgtaggcctgtatgatcaaggactatcttaactggccacatgccctggatatgggacagagtaagcttgaacctggctattccatacgtgaaaagacaaccgcgcactaggcgtgggagatggtgggagtagcgtgtaccctctggctagaggctggacggaggagtattgtgctctcgggtagcgcagaccagttcatgttgtggaggatctgtgggaatgttgacatatgcaggg

SEQ ID NO: 20562 - DNA, 2043 bp, Zea Mays
gcagggcatgcaaacctgcgtggagctgaagacaggccacgtatgattggtccatgcgttgctggcacccttggagtctctcttcctcatgctgtggttgagctcggtgacacctgctccttattcaatgatataaaacttgattcagtgaggatgctccctgtccttaagtctggtccgtgtttatcaccagagtgacacagctcttgagttcaagtcgatatacatcctctccccagccaatagctcggtctgcccttgtgcttagcgctccaacactcagtctggtgaccacgctcacccaactgctcacctcaccgtggccgagacgcttggagcaattgcatccccgggtggtcagaacagtgccacgctgccgcagaacagagtcgtggacagctccaccgctggctttccaatccatgttgatctcgaatgatcttgtgcgagcactgaaggtcgtcgacgtcgtggccagcgagggcgggtgcttggctcgagcatgaaaacattggagcttgttaacatggacgtgttttgacggtgattatgatgcgcctgaggtcagcgccgctgtggctggttgggccggctgagtgagtttgggcctgatattgttctaagttttgtcttttctattagctgagagatttgaaatggtgccaaaatttgtagaaaattccaaaaatcatgggacaaaatttgttggatgtataaaatcaaaagctctctaggaaagttggtttctggatttttaggttggttaccaaatattaagggatttaaatgtgctcttggaaggattgtttggattttaaaaataaaattacagtgccaaaacttatgaaattttttgggtaacattttttggtcatttgagtttgtggtaaaggtttgaggctgttcagaatccatttgctctgaaaactttgtaagccccaaaataaaatggttaatccctaatcaagtgtgagttagtgctttggaaaggggataagtttatctaaggaagagatgcagtttcttaagaagttttaagcttttggatgagatataagttggattagttccctggtttacctaagcgaattcaaattggtcacttttattaagtgctaggttgtctagatgtgtatgcctatcatatacttatttaggagtgtttatattccccacctctccttgtgagagtttgcatttcatatcataacataagcatacatgtatttgtaattgacttgtagaacacctagaagaagtggtgtttgaaggagtctactccagtgcctgctcatcaagtggatggagctatctaactaaaggttgggtagaaggatctagaacctcttctctgcaacaaaggcaagccccggtgcatttgccccttccttgtatttttaaaaagacttttatacacttaagtctagtgaaatgggcattaagtttataggaattgcttagaaactatttgatgcattggctaccttgatatccatacctttatagatacttctgatgaagtatcaaaatatgatttacaaaaatgcttagccctgcttagatcttgtggatagaggttgtcttttgcattaatgcctagctcaggggttatcttgaggaaggatgacttctacctgcaagaatattttcattgggagcatggtgggatcttactgcaaagttccctataatgctcttttcatccttaggaacacaaaacaatcctaagggtggaagtacttaacttgagacttgggctaggaacaggtgatgctccacctaggttaattaaggattggatgtgtatgtaggcctgtatgatcaaggactatcttaactggccacatgccctggatatgggacagagtaagcttgaacctggctattccatacgtgaaaagacaaccgcgcactaggcgtgggagatggtgggagtagcgtgtaccctctggctagaggctggacggaggagtattgtgctctcgggtagcgcagaccagttcatgttgtggaggatctgtgggaatgttgacatatgcaggg

SEQ ID NO: 20563 - DNA, 2048 bp, Zea Mays
gcagggcatgcaaacctgcgtggagctgaagacaggccacgtatgattggtccatgcgttgctggcacccttggagtctctcttcctcatgctgtggttgagctcggtgacacctgctccttattcaatgatataaaacttgattcagtgaggatgctccctgtccttaagtctggtccgtgtttatcaccagagtgacacagctcttgagttcaagtcgatatacatcctctccccagccaatagctcggtctgcccttgtgcttagcgctccaacactcagtctggtgaccacgctcacccaactgctcacctcaccgtggccgagacgcttggagcaattgcatccccgggtggtcagaacagtgccacgctgccgcagaacagagtcgtggacagctccaccgctggctttccaatccatgttgatctcgaatgatcttgtgcgagcactgaaggtgtggtcgtcgacgtcgtggccagcgagggcgggtgcttggctcgagcatgaaaacattggagcttgttaacatggacgtgttttgacggtgattatgatgcgcctgaggtcagcgccgctgtggctggttgggccggctgagtgagtttgggcctgatattgttctaagttttgtcttttctattagctgagagatttgaaatggtgccaaaatttgtagaaaattccaaaaatcatgggacaaaatttgttggatgtataaaatcaaaagctctctaggaaagttggtttctggatttttaggttggttaccaaatattaagggatttaaatgtgctcttggaaggattgtttggattttaaaaataaaattacagtgccaaaacttatgaaattttttgggtaacattttttggtcatttgagtttgtggtaaaggtttgaggctgttcagaatccatttgctctgaaaactttgtaagccccaaaataaaatggttaatccctaatcaagtgtgagttagtgctttggaaaggggataagtttatctaaggaagagatgcagtttcttaagaagttttaagcttttggatgagatataagttggattagttccctggtttacctaagcgaattcaaattggtcacttttattaagtgctaggttgtctagatgtgtatgcctatcatatacttatttaggagtgtttatattccccacctctccttgtgagagtttgcatttcatatcataacataagcatacatgtatttgtaattgacttgtagaacacctagaagaagtggtgtttgaaggagtctactccagtgcctgctcatcaagtggatggagctatctaactaaaggttgggtagaaggatctagaacctcttctctgcaacaaaggcaagccccggtgcatttgccccttccttgtatttttaaaaagacttttatacacttaagtctagtgaaatgggcattaagtttataggaattgcttagaaactatttgatgcattggctaccttgatatccatacctttatagatacttctgatgaagtatcaaaatatgatttacaaaaatgcttagccctgcttagatcttgtggatagaggttgtcttttgcattaatgcctagctcaggggttatcttgaggaaggatgacttctacctgcaagaatattttcattgggagcatggtgggatcttactgcaaagttccctataatgctcttttcatccttaggaacacaaaacaatcctaagggtggaagtacttaacttgagacttgggctaggaacaggtgatgctccacctaggttaattaaggattggatgtgtatgtaggcctgtatgatcaaggactatcttaactggccacatgccctggatatgggacagagtaagcttgaacctggctattccatacgtgaaaagacaaccgcgcactaggcgtgggagatggtgggagtagcgtgtaccctctggctagaggctggacggaggagtattgtgctctcgggtagcgcagaccagttcatgttgtggaggatctgtgggaatgttgacatatgcaggg

SEQ ID NO: 20564 - DNA, 939 bp, Zea Mays
tgcaaacctgcgtggagctgaagacaggccacgtatgattggtccatgcgttgctggcacccttggagtctctcttcctcatgctgtggttgagctcggtgacacctgctccttattcaatgatataaaacttgattcagtgaggatgctccctgtccttaagtctggtccgtgtttatcaccagagtgacacagctcttgagttcaagtcgatatacatcctctccccagccaatagctcggtctgcccttgtgcttagcgctccaacactcagtctggtgaccacgctcacccaactgctcacctcaccgtggccgagacgcttggagcaattgcatccccgggtggtcagaacagtgccacgctgccgcagaacagagtcgtggacagctccaccgctggctttccaatccatgttgatctcgaatgatcttgtgcgagcactgaaggtcgtcgacgtcgtggccagcgagggcgggtgcttggctcgagcatgaaaacattggagcttgttaacatggacgtgttttgacggtgattatgatgcgcctgaggtcagcgccgctgtggctggttgggccggctgagtgatgaggagtattcaaggagttcctgaagctaggagggcgtttccagttctgggggaggattagttaggtttgggtataagctttggagggttcctaccttcttgctattgtaataagttatgcactttgagtatatcaggacttgtaataaatgtaactcttcctatgtaatgaccttcagttttagaaatgaaaataatattttgtaaagtctttcgctcttatctccgaagtgtgtgtatcgaatgtgattactgtaatatacatgaatgtgggagatccttaggatgatgagttcaggttgttgaactcgtgatagccttgttaagttacctggtacacatgcat

SEQ ID NO: 20565 - DNA, 944 bp, Zea Mays
tgcaaacctgcgtggagctgaagacaggccacgtatgattggtccatgcgttgctggcacccttggagtctctcttcctcatgctgtggttgagctcggtgacacctgctccttattcaatgatataaaacttgattcagtgaggatgctccctgtccttaagtctggtccgtgtttatcaccagagtgacacagctcttgagttcaagtcgatatacatcctctccccagccaatagctcggtctgcccttgtgcttagcgctccaacactcagtctggtgaccacgctcacccaactgctcacctcaccgtggccgagacgcttggagcaattgcatccccgggtggtcagaacagtgccacgctgccgcagaacagagtcgtggacagctccaccgctggctttccaatccatgttgatctcgaatgatcttgtgcgagcactgaaggtgtggtcgtcgacgtcgtggccagcgagggcgggtgcttggctcgagcatgaaaacattggagcttgttaacatggacgtgttttgacggtgattatgatgcgcctgaggtcagcgccgctgtggctggttgggccggctgagtgatgaggagtattcaaggagttcctgaagctaggagggcgtttccagttctgggggaggattagttaggtttgggtataagctttggagggttcctaccttcttgctattgtaataagttatgcactttgagtatatcaggacttgtaataaatgtaactcttcctatgtaatgaccttcagttttagaaatgaaaataatattttgtaaagtctttcgctcttatctccgaagtgtgtgtatcgaatgtgattactgtaatatacatgaatgtgggagatccttaggatgatgagttcaggttgttgaactcgtgatagccttgttaagttacctggtacacatgcat

SEQ ID NO: 20566 - DNA, 1990 bp, Zea Mays
gttgctggcacccttggagtctctcttcctcatgctgtggttgagctcggtgacacctgctccttattcaatgatataaaacttgattcagtgaggatgctccctgtccttaagtctggtccgtgtttatcaccagagtgacacagctcttgagttcaagtcgatatacatcctctccccagccaatagctcggtctgcccttgtgcttagcgctccaacactcagtctggtgaccacgctcacccaactgctcacctcaccgtggccgagacgcttggagcaattgcatccccgggtggtcagaacagtgccacgctgccgcagaacagagtcgtggacagctccaccgctggctttccaatccatgttgatctcgaatgatcttgtgcgagcactgaaggtaggtcgtcgacgtcgtggccagcgagggcgggtgcttggctcgagcatgaaaacattggagcttgttaacatggacgtgttttgacggtgattatgatgcgcctgaggtcagcgccgctgtggctggttgggccggctgagtgagtttgggcctgatattgttctaagttttgtcttttctattagctgagagatttgaaatggtgccaaaatttgtagaaaattccaaaaatcatgggacaaaatttgttggatgtataaaatcaaaagctctctaggaaagttggtttctggatttttaggttggttaccaaatattaagggatttaaatgtgctcttggaaggattgtttggattttaaaaataaaattacagtgccaaaacttatgaaattttttgggtaacattttttggtcatttgagtttgtggtaaaggtttgaggctgttcagaatccatttgctctgaaaactttgtaagccccaaaataaaatggttaatccctaatcaagtgtgagttagtgctttggaaaggggataagtttatctaaggaagagatgcagtttcttaagaagttttaagcttttggatgagatataagttggattagttccctggtttacctaagcgaattcaaattggtcacttttattaagtgctaggttgtctagatgtgtatgcctatcatatacttatttaggagtgtttatattccccacctctccttgtgagagtttgcatttcatatcataacataagcatacatgtatttgtaattgacttgtagaacacctagaagaagtggtgtttgaaggagtctactccagtgcctgctcatcaagtggatggagctatctaactaaaggttgggtagaaggatctagaacctcttctctgcaacaaaggcaagccccggtgcatttgccccttccttgtatttttaaaaagacttttatacacttaagtctagtgaaatgggcattaagtttataggaattgcttagaaactatttgatgcattggctaccttgatatccatacctttatagatacttctgatgaagtatcaaaatatgatttacaaaaatgcttagccctgcttagatcttgtggatagaggttgtcttttgcattaatgcctagctcaggggttatcttgaggaaggatgacttctacctgcaagaatattttcattgggagcatggtgggatcttactgcaaagttccctataatgctcttttcatccttaggaacacaaaacaatcctaagggtggaagtacttaacttgagacttgggctaggaacaggtgatgctccacctaggttaattaaggattggatgtgtatgtaggcctgtatgatcaaggactatcttaactggccacatgccctggatatgggacagagtaagcttgaacctggctattccatacgtgaaaagacaaccgcgcactaggcgtgggagatggtgggagtagcgtgtaccctctggctagaggctggacggaggagtattgtgctctcgggtagcgcagaccagttcatgttgtggaggatctgtgggaatgttgacatatgcaggg

SEQ ID NO: 20567 - DNA, 894 bp, Zea Mays
gttgctggcacccttggagtctctcttcctcatgctgtggttgagctcggtgacacctgctccttattcaatgatataaaacttgattcagtgaggatgctccctgtccttaagtctggtccgtgtttatcaccagagtgacacagctcttgagttcaagtcgatatacatcctctccccagccaatagctcggtctgcccttgtgcttagcgctccaacactcagtctggtgaccacgctcacccaactgctcacctcaccgtggccgagacgcttggagcaattgcatccccgggtggtcagaacagtgccacgctgccgcagaacagagtcgtggacagctccaccgctggctttccaatccatgttgatctcgaatgatcttgtgcgagcactgaaggtaggtcgtcgacgtcgtggccagcgagggcgggtgcttggctcgagcatgaaaacattggagcttgttaacatggacgtgttttgacggtgattatgatgcgcctgaggtcagcgccgctgtggctggttgggccggctgagtgatgaggagtattcaaggagttcctgaagctaggagggcgtttccagttctgggggaggattagttaggtttgggtataagctttggagggttcctaccttcttgctattgtaataagttatgcactttgagtatatcaggacttgtaataaatgtaactcttcctatgtaatgaccttcagttttagaaatgaaaataatattttgtaaagtctttcgctcttatctccgaagtgtgtgtatcgaatgtgattactgtaatatacatgaatgtgggagatccttaggatgatgagttcaggttgttgaactcgtgatagccttgttaagttacctggtacacatgcat

SEQ ID NO: 20568 - DNA, 853 bp, Zea Mays
gttgctggcacccttggagtctctcttcctcatgctgtggttgagctcggtgacacctgctccttattcaatgatataaaacttgattcagtgaggatgctccctgtccttaagtctggtccgtgtttatcaccagagtgacacagctcttgagttcaagtcgatatacatcctctccccagccaatagctcggtctgcccttgtgcttagcgctccaacactcagtctggtgaccacgctcacccaactgctcacctcaccgtggccgagacgcttggagcaattgcatccccggaacagtgccacgctgccgcagaacagagtcgtggacagctccaccgctggctttccaatccatgttgatctcgaatgatcttgtgcgagcactgaaggtaggtcgtcgacgtcgtggccagcgagggcgggtgcttggctcgagcatgaaaacattggagcttgttaacatggacgtgttttgacggtgattatgatgcgcctgaggtgatgaggagtattcaaggagttcctgaagctaggagggcgtttccagttctgggggaggattagttaggtttgggtataagctttggagggttcctaccttcttgctattgtaataagttatgcactttgagtatatcaggacttgtaataaatgtaactcttcctatgtaatgaccttcagttttagaaatgaaaataatattttgtaaagtctttcgctcttatctccgaagtgtgtgtatcgaatgtgattactgtaatatacatgaatgtgggagatccttaggatgatgagttcaggttgttgaactcgtgatagccttgttaagttacctggtacacatgcat

SEQ ID NO: 20569 - DNA, 752 bp, Zea Mays
gttgctggcacccttggagtctctcttcctcatgctgtggttgagctcggtgacacctgctccttattcaatgatataaaacttgattcagtgaggatgctccctgtccttaagtctggtccgtgtttatcaccagagtgacacagctcttgagttcaagtcgatatacatcctctccccagccaatagctcggtctgcccttgtgcttagcgctccaacactcagtctggtgaccacgctcacccaactgctcacctcaccgtggccgagacgcttggagcaattgcatccccgggtggtcagaacagtgccacgctgccgcagaacagagtcgtggacagctccaccgctggctttccaatccatgttgatctcgaatgatcttgtgcgagcactgaaggtgatgaggagtattcaaggagttcctgaagctaggagggcgtttccagttctgggggaggattagttaggtttgggtataagctttggagggttcctaccttcttgctattgtaataagttatgcactttgagtatatcaggacttgtaataaatgtaactcttcctatgtaatgaccttcagttttagaaatgaaaataatattttgtaaagtctttcgctcttatctccgaagtgtgtgtatcgaatgtgattactgtaatatacatgaatgtgggagatccttaggatgatgagttcaggttgttgaactcgtgatagccttgttaagttacctggtacacatgcat

SEQ ID NO: 20570 - DNA, 862 bp, Zea Mays
gttgctggcacccttggagtctctcttcctcatgctgtggttgagctcggtgacacctgctccttattcaatgatataaaacttgattcagtgaggatgctccctgtccttaagtctggtccgtgtttatcaccagagtgacacagctcttgagttcaagtcgatatacatcctctccccagccaatagctcggtctgcccttgtgcttagcgctccaacactcagtctggtgaccacgctcacccaactgctcacctcaccgtggccgagacgcttggagcaattgcatccccgggtggtcagaacagtgccacgctgccgcagaacagagtcgtggacagctccaccgctggctttccaatccatgttgatctcgaatgatcttgtgcgagcactgaaggtgtggtcgtcgacgtcgtggccagcgagggcgggtgcttggctcgagcatgaaaacattggagcttgttaacatggacgtgttttgacggtgattatgatgcgcctgaggtgatgaggagtattcaaggagttcctgaagctaggagggcgtttccagttctgggggaggattagttaggtttgggtataagctttggagggttcctaccttcttgctattgtaataagttatgcactttgagtatatcaggacttgtaataaatgtaactcttcctatgtaatgaccttcagttttagaaatgaaaataatattttgtaaagtctttcgctcttatctccgaagtgtgtgtatcgaatgtgattactgtaatatacatgaatgtgggagatccttaggatgatgagttcaggttgttgaactcgtgatagccttgttaagttacctggtacacatgcat

SEQ ID NO: 20571 - DNA, 899 bp, Zea Mays
gttgctggcacccttggagtctctcttcctcatgctgtggttgagctcggtgacacctgctccttattcaatgatataaaacttgattcagtgaggatgctccctgtccttaagtctggtccgtgtttatcaccagagtgacacagctcttgagttcaagtcgatatacatcctctccccagccaatagctcggtctgcccttgtgcttagcgctccaacactcagtctggtgaccacgctcacccaactgctcacctcaccgtggccgagacgcttggagcaattgcatccccgggtggtcagaacagtgccacgctgccgcagaacagagtcgtggacagctccaccgctggctttccaatccatgttgatctcgaatgatcttgtgcgagcactgaaggtgtggtaggtcgtcgacgtcgtggccagcgagggcgggtgcttggctcgagcatgaaaacattggagcttgttaacatggacgtgttttgacggtgattatgatgcgcctgaggtcagcgccgctgtggctggttgggccggctgagtgatgaggagtattcaaggagttcctgaagctaggagggcgtttccagttctgggggaggattagttaggtttgggtataagctttggagggttcctaccttcttgctattgtaataagttatgcactttgagtatatcaggacttgtaataaatgtaactcttcctatgtaatgaccttcagttttagaaatgaaaataatattttgtaaagtctttcgctcttatctccgaagtgtgtgtatcgaatgtgattactgtaatatacatgaatgtgggagatccttaggatgatgagttcaggttgttgaactcgtgatagccttgttaagttacctggtacacatgcat

SEQ ID NO: 20572 - DNA, 608 bp, Zea Mays
agtgacacagctcttgagttcaagtcgatatacatcctctccccagccaatagctcggtctgcccttgtgcttagcgctccaacactcagtctggtgaccacgctcacccaactgctcacctcaccgtggccgagacgcttggagcaattgcatccccggtgccacgctgccgcagaacagagtcgtggacagctccaccgctggctttccaatccatgttgatctcgaatgatcttgtgcgagcactgaaggtgtggtgatgaggagtattcaaggagttcctgaagctaggagggcgtttccagttctgggggaggattagttaggtttgggtataagctttggagggttcctaccttcttgctattgtaataagttatgcactttgagtatatcaggacttgtaataaatgtaactcttcctatgtaatgaccttcagttttagaaatgaaaataatattttgtaaagtctttcgctcttatctccgaagtgtgtgtatcgaatgtgattactgtaatatacatgaatgtgggagatccttaggatgatgagttcaggttgttgaactcgtgatagccttgttaagttacctggtacacatgcat

SEQ ID NO: 20573 - DNA, 2644 bp, Zea Mays
ttaatgggcatatataatattacccctacttatttacaccagccgataattagttcgagggcaatcgattagcgctgtggatagaaattgaagctcgggttcagcagcctcgatcaaacagcgccagagccagagggctgcgagagaggacaggactggacaagaaaactgaaatgaaaacatgaccaagaaccctacccaacacgagaagccccaggccgaaattaccgaagcgcccctcgccatttaaccatctcatctcctcacctcctcgacggcgcgactccctcgacctcgccctcctccccccgccttgacgctgtcgcctggtcctccgcggtcggctgtctcgattcgatcgtaatacatcgacaataggattgaatcacttcttcaagatttggagttgaagtgctggatgctgacagaatagaagttccttcaccaaaagaagaaaataattcgacaaattctgaagctgctacagatagcgaagacattgaaatcagcgatgatgatgaccgcaaccacaagcaccgaagacgggaggctaaacaacaatctgatgacaatacagaggagcaacatccagggccacctcttaaaaaaaggagtagggttgctggtaatggagaaccttttggtggagctggctctcaaggtgaagtacaaaaggattttgtgccaaattttaaaaggcgttctggagcaggaggtcacactcgagcacctagagcgaaccaatccttccgagctgattcatcggcttctgctgctactcgccctcctatgacacgaggaagaggacgtaatgttgcaccttggactcaccatgatccaagatttaactcacttgatatgatggattttgcatcccagatggcttcacaaggaccacctgcacatcctagcttatttatgggcactgcattgccatgtggtccatatggatttatgcctggaatgcctcatgggattttggatccaatccacccacttggaatgcaaggccctattcagcgctcagtatctcctttgattgatcttggcatgcctcgtcaacgttgcagagactttgaggaacgtggattttgcttgagaggggatatgtgccccatggagcatggtgtaaatagaattgttgttgatgatatgcagagtctttctcaattcaatcttccagtatcagttccaaatgctcaaggattgggaatccaaaatgagggaggaaccagttctgttaacttatccaaccttggagggagtaaaagcgttcctgtaaaagatgtgaaatctggtgtagcaagtgatgcattaaagccaaatggaagtgctgtttcagctgttgctgatgctgatgtatatgatcctgatcaacctctttggaacaatgagcaccgagaagcatcatctactggctttataaataaagatgttggaccgtggaatgctgaatcatccggctatgaaatggggcaggagcattcaaaccaggttttggcttctgatggttctcagagtttgaagtcttctgtttgggggcgaataacatcaaaaagaaaaccaggaggtaataacacagctaaaagtacaccaacgagtatcactggaaaccaaaaaagtgattatgatgacatggctatcagcacgggccaagtaaaatctgctgctaaggataccaatggtcaacccaattcaagaatatatggagatgtgggctggcaaagtaatcgagctgctcagaaagcatcccgtacattatatgtaaatggaattccccaagaaagcaacagatgggagacccttctatcgcattttcagaagtttggtcaagtaatagatatttatattccatctaacagtgaaaaagcttttgtccagttctcgagaagggaagaagctgaagctgccctaaaagctccagatgctgttatgggaaaccgctttataaagctatggtgggccaacagagatagagttcttgatgtgggagagggcagaatctctcaaaagccttcccagttgtctactacgccggctaattcttaccccaacagagtcaaggaaaatgttcaaccaacagctccagggcccagctctggatcttctgctgaactgttgagttctggtacaccaagttctagaatgctgccagcaagtagtgcgaaagcagtaccaccccatgctccaaaaaggcaagaaagcctagaactattggaagaactacgtaaaaaacaagagatcttagctcagaagcgtgatgagttccgccggcagttagagaaacttacaaaacaaaaaggttcagcaaattcagttaagcatgcagagactggtggaaaagaaattgcttctaatgatgcatcacaagtaaaggatgcagcgtccacgagggttgaagggtcacaggagacagctggttcattggaaaagagaagttctggagagtttgccttgttgtctcaaaagtctgctgcgatatccacgcagaaaccagtggtggttacaaaacagactactctgccagcacctcctcagaataggtttaagcttgacaatcggaccacatcattcagaattcttccacctttgccacctgaaattgcaaatgtaagttttacatccaaccacttgccattccttg

SEQ ID NO: 20574 - DNA, 2509 bp, Zea Mays
cacctgttcagtcttgactcgaccaagagctctatttgtcaagcggcgtaattggtgaaattctatctggagtacagagtggacaattgaggtcgataaatagagaggaacatttctggggcaattatctgttggaatgtaatacatcgacaataggattgaatcacttcttcaagatttggagttgaaggtgataatcacattgaatacaatctagatgataagttttctgctgtactggttaccttgaagatgctcaaagagtcattatcaccagtgctggatgctgacagaatagaagttccttcaccaaaagaagaaaataattcgacaaattctgaagctgctacagatagcgaagacattgaaatcagcgatgatgatgaccgcaaccacaagcaccgaagacgggaggctaaacaacaatctgatgacaatacagaggagcaacatccagggccacctcttaaaaaaaggagtagggttgctggtaatggagaaccttttggtggagctggctctcaaggtgaagtacaaaaggattttgtgccaaattttaaaaggcgttctggagcaggaggtcacactcgagcacctagagcgaaccaatccttccgagctgattcatcggcttctgctgctactcgccctcctatgacacgaggaagaggacgtaatgttgcaccttggactcaccatgatccaagatttaactcacttgatatgatggattttgcatcccagatggcttcacaaggaccacctgcacatcctagcttatttatgggcactgcattgccatgtggtccatatggatttatgcctggaatgcctcatgggattttggatccaatccacccacttggaatgcaaggccctattcagcgctcagtatctcctttgattgatcttggcatgcctcgtcaacgttgcagagactttgaggaacgtggattttgcttgagaggggatatgtgccccatggagcatggtgtaaatagaattgttgttgatgatatgcagagtctttctcaattcaatcttccagtatcagttccaaatgctcaaggattgggaatccaaaatgagggaggaaccagttctgttaacttatccaaccttggagggagtaaaagcgttcctgtaaaagatgtgaaatctggtgtagcaagtgatgcattaaagccaaatggaagtgctgtttcagctgttgctgatgctgatgtatatgatcctgatcaacctctttggaacaatgagcaccgagaagcatcatctactggctttataaataaagatgttggaccgtggaatgctgaatcatccggctatgaaatggggcaggagcattcaaaccaggttttggcttctgatggttctcagagtttgaagtcttctgtttgggggcgaataacatcaaaaagaaaaccaggaggtaataacacagctaaaagtacaccaacgagtatcactggaaaccaaaaaagtgattatgatgacatggctatcagcacgggccaagtaaaatctgctgctaaggataccaatggtcaacccaattcaagaatatatggagatgtgggctggcaaagtaatcgagctgctcagaaagcatcccgtacattatatgtaaatggaattccccaagaaagcaacagatgggagacccttctatcgcattttcagaagtttggtcaagtaatagatatttatattccatctaacagtgaaaaagcttttgtccagttctcgagaagggaagaagctgaagctgccctaaaagctccagatgctgttatgggaaaccgctttataaagctatggtgggccaacagagatagagttcttgatgtgggagagggcagaatctctcaaaagccttcccagttgtctactacgccggctaattcttaccccaacagagtcaaggaaaatgttcaaccaacagctccagggcccagctctggatcttctgctgaactgttgagttctggtacaccaagttctagaatgctgccagcaagtagtgcgaaagcagtaccaccccatgctccaaaaaggcaagaaagcctagaactattggaagaactacgtaaaaaacaagagatcttagctcagaagcgtgatgagttccgccggcagttagagaaacttacaaaacaaaaaggttcagcaaattcagttaagcatgcagagactggtggaaaagaaattgcttctaatgatgcatcacaagtaaaggatgcagcgtccacgagggttgaagggtcacaggagacagctggttcattggaaaagagaagttctggagagtttgccttgttgtctcaaaagtctgctgcgatatccacgcagaaaccagtggtggttacaaaacagactactctgccagcacctcctcagaataggtttaagcttgacaatcggaccacatcattcagaattcttccacctttgccacctgaaattgcaaatgtaagttttacatccaaccacttgccattccttg

SEQ ID NO: 20575 - DNA, 2420 bp, Zea Mays
gtcatttttctgtttttctgggattatcatcagtttattttcattattagtaatacatcgacaataggattgaatcacttcttcaagatttggagttgaaggtgataatcacattgaatacaatctagatgataagttttctgctgtactggttaccttgaagatgctcaaagagtcattatcaccagtgctggatgctgacagaatagaagttccttcaccaaaagaagaaaataattcgacaaattctgaagctgctacagatagcgaagacattgaaatcagcgatgatgatgaccgcaaccacaagcaccgaagacgggaggctaaacaacaatctgatgacaatacagaggagcaacatccagggccacctcttaaaaaaaggagtagggttgctggtaatggagaaccttttggtggagctggctctcaaggtgaagtacaaaaggattttgtgccaaattttaaaaggcgttctggagcaggaggtcacactcgagcacctagagcgaaccaatccttccgagctgattcatcggcttctgctgctactcgccctcctatgacacgaggaagaggacgtaatgttgcaccttggactcaccatgatccaagatttaactcacttgatatgatggattttgcatcccagatggcttcacaaggaccacctgcacatcctagcttatttatgggcactgcattgccatgtggtccatatggatttatgcctggaatgcctcatgggattttggatccaatccacccacttggaatgcaaggccctattcagcgctcagtatctcctttgattgatcttggcatgcctcgtcaacgttgcagagactttgaggaacgtggattttgcttgagaggggatatgtgccccatggagcatggtgtaaatagaattgttgttgatgatatgcagagtctttctcaattcaatcttccagtatcagttccaaatgctcaaggattgggaatccaaaatgagggaggaaccagttctgttaacttatccaaccttggagggagtaaaagcgttcctgtaaaagatgtgaaatctggtgtagcaagtgatgcattaaagccaaatggaagtgctgtttcagctgttgctgatgctgatgtatatgatcctgatcaacctctttggaacaatgagcaccgagaagcatcatctactggctttataaataaagatgttggaccgtggaatgctgaatcatccggctatgaaatggggcaggagcattcaaaccaggttttggcttctgatggttctcagagtttgaagtcttctgtttgggggcgaataacatcaaaaagaaaaccaggaggtaataacacagctaaaagtacaccaacgagtatcactggaaaccaaaaaagtgattatgatgacatggctatcagcacgggccaagtaaaatctgctgctaaggataccaatggtcaacccaattcaagaatatatggagatgtgggctggcaaagtaatcgagctgctcagaaagcatcccgtacattatatgtaaatggaattccccaagaaagcaacagatgggagacccttctatcgcattttcagaagtttggtcaagtaatagatatttatattccatctaacagtgaaaaagcttttgtccagttctcgagaagggaagaagctgaagctgccctaaaagctccagatgctgttatgggaaaccgctttataaagctatggtgggccaacagagatagagttcttgatgtgggagagggcagaatctctcaaaagccttcccagttgtctactacgccggctaattcttaccccaacagagtcaaggaaaatgttcaaccaacagctccagggcccagctctggatcttctgctgaactgttgagttctggtacaccaagttctagaatgctgccagcaagtagtgcgaaagcagtaccaccccatgctccaaaaaggcaagaaagcctagaactattggaagaactacgtaaaaaacaagagatcttagctcagaagcgtgatgagttccgccggcagttagagaaacttacaaaacaaaaaggttcagcaaattcagttaagcatgcagagactggtggaaaagaaattgcttctaatgatgcatcacaagtaaaggatgcagcgtccacgagggttgaagggtcacaggagacagctggttcattggaaaagagaagttctggagagtttgccttgttgtctcaaaagtctgctgcgatatccacgcagaaaccagtggtggttacaaaacagactactctgccagcacctcctcagaataggtttaagcttgacaatcggaccacatcattcagaattcttccacctttgccacctgaaattgcaaatgtaagttttacatccaaccacttgccattccttg

SEQ ID NO: 20576 - DNA, 3250 bp, Zea Mays
aacctgtgcgtcgctcctacgtagttaactcgcccagcaccgcgcgccgtcgtccaagtccagcgacctgtccttctgcacatggcgtccctcgcctccctatagctccagctcgcgccagcgctcctcctcaagccacgccagccgctgtgtgcccctgctccagtctcgcccaagtctgcaccagcaggtcgcccatggccgcgccctcggctccctctctggtggtcgtcgggttcgaccactctccagccgtcgcggcgtccttagtttgttccggcaccgtcgtctctagcccagctcgaccaagccgcgccgttcctcccttcctcgcgccagcagccaccgtctcgtatcgccctcgatccggccgtcgtagctcctccatcttggccattcttgacttttttcatgccatccgttgtcgtcgacatgaggcactgcccacagcaagccacctcgctggtgctatgttgtcttgcgtctcctcatcggactacgtcatcacccttcccaacatcggcaccacgtgtccctcattttggtgtgcgtcaccatcgactcagcacagtccgtcgcgctcggcatcctcgacctcaagtcttgcaagtcattaggtccatcgctagtgacttgttgttatcgctttactcgatttcttacttggcgtcaataccctgtgattaattatgtgtgtatatgtattttatggacgggagaaattcaggatgtttgagagaagtcgaaggtgtaggtgtgtaacacttgcggggtctggtgttatgaccggaccaggtagcgtcgtcgatttcgtgggttcaagtaggattttagtatgacgagctgattcgttattcctgttagtcgaattgttagatagattgaataaatatgtgtggtgcgaaataaaattaaattagttctttgtgagtgatgtggtataattaataatgtgagggacaagtttagcatttaattaattagccggtaagttttgtttaggctaattgtgttaagtgtgttagtttgtctgtctatatgttactcttaggagtcgataatggtgaatttattttgctattcctattaattaacttaattcacggatttaatataatattggtgagacataaaataagtttaatgtttttatcagcttgccgatagattgtatcagtgatgttgtgccgaatttttggttatgtgatggagtcgatgccttgctctactagtcattatcgtcgatgtcttgtgaccggttaaatgccttaagtaggtattagctgttgcccaaataattaaaggcgagtagcatcggaaaatcgatttcagtcaaaatccgagaaacatcgtttggtccgctttaaaaactagttagtggacattgttctttagtgttttaaatctttagggtttaagtggtttacaaagttgattaatatgtttctatccttattctgagttattggtatttaaaaatagtgaatcaaggtttggcgagtcatttgacattgggcgttagctaaggatggcataggacttgtgcttagtttattatcatttgctgttcgaattggactcagttaagttcaaatagcatggacgtggtatttagtaccatctcgacatctagtattttcttttaagtgctattatgtgcctcgccactaagtgtttaattcactatcgtgcaacattatttaggcttgtgctattcttgcttatatctattgatgtgcaccatgcatctcattaggtacgctagctgatcacatgatatgaaggaccagagctgagtcgaccacaagttgttgttaagcatgggtttcttcgcaaggtgatattgatgaatgaacttgaagatttggtgattggatcaagcgccaggatgtgagatgctcgccaagtggacgtcatctaacaaacactaacctagtgttatttcaggcaagccccggtgcatgcaaccccttccttgtgtttttacatgatttttatacactttaagtctagtgaaatgcgcattaagtttataggagttgttaggaaaccatttgatgcattgactaccttgaaatccattccctttaaagatacttcttttgaagtatctagtattatttaaaaaatgcttagccctacttagattttgcggatagaggttgtcctttgcaataatgcctagctcaggggttatcctgaggaagcatacctacaaggctattttcatggtgggatcttactacaagattcccatgaaattctattcatcctaaggtacacaaaataagtcctaaggatggaagaaattaaatcgagacttgggctaggaacaggtgatgttccgtctaggttgattaaggattatttcgatgtaggcctgttgtggtggagactttgcaactatccacataccctggtatgggacaaggtaagcttgaacccggctattccatatgtgaaaatacaaccgcgcaatgggcatgggagatggtgggagtagcgtgtatcctcctggctagaggctggacggaggagtactatgctcccgggtagtgtggaccagttcacgttttggaggatctgtgggaatgcttgacatatgcaagggttaattgctacatatgttgtgtggttagggatccccagctgggtataatcggtttgaatcgtcgttgctcctcggtcatggagactctaccctctgaccactcatcataagtcatggatggaatcataatgagtaaaaatatggttgtattgattaatgggatgatgaattgagactagatgcaaacaaggtgaattaatacctaatctggcattaaaatgttgaaagtaaggactcacttttagaaagcttttctgcaaaatgtctaagttgattcttgctaaaagcctctccttgattcctaaatctagcatatccttgagagtctttttttagtcgggtaagacttgcgaaagtacactttgtactcagggttttcgaacccatgttgttgtaggtactagatttgtgctcctgttgatggtgctaagtgccggtgggctcggccttcttataggttaaagtagctcttgtatacttcttattgaggatgatcacttaagctagcatatatttcaaacttataaataatttataacatttcaaagtatatttctttgaatcacttttgtaatcaccccgataaatataatgtaaatttgttataacttgtaattttttgtaataaagaaattcggc

SEQ ID NO: 20577 - DNA, 1568 bp, Zea Mays
aggagtgatcgtctattttctcatcacataaacgtactgcgtttctactttctagtggagaaggaaaagacaattttctcgtaaccttccgggctcctcttcctctcctcgcgttcccccaccaaaccctaatccgagcacccagcccctacccgcttccgctcgcgccggcctttggggctctcaccctgagcggtaggaatccgcagggctccggttgggtgccagaagcatccaagtcgttggcgggagaccgggaaatggcggaaaaagagggggcgaaggttggggcggaagagatggaagagcgggagcaggaaggggaggcggaggaggtggaggtgaagtttcgtctcttcgacggctccgacatcggccccgtgcgctgcaacgccgccaccaccaccgtcgccgctctcaaggatcgcgtcgtcgccgactggcccaaagataaacaaattatcccaaagactgctagtgatgtaaaactaataagtggcggcaaaattctagaaaatgacaagaatgttgcacagtgcagagctccttttggcgatcttcccagtagtgctatcacgatgcacgttgttgttcaaccatcatcagccaaatcaaaaccagatttcagaagcatattatatccacagagatgtatgtagtctgttgatgcaacacaactacataccaagtacctacagagcaggcaacactaaggcatagaaggatttaatgatatgcctctgaaatttgtggaggagcagaggagtaagtaggctatctggctacataggagcagaggaggaaggactgaaggagtacagaggaggaagatgacagggagaaaatgagagaggagcaggggagagcggaggggaagagaacaggggattttgccctgggcttcaggtcatgatgattggcagtgaggaggtccagccttgggttatggctcaacgtcatgcacgaggaacaagtcatagcagccactggggaggaactgcaacacgatgccagggatggtgtctggcgggcgacgggaacagatcgaggagcagcacctgggcaggagcatggatatgaaattggtcaacgataagaaggcgaacaagttgcccaaaaccactcgttgctcatgtaccatactgtgaactatatgaaggtcaagtccctacgagaccaacaataatttgtacgtccacaaaaatattctgcagagaatttgagaacaaagattcaagatgtccatgccattctctgccaacgggtggcaatggcgaaagacaacgtccacatgttgtaagctatatgtaattgtaacttaggtacaaagagtcgtccctgtgctgtgcggtcagggaaaatagtctggtggttgcgctgttttactctacaagatgtcttatatgatgtacaagatacagacacttctgggtgtagtgaccttgttcccacctcaccttttaaagtttgtggcgctgagtcaatatggatctaagtcaattgattgaagaaacattttcgactatgcagtattttctcatttatttatggcctgtttgaggcaagag

SEQ ID NO: 20578 - DNA, 279 bp, Zea Mays
cacgcctagagcccattagaacttgccaccgtgcgccattgcaaagaagggggccgccaccggagaaattccatctgtgtcgacgccctgtcttcggcgcaccgctaggaagaatcacctggacgcgtggaagttgtccgtgccctcggggtgaagccggagcgttccgaggtgcgggaatttctcgtcggaggtggaggaccaccgcgggggacgcacgactccgtgggcgacttcaccgccgccactaccgtcgaagagacagtggctgaggatccg

SEQ ID NO: 20579 - DNA, 67 bp, Zea Mays
agagatgctgttatacactaacttgttggaagctatagagctacaataaaactatcattcttcctaa

SEQ ID NO: 20580 - DNA, 166 bp, Zea Mays
ccggtcccggcaccggaccacaacggcggtgtacccgcgctcggcatgcgtcacggacacctccgtccgcagcgagccgtcgggcggcgcggccgcggcgtggccttccactccccgatcgtcgaacatcatctggtgcagccgccgctccttgtggagtgccagg

SEQ ID NO: 20581 - DNA, 1786 bp, Zea Mays
cttcggtctatgatatcggattcggttttaacactgtattaaaccgatttatcgaaaaaccgaatgaatttttaagccgaaaaaagcttcctgcagccaccagcccaccacgatacaaaccctaatccccaccgccgcccgaccccgcagcctcattccaggcgcatcgacagcgacggcacgcgctggtcaatccacggtccaccagtcgacctcgctcacccgcgagccgcgggccttgtcctcgtcgtcgttcataggcagtgcagcctcattcaccggtcgtcctcgtccaccagcgaattgaagttcctcgcccatcagccaacgacgtcgacgcggcctcgttctcgtccagcccagcgtgctgcacgtcgccttgctgttgctgtgctgctgctgtctatgtttcaaatgtcccaactggacctagccctcacggacggaagtgcccaggacctgtcaatatatgccagctatgcggcgagccagagttgagcggcgtacagatttcttgcccaaaagtgtccggccactagctgccaatataataaaataagtcccgccgccactcaccaaattggccgccagggctccgtcctctagcggctccgtccggtggtccggccagctgcctagctccctccgacggtccggccagcaccgcctcctgctcgcggccttgcccagctcctccgccctccggtgagacgtagatcttggtgcggcagggcgctacgggggcggggtggtgctgttgtgcgtgtgctggtggcctggtgctagcaaccgaggagcactgctgtgaggaaggccatccattttgtcaacctgtggacagctggaaggtctagtggaaacctggctatgaactccgtaccaaaacccgcccctgggtccgaaacatctgggagggaggattttgctgtgggggataaggatgctgtggtcattgttgatcatgggtcaagacgccaagaatccaatctcatgctaaatgactttgttgagatgttccgggcgaagactagctataggattgttgagcctgctcatatggagctagcggagcctactataaaggatgcttttggaaaatgtgtgcaacaaggagcatcccgagttattatcagtccatatttcctttcccctggacgacactggaagcaagacattcctgctttagcagcagtggcatcaaaggagcactcaaatataccctatattgtcactgcccctcttgggctgcatgagcttatggtggtatgtgcttgatatcatgaatgatcgcatcaagtactgcctgcgacatgttgcgggtgatgtcgatgagtgtacagtgtgtgccggaactggaaagtgccgcatgtactcctgatggagcatacctgggaattgtttctggagaatacgagatctgacgagtgtatatctaggtccgctgtgtaccgtgaaaccaaaagcttgtacagttcattctgaacagatcgtcagaattagacaagtgccaaattagttatgctgtgcatgcttgcgaacatcaataacgattcattagctaatcttgagtttatttacgtcacgaacaaactcagtcaagtgctctgatatttccattcacatgttatctatattcctgctaccttgtagttgaattagacttattgccttaacatggatcaaatgagaatataatgtacccttgtttgatttgccagttctttttgtcatatatctgttagggacttgttctcaaatgctatgaattaaaaacaagacaacacaa

SEQ ID NO: 20582 - DNA, 1696 bp, Zea Mays
aaaaagcttcctgcagccaccagcccaccacgatacaaaccctaatccccaccgccgcccgaccccgcagcctcattccaggcgcatcgacagcgacggcacgcgctggtcaatccacggtccaccagtcgacctcgctcacccgcgagccgcgggccttgtcctcgtcgtcgttcataggcagtgcagcctcattcaccggtcgtcctcgtccaccagcgaattgaagttcctcgcccatcagccaacgacgtcgacgcggcctcgttctcgtccagcccagcgtgctgcacgtcgccttgctgttgctgtgctgctgctgtctatgtttcaaatgtcccaactggacctagccctcacggacggaagtgcccaggacctgtcaatatatgccagctatgcggcgagccagagttgagcggcgtacagatttcttgcccaaaagtgtccggccactagctgccaatataataaaataagtcccgccgccactcaccaaattggccgccagggctccgtcctctagcggctccgtccggtggtccggccagctgcctagctccctccgacggtccggccagcaccgcctcctgctcgcggccttgcccagctcctccgccctccggtgagacgtagatcttggtgcggcagggcgctacgggggcggggtggtgctgttgtgcgtgtgctggtggcctggtgctagcaaccgaggagcactgctgtgaggaaggccatccattttgtcaacctgtggacagctggaaggtctagtggaaacctggctatgaactccgtaccaaaacccgcccctgggtccgaaacatctgggagggaggattttgctgtgggggataaggatgctgtggtcattgttgatcatgggtcaagacgccaagaatccaatctcatgctaaatgactttgttgagatgttccgggcgaagactagctataggattgttgagcctgctcatatggagctagcggagcctactataaaggatgcttttggaaaatgtgtgcaacaaggagcatcccgagttattatcagtccatatttcctttcccctggacgacactggaagcaagacattcctgctttagcagcagtggcatcaaaggagcactcaaatataccctatattgtcactgcccctcttgggctgcatgagcttatggtggatatcatgaatgatcgcatcaagtactgcctgcgacatgttgcgggtgatgtcgatgagtgtacagtgtgtgccggaactggaaagtgccgcatgtactcctgatggagcatacctgggaattgtttctggagaatacgagatctgacgagtgtatatctaggtccgctgtgtaccgtgaaaccaaaagcttgtacagttcattctgaacagatcgtcagaattagacaagtgccaaattagttatgctgtgcatgcttgcgaacatcaataacgattcattagctaatcttgagtttatttacgtcacgaacaaactcagtcaagtgctctgatatttccattcacatgttatctatattcctgctaccttgtagttgaattagacttattgccttaacatggatcaaatgagaatataatgtacccttgtttgatttgccagttctttttgtcatatatctgttagggacttgttctcaaatgctatgaattaaaaacaagacaacacaa

SEQ ID NO: 20583 - DNA, 1768 bp, Zea Mays
gatacaaaccctaatccccaccgccgcccgaccccgcagcctcattccaggcgcatcgacagcgacggcacgcgctggtcaatccacggtccaccagtcgacctcgctcacccgcgagccgcgggccttgtcctcgtcgtcgttcataggcagtgcagcctcattcaccggtcgtcctcgtccaccagcgaattgaagttcctcgcccatcagccaacgacgtcgacgcggcctcgttctcgtccagcccagcgtgctgcacgtcgccttgctgttgctgtgctgctgctgtctatgtttcaaatgtcccaactggacctagccctcacggacggaagtgcccaggacctgtcaatatatgccagctatgcggcgagccagagttgagcggcgtacagatttcttgcccaaaagtgtccggccactagctgccaatataataaaataagtcccgccgccactcaccaaattggccgccagggctccgtcctctagcggctccgtccggtggtccggccagctgcctagctccctccgacggtccggccagcaccgcctcctgctcgcggccttgcccagctcctccgccctccggtgagacgtagatcttggtgcggcagggcgctacgggggcggggtggtgctgttgtgcgtgtgctggtggcctggtgctagcaaccgaggagcactgctgtgaggaaggccatccattttgtcaacctgtggacagctggaaggtctagtggaaacctggctatgaactccgtaccaaaacccgcccctgggtccgaaacatctgggagggaggattttgctgtgggggataaggatgctgtggtcattgttgatcatgggtcaagacgccaagaatccaatctcatgctaaatgactttgttgagatgttccgggcgaagactagctataggattgttgagcctgctcatatggccagcagggaggaaggagagctgcaggggagcgagaaggaggagagctgcggggagggaggagagctgctgacggctgagagggagatagatatttgtgctggagctagcggagcctactataaaggatgcttttggaaaatgtgtgcaacaaggagcatcccgagttattatcagtccatatttcctttcccctggacgacactggaagcaagacattcctgctttagcagcagtggcatcaaaggagcactcaaatataccctatattgtcactgcccctcttgggctgcatgagcttatggtggatatcatgaatgatcgcatcaagtactgcctgcgacatgttgcgggtgatgtcgatgagtgtacagtgtgtgccggaactggaaagtgccgcatgtactcctgatggagcatacctgggaattgtttctggagaatacgagatctgacgagtgtatatctaggtccgctgtgtaccgtgaaaccaaaagcttgtacagttcattctgaacagatcgtcagaattagacaagtgccaaattagttatgctgtgcatgcttgcgaacatcaataacgattcattagctaatcttgagtttatttacgtcacgaacaaactcagtcaagtgctctgatatttccattcacatgttatctatattcctgctaccttgtagttgaattagacttattgccttaacatggatcaaatgagaatataatgtacccttgtttgatttgccagttctttttgtcatatatctgttagggacttgttctcaaatgctatgaattaaaaacaagacaacacaa

SEQ ID NO: 20584 - DNA, 1857 bp, Zea Mays
gatacaaaccctaatccccaccgccgcccgaccccgcagcctcattccaggcgcatcgacagcgacggcacgcgctggtcaatccacggtccaccagtcgacctcgctcacccgcgagccgcgggccttgtcctcgtcgtcgttcataggcagtgcagcctcattcaccggtcgtcctcgtccaccagcgaattgaagttcctcgcccatcagccaacgacgtcgacgcggcctcgttctcgtccagcccagcgtgctgcacgtcgccttgctgttgctgtgctgctgctgtctatgtttcaaatgtcccaactggacctagccctcacggacggaagtgcccaggacctgtcaatatatgccagctatgcggcgagccagagttgagcggcgtacagatttcttgcccaaaagtgtccggccactagctgccaatataataaaataagtcccgccgccactcaccaaattggccgccagggctccgtcctctagcggctccgtccggtggtccggccagctgcctagctccctccgacggtccggccagcaccgcctcctgctcgcggccttgcccagctcctccgccctccggtgagacgtagatcttggtgcggcagggcgctacgggggcggggtggtgctgttgtgcgtgtgctggtggcctggtgctagcaaccgagggccagtggccagtgtccagcctgccagctcagcccggcggcaagcgcccagcggctggctcgggcagcggccagtggcgagcagccgactcgtttcttcggcgttctccgccactgccccccagctatgcaccctgttccagtcccctcccagccctttaccgcaactcctgcaaaaaaacttgtttcaaggagcactgctgtgaggaaggccatccattttgtcaacctgtggacagctggaaggtctagtggaaacctggctatgaactccgtaccaaaacccgcccctgggtccgaaacatctgggagggaggattttgctgtgggggataaggatgctgtggtcattgttgatcatgggtcaagacgccaagaatccaatctcatgctaaatgactttgttgagatgttccgggcgaagactagctataggattgttgagcctgctcatatggagctagcggagcctactataaaggatgcttttggaaaatgtgtgcaacaaggagcatcccgagttattatcagtccatatttcctttcccctggacgacactggaagcaagacattcctgctttagcagcagtggcatcaaaggagcactcaaatataccctatattgtcactgcccctcttgggctgcatgagcttatggtggatatcatgaatgatcgcatcaagtactgcctgcgacatgttgcgggtgatgtcgatgagtgtacagtgtgtgccggaactggaaagtgccgcatgtactcctgatggagcatacctgggaattgtttctggagaatacgagatctgacgagtgtatatctaggtccgctgtgtaccgtgaaaccaaaagcttgtacagttcattctgaacagatcgtcagaattagacaagtgccaaattagttatgctgtgcatgcttgcgaacatcaataacgattcattagctaatcttgagtttatttacgtcacgaacaaactcagtcaagtgctctgatatttccattcacatgttatctatattcctgctaccttgtagttgaattagacttattgccttaacatggatcaaatgagaatataatgtacccttgtttgatttgccagttctttttgtcatatatctgttagggacttgttctcaaatgctatgaattaaaaacaagacaacacaa

SEQ ID NO: 20585 - DNA, 2213 bp, Zea Mays
aacctgggcatattcctctctctttcctcatcctcatccgagtggctctctccgtgtgctgtggcggcgcctggctctgctcggacggactccaccgaaggcgctcggctcccctcgggctccacctgcgacggccggccctctgcctgcaccgacggtgcccggccccctcggcatccaccagcggtgctcggctccaaggtatacagcagcagcgccctgtgtcgagatctcccttgtatcccttccctctagcgttttcctgatttgagtgacaagattctaagaagctgttgttttatgtgttacccaagatttaaataagctagtgttagaagctggtgttttatgctatcaaatgaactagtgttagaagctgctgttggatggagatcgtagttattttgatgtgtgacgttatcttaaacagatgttctggtttggatgtgtactgttatctgaaacaaatattcagaactgaaaatgttgaatctgttaaagtgcacatgttactagtttctgttattgtgcacaggttgcaaatgttcaacacatgtggccgcaatgtccacaggtttcaaatgtcccaactggacctagccctcacggacggaagtgcccaggacctgtcaatatatgccagctatgcggcgagccagagttgagcggcgtacagatttcttgcccaaaagtgtccggccactagctgccaatataataaaataagtcccgccgccactcaccaaattggccgccagggctccgtcctctagcggctccgtccggtggtccggccagctgcctagctccctccgacggtccggccagcaccgcctcctgctcgcggccttgcccagctcctccgccctccggtgagacgtagatcttggtgcggcagggcgctacgggggcggggtggtgctgttgtgcgtgtgctggtggcctggtgctagcaaccgagtactatggatcacgaatgatgtattgtatgcaattcggcccggagcgtcactaaatcctggatccgcattggccgcagggccagtggccagtgtccagcctgccagctcagcccggcggcaagcgcccagcggctggctcgggcagcggccagtggcgagcagccgactcgtttcttcggcgttctccgccactgccccccagctatgcaccctgttccagtcccctcccagccctttaccgcaactcctgcaaaaaaacttgtttcaaggagcactgctgtgaggaaggccatccattttgtcaacctgtggacagctggaaggtctagtggaaacctggctatgaactccgtaccaaaacccgcccctgggtccgaaacatctgggagggaggattttgctgtgggggataaggatgctgtggtcattgttgatcatgggtcaagacgccaagaatccaatctcatgctaaatgactttgttgagatgttccgggcgaagactagctataggattgttgagcctgctcatatggagctagcggagcctactataaaggatgcttttggaaaatgtgtgcaacaaggagcatcccgagttattatcagtccatatttcctttcccctggacgacactggaagcaagacattcctgctttagcagcagtggcatcaaaggagcactcaaatataccctatattgtcactgcccctcttgggctgcatgagcttatggtggatatcatgaatgatcgcatcaagtactgcctgcgacatgttgcgggtgatgtcgatgagtgtacagtgtgtgccggaactggaaagtgccgcatgtactcctgatggagcatacctgggaattgtttctggagaatacgagatctgacgagtgtatatctaggtccgctgtgtaccgtgaaaccaaaagcttgtacagttcattctgaacagatcgtcagaattagacaagtgccaaattagttatgctgtgcatgcttgcgaacatcaataacgattcattagctaatcttgagtttatttacgtcacgaacaaactcagtcaagtgctctgatatttccattcacatgttatctatattcctgctaccttgtagttgaattagacttattgccttaacatggatcaaatgagaatataatgtacccttgtttgatttgccagttctttttgtcatatatctgttagggacttgttctcaaatgctatgaattaaaaacaagacaacacaa

SEQ ID NO: 20586 - DNA, 1495 bp, Zea Mays
caaagtcataaatgccgctaccgcacttcgaagtgcacttacatcttctgatagtcccattcatctattatatttttgtttctttctttatagttttatgttttaattagcttacatcatcagtgttttgtctgtctgtaataatttcaactgtttctaagctcacatttcatcatcacaagcctattatgaatctgatgctagttaactgctgaaagggccagtggccagtgtccagcctgccagctcagcccggcggcaagcgcccagcggctggctcgggcagcggccagtggcgagcagccgactcgtttcttcggcgttctccgccactgccccccagctatgcaccctgttccagtcccctcccagccctttaccgcaactcctgcaaaaaaacttgtttcaaggagcactgctgtgaggaaggccatccattttgtcaacctgtggacagctggaaggtctagtggaaacctggctatgaactccgtaccaaaacccgcccctgggtccgaaacatctgggagggaggattttgctgtgggggataaggatgctgtggtcattgttgatcatgggtcaagacgccaagaatccaatctcatgctaaatgactttgttgagatgttccgggcgaagactagctataggattgttgagcctgctcatatggccagcagggaggaaggagagctgcaggggagcgagaaggaggagagctgcggggagggaggagagctgctgacggctgagagggagatagatatttgtgctggagctagcggagcctactataaaggatgcttttggaaaatgtgtgcaacaaggagcatcccgagttattatcagtccatatttcctttcccctggacgacactggaagcaagacattcctgctttagcagcagtggcatcaaaggagcactcaaatataccctatattgtcactgcccctcttgggctgcatgagcttatggtggatatcatgaatgatcgcatcaagtactgcctgcgacatgttgcgggtgatgtcgatgagtgtacagtgtgtgccggaactggaaagtgccgcatgtactcctgatggagcatacctgggaattgtttctggagaatacgagatctgacgagtgtatatctaggtccgctgtgtaccgtgaaaccaaaagcttgtacagttcattctgaacagatcgtcagaattagacaagtgccaaattagttatgctgtgcatgcttgcgaacatcaataacgattcattagctaatcttgagtttatttacgtcacgaacaaactcagtcaagtgctctgatatttccattcacatgttatctatattcctgctaccttgtagttgaattagacttattgccttaacatggatcaaatgagaatataatgtacccttgtttgatttgccagttctttttgtcatatatctgttagggacttgttctcaaatgctatgaattaaaaacaagacaacacaa

SEQ ID NO: 20587 - DNA, 2650 bp, Zea Mays
cttaaccctacacgtcatcctcatttctcagttccttatcggcgtcctcctccgacctccccacgttcgacggttcgaagcctcggagggaaaccaccaaaaattctcccaaaacccttcgctcatttggtttccatatgaaacgaccgccaaaaacttccttcccaaaaaatgaggcgccggaacctaattgtgcattctgattccgacgaggacgacggcgagggcatgaccaccgccacaacccccgcctcagtttcagcttccgtcgctagcggcggcgtaagcggcagcggaagcgtcggccggccctcgccccaaaacctcagccccctaccagtccccttcccgtcactctcgctatcttctgcccccttcgtcatctccgatgacgacgaggacgtcgacgagatcgtggaccctgacggggactctcccatcgttgacgcccctgaggtcttctccccgccagctcctcccgcgctccatgctcccgctcccgctcccccttcccctccccctcctatcactaccccgtcccagaccccaatcccgactccaccttcggcacggaccccgaccccgactccgccttcggcgcggaccccgaccccgactccgccttcggcgcggaccccggcctcaatagcgcctccgcacccgtccccgctgagcggccggttgcgcccggtggacgagttcctgcggcggctcgggttgcttctgcggccggactggctcgagtcctgcgctgcggggattcccggcttcgacggcctcggtggtgttgaggcgcaggccaggcggtgcttcgagcagtttctcttcgccgatatgaactcttgcggtgctggggtgctgccggagggcgtcgggggcatgcacgctgagttccttgatggccccttcgtgcttcagttcctttaaaggaaaggtatcgtgaagcaccggcaggacccaaaaggtgtttaaaactatcaatgacagatggcatacgacatatatttggaatggaatacagacccatcaaagacctgacagttcttgctcctgctggtttaaagattattgtaaggaatgtacacacaaggaggggtcttcttatgctagttcctgaggctgttgagattcttggtggtgtagttgacgaattggaagcagcgcgtgccagacttgtttctgaagtaaacaaaccacctcgtggcaaaagtaaacagggtggattatctttgtcttcaagagctacgcgagctgcctggccatgtagcaccgatattacaaatggtgttgcgcaggggatctcaatgcaaagagcagttaattcctcgtatccaacaggatcaggtaatgctttccaggttggtggagctacagaaactgtggttgaagagcttgttagccctcttgtagcaaaccgtgtccaagaaatcaacatgcagggctcatatgcttctcttaccagggaaactactgaaacttctatgcatactacccatgaatatgatcccactcatatcactgaaaaaagtacagggaccgtcatggaagaacgtcctgatcctcctattctagcaaacagtgtccatgaacaaatgcagcgagtccaacctgctaacggtgcacaatcttcaaatgttggcaagatcaatcagatggaacagtctttcattctaagcggtgaaaatgaaaaaccatttacatacatatacagcatgcttattgactggggtaggcaacaggacacaaaagcctacattcaaggaaaaatcaagggtctgatcacttctgtaaaaaaatttcaatataaacaacgcaccaagtacgagctttatgtatatatagatgatgggagtttcatttcagaggccttcattgacagtgatattgtgaataacatgcttggcctttctcctggagaggttactgctgcacttgctggtgaattagagtttgcatcacccagtgaagtgaaagaaactttgaaaggatttcagaagtttttggtgaagtttgagggtatgatgcttatcgagttaaacaagaactctcctgttcctgttgttcgtgagttaaatgaaggttgctcaagttctactgcatggcttctgctcggaaggctgaaaacaatttcttctcagaagaagaccatccaaactcaggatattatggacaccactccatgattgtttcgatcctctaaaccccagcggccgattataatctttcaatgctggtgcgggtgacacaatgatgtggcatggaaggagtgctaccaaaacattctcattgagcctagaagctttcgtccatctcattcattttcgtctcattttaataaccgtagaaaaaggtcctaaatgattggcggagtagaaaggctgacggagaaagtctgacggtgagatcctgaagaccacaaccgtaatcgtcggatggctgcaatgtcagaataagtatgatagaatccgttctcgaatatttgtccgtgcccgctattttatttttggaaaaaagcgacaaataaaaaaacaacagagggagtaatttgtagtagcattaagataattgagtcctttattaatcgtgtcgatgtctaaaggaacttcggtctcatacagctagtgctatccatggccacagaacgtacacg

SEQ ID NO: 20588 - DNA, 3149 bp, Zea Mays
ctcatttctcagttccttatcggcgtcctcctccgacctccccacgttcgacggttcgaagcctcggagggaaaccaccaaaaattctcccaaaacccttcgctcatttggtttccatatgaaacgaccgccaaaaacttccttcccaaaaaatgaggcgccggaacctaattgtgcattctgattccgacgaggacgacggcgagggcatgaccaccgccacaacccccgcctcagtttcagcttccgtcgctagcggcggcgtaagcggcagcggaagcgtcggccggccctcgccccaaaacctcagccccctaccagtccccttcccgtcactctcgctatcttctgcccccttcgtcatctccgatgacgacgaggacgtcgacgagatcgtggaccctgacggggactctcccatcgttgacgcccctgaggtcttctccccgccagctcctcccgcgctccatgctcccgctcccgctcccccttcccctccccctcctatcactaccccgtcccagaccccaatcccgactccaccttcggcacggaccccgaccccgactccgccttcggcgcggaccccgaccccgactccgccttcggcgcggaccccggcctcaatagcgcctccgcacccgtccccgctgagcggccggttgcgcccggtggacgagttcctgcggcggctcgggttgcttctgcggccggactggctcgagtcctgcgctgcggggattcccggcttcgacggcctcggtggtgttgaggcgcaggccaggcggtgcttcgagcagtttctcttcgccgatatgaactcttgcggtgctggggtgctgccggagggcgtcgggggcatgcacgctgagttccttgatggccccttcgtgcttcaggttgatgaagttgtcaatatttcagttcctttaaaggaaaggtatcgtgaagcaccggcaggacccaaaaggtgtttaaaactatcaatgacagatggcatacgacatatatttggaatggaatacagacccatcaaagacctgacagttcttgctcctgctggtttaaagattattgtaaggaatgtacacacaaggaggggtcttcttatgctagttcctgaggctgttgagattcttggtggtgtagttgacgaattggaagcagcgcgtgccagacttgtttctgaagtaaacaaaccacctcgtggcaaaagtaaacagggtggattatctttgtcttcaagagctacgcgagctgcctggccatgtagcaccgatattacaaatggtgttgcgcaggggatctcaatgcaaagagcagttaattcctcgtatccaacaggatcaggtaatgctttccaggttggtggagctacagaaactgtggttgaagagcttgttagccctcttgtagcaaaccgtgtccaagaaatcaacatgcagggctcatatgcttctcttaccagggaaactactgaaacttctatgcatactacccatgaatatgatcccactcatatcactgaaaaaagtacagggaccgtcatggaagaacgtcctgatcctcctattctagcaaacagtgtccatgaacaaatgcagcgagtccaacctgctaacggtgcacaatcttcaaatgttggcaagatcaatcagatggaacagtctttcattctaagcggtgaaaatgaaaaaccatttacatacatatacagcatgcttattgactggggtaggcaacaggacacaaaagcctacattcaaggaaaaatcaagggtctgatcacttctgtaaaaaaatttcaatataaacaacgcaccaagtacgagctttatgtatatatagatgatgggagtttcatttcagaggccttcattgacagtgatattgtgaataacatgcttggcctttctcctggagaggttactgctgcacttgctggtgaattagagtttgcatcacccagtgaagtgaaagaaactttgaaaggatttcagaagtttttggtgaagtttgagggtatgatgcttatcgagttaaacaagaactctcctgttcctgttgttcgtgagttaaatgaaggttgctcaagttctactgcatggcttctgctcggaaggctgaaaacaatttcttctcagaagaagaccatccaaactcaggatattatggacaccactccatgattgtttcgatcctctaaaccccagcgggtacgcagatccgcaatgattttttgttgagccaggccattggccaaatgcatttgagaagtatggttaattaaattagctttacgatacatatatctgttggcttgtaaatcttagggctagtttggaagccacaaaaccggagaggattggagaggttaaaatccctttcttatttaaattgaataaggcctagtttggaaggctaaaacccggagaggattgaagggttaaaatccctttcttattcaattttgaataaggaggggattttagcccctctatccccttccgggtttaaggttcccaaactagcactaaaaaggggattttagcccctctaatcccctccgatttttgaatcccaaactaacccaactaacccttaatgtaattatcgttcatgtgtcctcatgccttattatggtctggaagtgcagcttggtcattgcctgctcctgacattcacagtcatctgttgtggtcttcgcagccgattataatctttcaatgctggtgcgggtgacacaatgatgtggcatggaaggagtgctaccaaaacattctcattgagcctagaagctttcgtccatctcattcattttcgtctcattttaataaccgtagaaaaaggtcctaaatgattggcggagtagaaaggctgacggagaaagtctgacggtgagatcctgaagaccacaaccgtaatcgtcggatggctgcaatgtcagaataagtatgatagaatccgttctcgaatatttgtccgtgcccgctattttatttttggaaaaaagcgacaaataaaaaaacaacagagggagtaatttgtagtagcattaagataattgagtcctttattaatcgtgtcgatgtctaaaggaacttcggtctcatacagctagtgctatccatggccacagaacgtacacg

SEQ ID NO: 20589 - DNA, 2562 bp, Zea Mays
ctccgacctccccacgttcgacggttcgaagcctcggagggaaaccaccaaaaattctcccaaaacccttcgctcatttggtttccatatgaaacgaccgccaaaaacttccttcccaaaaaatgaggcgccggaacctaattgtgcattctgattccgacgaggacgacggcgagggcatgaccaccgccacaacccccgcctcagtttcagcttccgtcgctagcggcggcgtaagcggcagcggaagcgtcggccggccctcgccccaaaacctcagccccctaccagtccccttcccgtcactctcgctatcttctgcccccttcgtcatctccgatgacgacgaggacgtcgacgagatcgtggaccctgacggggactctcccatcgttgacgcccctgaggtcttctccccgccagctcctcccgcgctccatgctcccgctcccgctcccccttcccctccccctcctatcactaccccgtcccagaccccaatcccgactccaccttcggcacggaccccgaccccgactccgccttcggcgcggaccccgaccccgactccgccttcggcgcggaccccggcctcaatagcgcctccgcacccgtccccgctgagcggccggttgcgcccggtggacgagttcctgcggcggctcgggttgcttctgcggccggactggctcgagtcctgcgctgcggggattcccggcttcgacggcctcggtggtgttgaggcgcaggccaggcggtgcttcgagcagtttctcttcgccgatatgaactcttgcggtgctggggtgctgccggagggcgtcgggggcatgcacgctgagttccttgatggccccttcgtgcttcaggttgatgaagttgtcaatatttcagttcctttaaaggaaaggtatcgtgaagcaccggcaggacccaaaaggtgtttaaaactatcaatgacagatggcatacgacatatatttggaatggaatacagacccatcaaagacctgacagttcttgctcctgctggtttaaagattattgtaaggaatgtacacacaaggaggggtcttcttatgctagttcctgaggctgttgagattcttggtggtgtagttgacgaattggaagcagcgcgtgccagacttgtttctgaagtaaacaaaccacctcgtggcaaaagtaaacagggtggattatctttgtcttcaagagctacgcgagctgcctggccatgtagcaccgatattacaaatggtgttgcgcaggggatctcaatgcaaagagcagttaattcctcgtatccaacaggatcaggtaatgctttccaggttggtggagctacagaaactgtggttgaagagcttgttagccctcttgtagcaaaccgtgtccaagaaatcaacatgcagggctcatatgcttctcttaccagggaaactactgaaacttctatgcatactacccatgaatatgatcccactcatatcactgaaaaaagtacagggaccgtcatggaagaacgtcctgatcctcctattctagcaaacagtgtccatgaacaaatgcagcgagtccaacctgctaacggtgcacaatcttcaaatgttggcaagatcaatcagatggaacagtctttcattctaagcggtgaaaatgaaaaaccatttacatacatatacagcatgcttattgactggggtaggcaacaggacacaaaagcctacattcaaggaaaaatcaagggtctgatcacttctgtaaaaaaatttcaatataaacaacgcaccaagtacgagctttatgtatatatagatgatgggagtttcatttcagaggccttcattgacagtgatagtttgcatcacccagtgaagtgaaagaaactttgaaaggatttcagaagtttttggtgaagtttgagggtatgatgcttatcgagttaaacaagaactctcctgttcctgttgttcgtgagttaaatgaaggttgctcaagttctactgcatggcttctgctcggaaggctgaaaacaatttcttctcagaagaagaccatccaaactcaggatattatggacaccactccatgattgtttcgatcctctaaaccccagcggccgattataatctttcaatgctggtgcgggtgacacaatgatgtggcatggaaggagtgctaccaaaacattctcattgagcctagaagctttcgtccatctcattcattttcgtctcattttaataaccgtagaaaaaggtcctaaatgattggcggagtagaaaggctgacggagaaagtctgacggtgagatcctgaagaccacaaccgtaatcgtcggatggctgcaatgtcagaataagtatgatagaatccgttctcgaatatttgtccgtgcccgctattttatttttggaaaaaagcgacaaataaaaaaacaacagagggagtaatttgtagtagcattaagataattgagtcctttattaatcgtgtcgatgtctaaaggaacttcggtctcatacagctagtgctatccatggccacagaacgtacacg

SEQ ID NO: 20590 - DNA, 2612 bp, Zea Mays
ctccgacctccccacgttcgacggttcgaagcctcggagggaaaccaccaaaaattctcccaaaacccttcgctcatttggtttccatatgaaacgaccgccaaaaacttccttcccaaaaaatgaggcgccggaacctaattgtgcattctgattccgacgaggacgacggcgagggcatgaccaccgccacaacccccgcctcagtttcagcttccgtcgctagcggcggcgtaagcggcagcggaagcgtcggccggccctcgccccaaaacctcagccccctaccagtccccttcccgtcactctcgctatcttctgcccccttcgtcatctccgatgacgacgaggacgtcgacgagatcgtggaccctgacggggactctcccatcgttgacgcccctgaggtcttctccccgccagctcctcccgcgctccatgctcccgctcccgctcccccttcccctccccctcctatcactaccccgtcccagaccccaatcccgactccaccttcggcacggaccccgaccccgactccgccttcggcgcggaccccgaccccgactccgccttcggcgcggaccccggcctcaatagcgcctccgcacccgtccccgctgagcggccggttgcgcccggtggacgagttcctgcggcggctcgggttgcttctgcggccggactggctcgagtcctgcgctgcggggattcccggcttcgacggcctcggtggtgttgaggcgcaggccaggcggtgcttcgagcagtttctcttcgccgatatgaactcttgcggtgctggggtgctgccggagggcgtcgggggcatgcacgctgagttccttgatggccccttcgtgcttcaggttgatgaagttgtcaatatttcagttcctttaaaggaaaggtatcgtgaagcaccggcaggacccaaaaggtgtttaaaactatcaatgacagatggcatacgacatatatttggaatggaatacagacccatcaaagacctgacagttcttgctcctgctggtttaaagattattgtaaggaatgtacacacaaggaggggtcttcttatgctagttcctgaggctgttgagattcttggtggtgtagttgacgaattggaagcagcgcgtgccagacttgtttctgaagtaaacaaaccacctcgtggcaaaagtaaacagggtggattatctttgtcttcaagagctacgcgagctgcctggccatgtagcaccgatattacaaatggtgttgcgcaggggatctcaatgcaaagagcagttaattcctcgtatccaacaggatcaggttggtggagctacagaaactgtggttgaagagcttgttagccctcttgtagcaaaccgtgtccaagaaatcaacatgcagggctcatatgcttctcttaccagggaaactactgaaacttctatgcatactacccatgaatatgatcccactcatatcactgaaaaaagtacagggaccgtcatggaagaacgtcctgatcctcctattctagcaaacagtgtccatgaacaaatgcagcgagtccaacctgctaacggtgcacaatcttcaaatgttggcaagatcaatcagatggaacagtctttcattctaagcggtgaaaatgaaaaaccatttacatacatatacagcatgcttattgactggggtaggcaacaggacacaaaagcctacattcaaggaaaaatcaagggtctgatcacttctgtaaaaaaatttcaatataaacaacgcaccaagtacgagctttatgtatatatagatgatgggagtttcatttcagaggccttcattgacagtgatattgtgaataacatgcttggcctttctcctggagaggttactgctgcacttgctggtgaattagagtttgcatcacccagtgaagtgaaagaaactttgaaaggatttcagaagtttttggtgaagtttgagggtatgatgcttatcgagttaaacaagaactctcctgttcctgttgttcgtgagttaaatgaaggttgctcaagttctactgcatggcttctgctcggaaggctgaaaacaatttcttctcagaagaagaccatccaaactcaggatattatggacaccactccatgattgtttcgatcctctaaaccccagcggccgattataatctttcaatgctggtgcgggtgacacaatgatgtggcatggaaggagtgctaccaaaacattctcattgagcctagaagctttcgtccatctcattcattttcgtctcattttaataaccgtagaaaaaggtcctaaatgattggcggagtagaaaggctgacggagaaagtctgacggtgagatcctgaagaccacaaccgtaatcgtcggatggctgcaatgtcagaataagtatgatagaatccgttctcgaatatttgtccgtgcccgctattttatttttggaaaaaagcgacaaataaaaaaacaacagagggagtaatttgtagtagcattaagataattgagtcctttattaatcgtgtcgatgtctaaaggaacttcggtctcatacagctagtgctatccatggccacagaacgtacacg

SEQ ID NO: 20591 - DNA, 2987 bp, Zea Mays
ctccgacctccccacgttcgacggttcgaagcctcggagggaaaccaccaaaaattctcccaaaacccttcgctcatttggtttccatatgaaacgaccgccaaaaacttccttcccaaaaaatgaggcgccggaacctaattgtgcattctgattccgacgaggacgacggcgagggcatgaccaccgccacaacccccgcctcagtttcagcttccgtcgctagcggcggcgtaagcggcagcggaagcgtcggccggccctcgccccaaaacctcagccccctaccagtccccttcccgtcactctcgctatcttctgcccccttcgtcatctccgatgacgacgaggacgtcgacgagatcgtggaccctgacggggactctcccatcgttgacgcccctgaggtcttctccccgccagctcctcccgcgctccatgctcccgctcccgctcccccttcccctccccctcctatcactaccccgtcccagaccccaatcccgactccaccttcggcacggaccccgaccccgactccgccttcggcgcggaccccgaccccgactccgccttcggcgcggaccccggcctcaatagcgcctccgcacccgtccccgctgagcggccggttgcgcccggtggacgagttcctgcggcggctcgggttgcttctgcggccggactggctcgagtcctgcgctgcggggattcccggcttcgacggcctcggtggtgttgaggcgcaggccaggcggtgcttcgagcagtttctcttcgccgatatgaactcttgcggtgctggggtgctgccggagggcgtcgggggcatgcacgctgagttccttgatggccccttcgtgcttcaggttgatgaagttgtcaatatttcagttcctttaaaggaaaggtatcgtgaagcaccggcaggacccaaaaggtgtttaaaactatcaatgacagatggcatacgacatatatttggaatggaatacagacccatcaaagacctgacagttcttgctcctgctggtttaaagattattgtaaggaatgtacacacaaggaggggtcttcttatgctagttcctgaggctgttgagattcttggtggtgtagttgacgaattggaagcagcgcgtgccagacttgtttctgaagtaaacaaaccacctcgtggcaaaagtaaacagggtggattatctttgtcttcaagagctacgcgagctgcctggccatgtagcaccgatattacaaatggtgttgcgcaggggatctcaatgcaaagagcagttaattcctcgtatccaacaggatcaggtaatgctttccaggttggtggagctacagaaactgtggttgaagagcttgttagccctcttgtagcaaaccgtgtccaagaaatcaacatgcagggctcatatgcttctcttaccagggaaactactgaaacttctatgcatactacccatgaatatgatcccactcatatcactgaaaaaagtacagggaccgtcatggaagaacgtcctgatcctcctattctagcaaacagtgtccatgaacaaatgcagcgagtccaacctgctaacggtgcacaatcttcaaatgttggcaagatcaatcagatggaacagtctttcattctaagcggtgaaaatgaaaaaccatttacatacatatacagcatgcttattgactggggtaggcaacaggacacaaaagcctacattcaaggaaaaatcaagggtctgatcacttctgtaaaaaaatttcaatataaacaacgcaccaagtacgagctttatgtatatatagatgatgggagtttcatttcagaggccttcattgacagtgatggtatgatgcttatcgagttaaacaagaactctcctgttcctgttgttcgtgagttaaatgaaggttgctcaagttctactgcatggcttctgctcggaaggctgaaaacaatttcttctcagaagaagaccatccaaactcaggatattatggacaccactccatgattgtttcgatcctctaaaccccagcgggtacgcagatccgcaatgattttttgttgagccaggccattggccaaatgcatttgagaagtatggttaattaaattagctttacgatacatatatctgttggcttgtaaatcttagggctagtttggaagccacaaaaccggagaggattggagaggttaaaatccctttcttatttaaattgaataaggcctagtttggaaggctaaaacccggagaggattgaagggttaaaatccctttcttattcaattttgaataaggaggggattttagcccctctatccccttccgggtttaaggttcccaaactagcactaaaaaggggattttagcccctctaatcccctccgatttttgaatcccaaactaacccaactaacccttaatgtaattatcgttcatgtgtcctcatgccttattatggtctggaagtgcagcttggtcattgcctgctcctgacattcacagtcatctgttgtggtcttcgcagccgattataatctttcaatgctggtgcgggtgacacaatgatgtggcatggaaggagtgctaccaaaacattctcattgagcctagaagctttcgtccatctcattcattttcgtctcattttaataaccgtagaaaaaggtcctaaatgattggcggagtagaaaggctgacggagaaagtctgacggtgagatcctgaagaccacaaccgtaatcgtcggatggctgcaatgtcagaataagtatgatagaatccgttctcgaatatttgtccgtgcccgctattttatttttggaaaaaagcgacaaataaaaaaacaacagagggagtaatttgtagtagcattaagataattgagtcctttattaatcgtgtcgatgtctaaaggaacttcggtctcatacagctagtgctatccatggccacagaacgtacacg

SEQ ID NO: 20592 - DNA, 1873 bp, Zea Mays
tggcccaacagattgctgtgaccccaatagtgtagaagtgtcgccaattttgaacccatctacaatactgagatctgtgccataataattctctagccttttggcttactaaatggctaattgtgcattgtttcaggaaatttcctttaaaggaaaggtatcgtgaagcaccggcaggacccaaaaggtgtttaaaactatcaatgacagatggcatacgacatatatttggaatggaatacagacccatcaaagacctgacagttcttgctcctgctggtttaaagattattgtaaggaatgtacacacaaggaggggtcttcttatgctagttcctgaggctgttgagattcttggtggtgtagttgacgaattggaagcagcgcgtgccagacttgtttctgaagtaaacaaaccacctcgtggcaaaagtaaacagggtggattatctttgtcttcaagagctacgcgagctgcctggccatgtagcaccgatattacaaatggtgttgcgcaggggatctcaatgcaaagagcagttaattcctcgtatccaacaggatcaggtaatgctttccaggttggtggagctacagaaactgtggttgaagagcttgttagccctcttgtagcaaaccgtgtccaagaaatcaacatgcagggctcatatgcttctcttaccagggaaactactgaaacttctatgcatactacccatgaatatgatcccactcatatcactgaaaaaagtacagggaccgtcatggaagaacgtcctgatcctcctattctagcaaacagtgtccatgaacaaatgcagcgagtccaacctgctaacggtgcacaatcttcaaatgttggcaagatcaatcagatggaacagtctttcattctaagcggtgaaaatgaaaaaccatttacatacatatacagcatgcttattgactggggtaggcaacaggacacaaaagcctacattcaaggaaaaatcaagggtctgatcacttctgtaaaaaaatttcaatataaacaacgcaccaagtacgagctttatgtatatatagatgatgggagtttcatttcagaggccttcattgacagtgatattgtgaataacatgcttggcctttctcctggagaggttactgctgcacttgctggtgaattagagtttgcatcacccagtgaagtgaaagaaactttgaaaggatttcagaagtttttggtgaagtttgagggtatgatgcttatcgagttaaacaagaactctcctgttcctgttgttcgtgagttaaatgaaggttgctcaagttctactgcatggcttctgctcggaaggctgaaaacaatttcttctcagaagaagaccatccaaactcaggatattatggacaccactccatgattgtttcgatcctctaaaccccagcggccgattataatctttcaatgctggtgcgggtgacacaatgatgtggcatggaaggagtgctaccaaaacattctcattgagcctagaagctttcgtccatctcattcattttcgtctcattttaataaccgtagaaaaaggtcctaaatgattggcggagtagaaaggctgacggagaaagtctgacggtgagatcctgaagaccacaaccgtaatcgtcggatggctgcaatgtcagaataagtatgatagaatccgttctcgaatatttgtccgtgcccgctattttatttttggaaaaaagcgacaaataaaaaaacaacagagggagtaatttgtagtagcattaagataattgagtcctttattaatcgtgtcgatgtctaaaggaacttcggtctcatacagctagtgctatccatggccacagaacgtacacg

SEQ ID NO: 20593 - DNA, 1877 bp, Zea Mays
ccccaatagtgtagaagtgtcgccaattttgaacccatctacaatactgagatctgtgccataataattctctagccttttggcttactaaatggctaattgtgcattgtttcaggaaatgttgatgaagttgtcaatatttcagttcctttaaaggaaaggtatcgtgaagcaccggcaggacccaaaaggtgtttaaaactatcaatgacagatggcatacgacatatatttggaatggaatacagacccatcaaagacctgacagttcttgctcctgctggtttaaagattattgtaaggaatgtacacacaaggaggggtcttcttatgctagttcctgaggctgttgagattcttggtggtgtagttgacgaattggaagcagcgcgtgccagacttgtttctgaagtaaacaaaccacctcgtggcaaaagtaaacagggtggattatctttgtcttcaagagctacgcgagctgcctggccatgtagcaccgatattacaaatggtgttgcgcaggggatctcaatgcaaagagcagttaattcctcgtatccaacaggatcaggtaatgctttccaggttggtggagctacagaaactgtggttgaagagcttgttagccctcttgtagcaaaccgtgtccaagaaatcaacatgcagggctcatatgcttctcttaccagggaaactactgaaacttctatgcatactacccatgaatatgatcccactcatatcactgaaaaaagtacagggaccgtcatggaagaacgtcctgatcctcctattctagcaaacagtgtccatgaacaaatgcagcgagtccaacctgctaacggtgcacaatcttcaaatgttggcaagatcaatcagatggaacagtctttcattctaagcggtgaaaatgaaaaaccatttacatacatatacagcatgcttattgactggggtaggcaacaggacacaaaagcctacattcaaggaaaaatcaagggtctgatcacttctgtaaaaaaatttcaatataaacaacgcaccaagtacgagctttatgtatatatagatgatgggagtttcatttcagaggccttcattgacagtgatattgtgaataacatgcttggcctttctcctggagaggttactgctgcacttgctggtgaattagagtttgcatcacccagtgaagtgaaagaaactttgaaaggatttcagaagtttttggtgaagtttgagggtatgatgcttatcgagttaaacaagaactctcctgttcctgttgttcgtgagttaaatgaaggttgctcaagttctactgcatggcttctgctcggaaggctgaaaacaatttcttctcagaagaagaccatccaaactcaggatattatggacaccactccatgattgtttcgatcctctaaaccccagcggccgattataatctttcaatgctggtgcgggtgacacaatgatgtggcatggaaggagtgctaccaaaacattctcattgagcctagaagctttcgtccatctcattcattttcgtctcattttaataaccgtagaaaaaggtcctaaatgattggcggagtagaaaggctgacggagaaagtctgacggtgagatcctgaagaccacaaccgtaatcgtcggatggctgcaatgtcagaataagtatgatagaatccgttctcgaatatttgtccgtgcccgctattttatttttggaaaaaagcgacaaataaaaaaacaacagagggagtaatttgtagtagcattaagataattgagtcctttattaatcgtgtcgatgtctaaaggaacttcggtctcatacagctagtgctatccatggccacagaacgtacacg

SEQ ID NO: 20594 - DNA, 1951 bp, Zea Mays
tgtagaagtgtcgccaattttgaacccatctacaatactgagatctgtgccataataattctctagccttttggcttactaaatggctaattgtgcattgtttcaggaaatgttgatgaagttgtcaatatttcagttcctttaaaggaaaggtatcgtgaagcaccggcaggacccaaaaggtgtttaaaactatcaatgacagatggcatacgacatatatttggaatggaatacagacccatcaaagacctgacagttcttgctcctgctggtttaaagattattgtaaggaatgtacacacaaggaggggtcttcttatgctagttcctgaggctgttgagattcttggtggtgtagttgacgaattggaagcagcgcgtgccagacttgtttctgaagtaaacaaaccacctcgtggcaaaagggtggattatctttgtcttcaagagctacgcgagctgcctggccatgtagcaccgatattacaaatggtgttgcgcaggggatctcaatgcaaagagcagttaattcctcgtatccaacaggatcaggtgacatgtagaatttgtatataattcatttggatgtcagatttgggaaatcacttacatgtttcacggtcaattaatgtatttgtttaggtaatgctttccaggttggtggagctacagaaactgtggttgaagagcttgttagccctcttgtagcaaaccgtgtccaagaaatcaacatgcagggctcatatgcttctcttaccagggaaactactgaaacttctatgcatactacccatgaatatgatcccactcatatcactgaaaaaagtacagggaccgtcatggaagaacgtcctgatcctcctattctagcaaacagtgtccatgaacaaatgcagcgagtccaacctgctaacggtgcacaatcttcaaatgttggcaagatcaatcagatggaacagtctttcattctaagcggtgaaaatgaaaaaccatttacatacatatacagcatgcttattgactggggtaggcaacaggacacaaaagcctacattcaaggaaaaatcaagggtctgatcacttctgtaaaaaaatttcaatataaacaacgcaccaagtacgagctttatgtatatatagatgatgggagtttcatttcagaggccttcattgacagtgatattgtgaataacatgcttggcctttctcctggagaggttactgctgcacttgctggtgaattagagtttgcatcacccagtgaagtgaaagaaactttgaaaggatttcagaagtttttggtgaagtttgagggtatgatgcttatcgagttaaacaagaactctcctgttcctgttgttcgtgagttaaatgaaggttgctcaagttctactgcatggcttctgctcggaaggctgaaaacaatttcttctcagaagaagaccatccaaactcaggatattatggacaccactccatgattgtttcgatcctctaaaccccagcggccgattataatctttcaatgctggtgcgggtgacacaatgatgtggcatggaaggagtgctaccaaaacattctcattgagcctagaagctttcgtccatctcattcattttcgtctcattttaataaccgtagaaaaaggtcctaaatgattggcggagtagaaaggctgacggagaaagtctgacggtgagatcctgaagaccacaaccgtaatcgtcggatggctgcaatgtcagaataagtatgatagaatccgttctcgaatatttgtccgtgcccgctattttatttttggaaaaaagcgacaaataaaaaaacaacagagggagtaatttgtagtagcattaagataattgagtcctttattaatcgtgtcgatgtctaaaggaacttcggtctcatacagctagtgctatccatggccacagaacgtacacg

SEQ ID NO: 20595 - DNA, 1753 bp, Zea Mays
gctaattgtgcattgtttcaggaaatgttgatgaagttgtcaatatttcagttcctttaaaggaaaggtatcgtgaagcaccggcaggacccaaaaggtgtttaaaactatcaatgacagatggcatacgacatatatttggaatggaatacagacccatcaaagacctgacagttcttgctcctgctggtttaaagattattgtaaggaatgtacacacaaggaggggtcttcttatgctagttcctgaggctgttgagattcttggtggtgtagttgacgaattggaagcagcgcgtgccagacttgtttctgaagtaaacaaaccacctcgtggcaaaagagctacgcgagctgcctggccatgtagcaccgatattacaaatggtgttgcgcaggggatctcaatgcaaagagcagttaattcctcgtatccaacaggatcaggtaatgctttccaggttggtggagctacagaaactgtggttgaagagcttgttagccctcttgtagcaaaccgtgtccaagaaatcaacatgcagggctcatatgcttctcttaccagggaaactactgaaacttctatgcatactacccatgaatatgatcccactcatatcactgaaaaaagtacagggaccgtcatggaagaacgtcctgatcctcctattctagcaaacagtgtccatgaacaaatgcagcgagtccaacctgctaacggtgcacaatcttcaaatgttggcaagatcaatcagatggaacagtctttcattctaagcggtgaaaatgaaaaaccatttacatacatatacagcatgcttattgactggggtaggcaacaggacacaaaagcctacattcaaggaaaaatcaagggtctgatcacttctgtaaaaaaatttcaatataaacaacgcaccaagtacgagctttatgtatatatagatgatgggagtttcatttcagaggccttcattgacagtgatattgtgaataacatgcttggcctttctcctggagaggttactgctgcacttgctggtgaattagagtttgcatcacccagtgaagtgaaagaaactttgaaaggatttcagaagtttttggtgaagtttgagggtatgatgcttatcgagttaaacaagaactctcctgttcctgttgttcgtgagttaaatgaaggttgctcaagttctactgcatggcttctgctcggaaggctgaaaacaatttcttctcagaagaagaccatccaaactcaggatattatggacaccactccatgattgtttcgatcctctaaaccccagcggccgattataatctttcaatgctggtgcgggtgacacaatgatgtggcatggaaggagtgctaccaaaacattctcattgagcctagaagctttcgtccatctcattcattttcgtctcattttaataaccgtagaaaaaggtcctaaatgattggcggagtagaaaggctgacggagaaagtctgacggtgagatcctgaagaccacaaccgtaatcgtcggatggctgcaatgtcagaataagtatgatagaatccgttctcgaatatttgtccgtgcccgctattttatttttggaaaaaagcgacaaataaaaaaacaacagagggagtaatttgtagtagcattaagataattgagtcctttattaatcgtgtcgatgtctaaaggaacttcggtctcatacagctagtgctatccatggccacagaacgtacacg

SEQ ID NO: 20596 - DNA, 799 bp, Zea Mays
cgaaacagggccttaacccattttgaaacaacaaaaattatttcacacaaaattcctatgtcccacgcaagagtaagtacacagaaccaggataaacgaatgctggattatcatacgcaaataagaatcaacagattgcattaggctacagcttttcttcctagaacagtttacatgtagtaaattaaagatatacacaattaggtcctattttgatatacagaaaatggataacacttgtcccaactttagctgctaagggatggcttgaagtacatgcaaattggcgggtcaatcctaaggattgacagtatcgcagaaggaacagtccagatcccatcaccacagatcaagccagaggcaaccgcacctgcgaagtcatcacactccttgcggttcaccctctcccagacgaaaaggataactgtcccaacaaacatgtcgatggcgaagtacgcaccgatgtagaagggaatggccatagccatcgggattgggatgaatctggagacattctttggggtgacgtccctgaggaggttgatcactagagatgcaatgaagaaaaacgagcagatcgctaggcagtgctgaggcagtgcagaaaacccttccacgccaagaattgacatctcacggaagattacagcatatggagctttgaatgcgccgtcagggttaccaatatcgaaagccgaccagtagagccaaaaggtgagtggagcaatgacacaaccaagggcggtcccgatcaactgcgacacgaacatggacctaggggaagagagtgtgaggtaac

SEQ ID NO: 20597 - DNA, 289 bp, Zea Mays
aaatgacctcatagatgttcacagtttagactcactggtttcatatatgttcagaaagctagatagtaaattttacacacattcgacccatacaaagagtcacacagttcatacatattgatttcagacaggttcaaacagacacattcaaatatttgttgttcttcttcttccttggtgtcattcacttgctgtcaggttcttcttccttggtgttattttttttgcaggctttgcattctttattgttgcaagctttgttggcgacacattcaaatatttgttgctg

SEQ ID NO: 20598 - DNA, 1185 bp, Zea Mays
cttggtatgcattagctgtctcttgcgcagtttggtctacagcagcatttgtctcttccacattttggcctctcctttttgttggtagtttggcattctctccatacttagtggtattctttcgtggtttcctcttcctcttttttgttccatttagcgaacacttgtagcttgtttctccgtgccctagctctccacatcttttgcactttctttttcctcggatcatttgtttctttgtcccccattcagcttctacagcagccacctttgcatcttttttgggttttccaccacctccaccctccaaacaacttttgatcctaagttttctctgtctaccagcaagccttttgtccagtggtgctccaacaacaaatggcaagtccacttcaggccattgtgttctgtcaggaagtggctcaatcaatcttgagtatgctttcctaaacctctcaacagaataatattcatgcacaaagtcttccatgtttacatctactgtttgttgtgctgtgatcaaagcaagagcatgttgacaaggtttacctgtttgctgccattcctcacaagtgcagtgatgcaaataagacttcaccacatgcctgttatgggtgctgctactatccaaaatctctgcagaaatgcagttagccttaacaacagatagatgtcctaatcccctagtccttgcttttaattgatgtattattgcaggaaggatccttccactaagtctttctccaataattctcctcttgttccacaacaccattaccatctgcctatacttgtcagcaagttcatgtacaggcaagtctttgaagtccttaatccaattattgaagacttctgcaagattgtttgtgatgtaatcacatttgatttctgggttgaattcactcctcctccataacagtttgtggtttttgtctagccaatccttggcatcaggggaagcctctacaacttggttgaaaaaatactgagacacctctttcctataggctcttgccgttggatacatctttgagaaaatatcaccaccaaacctcttaacaaaattattcatcaaatgcctgaagcactccctttgctcagctcgagggaacaccaccaaacctcttaacagaagtcttcctgtaacttgtccctcagctcaacagtcttcatggctggtttctt

SEQ ID NO: 20599 - DNA, 1588 bp, Zea Mays
ctctttctctgcacttgttggtgtatggcttctaagtctctgatttcttggtctagctcctcctcctgcggtgttgggctggtagccttccttttctagcacgcttgccgaaggtggttgtttgagttcaccgaatgtgggtgccaatgttggtctcttgttctcaaatgttgtgaatctagaacaaggcaacataattgttaaaagccaagaaccttcgtccttcgaagtattatctcctcggatataataatcttcagacgaaggtcatgaatttcatgccttcatgattcataagaattagaatacataaagttaatgaatgtaatatattgacccatacacatatgtatttcataatacacacatgggcattagcagaatttatattatattgataccttcggcttgttcaaaggtgttgatgcgagagcgattacaattcagcatgaacagtacagtggtactgttcatctatttataggcacgagacgcagcccgagtaaaaatacatttatgaccataacatttgttcataactgtaatataaatcattagggactagctagtcttttcctcttgagctcagcatcattttggccttcgtcaccattttaagccgaagctgtaattctttggctatagcttcggcgttcattgttatcaccctcgagctatgtcttcgtcttgaagaccttctacagagaggaagacttccatcgcgaaccgaagctccctgtaatagtcactattatgctagaaacaaatggttagtcatgtttttgaggaccttagaaagaggaaggcccccaacaaaaaggtttgttctgtattttataaaacaagatataagcgtgaaaatatcttaactataaatatataaacatttggtgaaccatttaaacctttttagaaaggatatatgtggaatatttaagactatggaataataaggttataagacacactattaaatgtttatttatgaaaaactgagataatagcctaaacggattttatgtggaaagataattaaacaaataattatccttatttttactaatgaaacacatggcttatatatttactagtcggttgcccgtgcgttgcgacggctcacaacaatacccacgtaaactatccaccaaaaagatctcaaggttttttattgattgtcttcgctctccacataatatttttttatttgactaactgatattgctgtttacttcatccaatatgtattagtacaacacaaccaatgaagggagcaattagaagagagttcacaacgactgaataaacgaacagagattatagaatgacataattccaccatatagagaccaaataagagaaagtttgtgagttcaagtttctaaaataagtcacatgaactaaaacttataaaaaagatagattaaaatatggaatagttgctaaactggatatgctccatacaaattattgtacttcgtagtaattactaacatttaaaaccaacaagtaaccgtttcttttactgttagtgcgacaaatcattgttgctccatccaattcagcaacctcaaacaccatagagttcatt

SEQ ID NO: 20600 - DNA, 586 bp, Zea Mays
ggtgaatagagtaactttatttggtataccaaagtatcgtttagcttatatacgaaactaataatactaactgagcaggatacatcaaaagtcatgagcagacaagtatgttggttgctgaagcactgtatgttttagagcacacaagttcagacagatgcattgtaaatcagaagcgctacataagacaagcccataagccatcattgatgtttgctatggaaggaaatacatcactatattagccctgtcccaatttactaccatgaatgttatgttgcaactccaaccgttcgtgatggaaagcataaaccttgacaaggtaatgactaatgagttatgacatattccctcaattttgtggtgatcgtgggttctaacaatgtgcaatgcaactgcatcttcttctgaaacaaagggaaaagtctgcataccaacacaggctcagagcatggtgagtggtggagacaaagcagatgctcaagatgctccccgtgctagccatcacgttcgttcccagtgcgatgatggcacacatcaacacactgttcgtcaagaagggcacgacgctagaccctttctctag

SEQ ID NO: 20601 - DNA, 1325 bp, Zea Mays
aggaagagagtacttgggctttcaggcgacctgcctcggcccataccgggcttggaaagcgctctggcatcacgcaacgcaactgtggccaaattacgctgcttgatgtcgagcctgtggagtggcccggaaagtggggtttcgccggcgggctgagaggagcggtagattggtggcagcggcgacctagggttccggtgagtgcatccatggcctccgaggcggcgcgacggcggcaggaggtggcggtggaggggcagcggcacctggaggagaccatcgcagccgcgttccagatcctcgtatccatgaacgacgagctctgcaacgccggtctctggtcctcctcttccgtatcggcagcagcagctgctgccgcttccgctggctcccagcaccaccaatcggctactccgccgccgccacactctgcggattccgacgctgccgacgcagggggcgcacccggccctggcgggtcgctcgacgaggcgaggcaccgctacaagtcagccgtggtggcgctgcgggactccatctctgctgtgtcgtcctgccctcagggatgctattgaccaaagttttaaaacgtgtctggggagaactaatatgcccaaggcttctggactaaagagaagcggaaggcgcctaagaaaatggacgaagggagtaattattaaggacaaagccaactggacattggttcaacagaatctgaagttgaccaggcggagattgagagattggaagagcatgcttctgctttaagaaaggaaattgaaagcaaaaacaagcaagtaaagctcctcatggatcagctccgtgacctaataactgacgtagccatgtggcagagcccttgctctgtgtgaagtgtgaactgtgaagtgtcaaagagaccctagctggacgtctggtaaaggcatattgtgcatgttgggtaactgactacttggcagttggaagggagaaatagatgggatatgactgggcttcacgaaaaaaaacataaagttttcctctctataccaactaaaattgtgttgggtcatcgatgcaaatgcacataggctgtaatatgttggatatgaatgttattttggacgagtgtagatacgcgtatcctttgaaacttgtctgattttttaccgtgacgaaattcctgtaatgctttgagaatcctgaatttctgtcatataatggcttaaatacaatgattatatttgcttcttgaacgatgaaaggaatacttaatagtgtgtttggtttgaggaatgaagatagtgtgtttggtttgaggaatgaagtaatccatcttcttctct

SEQ ID NO: 20602 - DNA, 986 bp, Zea Mays
tactgatgtgaacttgtgaagtatgtggtgctacattacgtttttttagaaaacaaccttggtttgctaaaaagaacatcattggggacctatgattgactattcccacatttgatgtcagtactctgttttttctttttctttttgaagaaacatgattactgcatgccgcatggatttagatactgtctcaatcaagacatttttttgaagaaacattttggggatgctattgaccaaagttttaaaacgtgtctggggagaactaatatgcccaaggcttctggactaaagagaagcggaaggcgcctaagaaaatggacgaagggagtaattattaaggacaaagccaactggacattggttcaacagaatctgaagttgaccaggcggagattgagagattggaagagcatgcttctgctttaagaaaggaaattgaaagcaaaaacaagcaagtaaagctcctcatggatcagctccgtgacctaataactgacgtagccatgtggcagagcccttgctctgtgtgaagtgtgaactgtgaagtgtcaaagagaccctagctggacgtctggtaaaggcatattgtgcatgttgggtaactgactacttggcagttggaagggagaaatagatgggatatgactgggcttcacgaaaaaaaacataaagttttcctctctataccaactaaaattgtgttgggtcatcgatgcaaatgcacataggctgtaatatgttggatatgaatgttattttggacgagtgtagatacgcgtatcctttgaaacttgtctgattttttaccgtgacgaaattcctgtaatgctttgagaatcctgaatttctgtcatataatggcttaaatacaatgattatatttgcttcttgaacgatgaaaggaatacttaatagtgtgtttggtttgaggaatgaagatagtgtgtttggtttgaggaatgaagtaatccatcttcttctct

SEQ ID NO: 20603 - DNA, 1077 bp, Zea Mays
aatcgacgccaaagagtgagaaagcgagcaggggaatcggaggaggaaaagcatcgggatgaggatggggtgagagagaaagggatggttgctgactcttgattaatttggcggatggagcggagccggctgccagtgtacaaattctgctggacccttgaagggcccaagcccagcaggcctcccgattccctgctgctccggcacggacccgtgcgccgctggggcccgcgtagatccgttgcgtcgcctccctctctcacgcacggtcgcacaccagactccagtactccaatgtgcaagcaaagcagcaagccagcaagcaacggttggattccttgcccccgcccggaccacggagagaggctggaccacgcaggctcctgcccctgccaatgacgcgtggggcccgcctcgctttctttacccctctaaaaagcctgccactgcggcgctcctcattccaatttccaagagagacagagagagcgtgtggatttgggggagcttcttcactggagagtggagagctccggtagcgaggcgaaggaaggaagagggaggaggggaatcagagaggtctccccgatggcggactggggccccgtgatcgtagcgacggtgctgttcgtggtcctcacgccggggctgctctgcacgctgccgggccggggccgcgtcgcagagttcggcagcatgcacaccagcggcctggccatcctcgtccacgccgtcctctacttcgcgctcatcaccatcttcctcatcgccatcggcatccacgtctacgcgggctagtagccgcccggagcaggatgcgatatacggagtagtaggttgcgccgccgccgtgatccagatcaagatctgtttttttttctttgttccttttcgctctctctctctctctgccctcctcctcggatttgctgccagtatggacgaaatcattgattatggtctggacgtctgcttgtaatcaatcatgacttgtgtaatcttgcttgcggccatcagtatcgatcaaatatcaatcgcgctcattccatattttttttaatttgaattgcttcttcg

SEQ ID NO: 20604 - DNA, 837 bp, Zea Mays
ctctttaactaaaatagcccatgtggcctttgtcatatttagcggacactatttgcaataatgtgttagatacttctgctactgcccaagaaaaaaaagtaatgcaattgacttgttttattctttgtttacaggatgcaataatataatgcttgcctatttcttttttatatttgcgtacttaggttacatcaaaatatggaaagaagtctttcagttttatattaatcttttcgtttatcctgaaaaaaatgacttccacattttaaggtggcacctaaagcatgtggacatactgaaggaaggaaagtcatatcaagggaggaagctgtcatgcacataaaagctgctgtagatgctaggaaagagagtggctctgacattgttattgtagcaaggacagattctcgccaagctatttctcatgatgaagcattatggagggtgaaagcatttgctgatgctggagcagatgttctatttattgatgcccttgcttcagtagaagagatgaaagcattttgtgcggttgcaccagaagttccaaagatggcaaacatgttagaaggtggtggtaaaactcccatattgagccctgctgaacttgaggaaattggtttcaggcttgtagtatatcctttatccttagttggggtatcaatgcgtgcaatgcaggatgctctagttgcgataaaagacggcggtgtacctccacctagcgtcctgccatcttttcaggagatcaaggatacattgggtttcaaccgctattataaagaagagaaacaataccaagtgttcgcgcgcactggacaagcaggttcaggcggcggcggt

SEQ ID NO: 20605 - DNA, 1889 bp, Zea Mays
atcacaaccataaaacttttccatcagatcgttctcaaagttccatacctcatcgatggggatttacatgatttagggagattccaaattccttgtataggagtaatttttttaggagttgttggagttgctctaattaagacctcctatctttcaatttggtgaacccttagggctgatttgtgacttgcccttaaggtgtattttttttcgtgcctatcctaatctcgcatgagacgagcctgcacgcagaggatggccaaaatctgcgtacgcacggagccaaacttgaagaggaatcttgcacgcgctcagtctagcccaggagctgctgcaggaattcaaacacgcgtcgttgcatataccatgggacaggcataggccacatgcacgcaaccaatcgccccatagcggtggaaaagagtgcaatatcagattcgctaaatcatcttaaattcgttcaatcttatataaaggaatatcaatattccgttggaattggatttttattctaataatcataatttaaacataaactaattaaattaatatatttatatataacatattcgtatattatcctaaatcatatgaggaagatagttatacactacacttatactataaagaagtagaaaagtgcgctataaattgtatattagaaaattagcatgtaaatctatataatcaatttttatctttcacaccacgaatttgagatagtcttatatataaaatttggaaagttgtggaatgtcacattctaaaaaataatctacttcattagttagattttaattcatcaaaataaagggaaacaaaataggcatgatactaaatggttcttttttccacggcctaattggtattaaaatattgatacatccttttctggacgaaggatgggggtactattttacaatcataaaaatgactattattgtacaatagttgccctttaagctgcctgcccgcctcatagtaactcataatttcttaatttatgcataaaataaaagaaaatttatagtctgtataacaacgatagctcatacaattggtactatagttgttttatcgtcctaaattttagctcatggggtgtttgttttggaaaatgactcatgtcactctcatctctcttttcttcacgtcatatgaaatcttacatgacattgtatataaaatcatacatgccattgcatgagatgttactctcctttttctttcctccatgccataaaaaaccttacatgacattgcataaaatcctacatgatattgcatgatacgggctataaggtctataataagaccgctgatatgtatcaatgtacttagccttatacatgtaggcatgtttgggagcaagtggaatgtaaggaattggaggactagaatcccttaatatttaaattgaatattaggggattctagcccactcaatcctctccattccacttgctcctaaacaagcccgtaatgtatgctttaatttcaaggagaaatacctccaacaaatccaatagttctctaaaaaagctctctaaacccatatttggtaagttgctaaatagctattgagagtaaaaatagtttagtccccaataattcttaatatttagagagtagttcaattttaactctagttttggtaagcccatttcctttttccttgagttatgtgcactagtgaatgatcagatcaagactctgtctccctgatggtatgcctctcactagcggtggtgagtgccaacggtctacaacaactccatcaaacttaacaagttggaactaatcacagctccatcagacatttcataggagctattaatcaggttgaatgtcgaatggcgaggagttcaactgcaaaggagaaggcttag

SEQ ID NO: 20606 - DNA, 1020 bp, Zea Mays
gttagaagctgtattttaatcgaacactaatttttaaaaattaaaaaaaccacgagtgaaattcttttacgctctcagacaaaaatagacactgatatgaaactgaaaagtagctttccaccgttctttacctcatttcttttaggcatgcaatgcaacaagccattataaagatgtttttgtcaaataactgtttcgaaatagcctaacttcaccaaaaagatgtttttgaactaaactaaatagagctttcgttgtttgatgctagatagctcaaggcttttccccttatgttaagatttgagggtgaaggaaggacgagtcagaaatcacatatacaataaattgtaggcaaactggcttatacagaagtggcatcttatagtgtgtttgattgaatatacaaggagagatggaaggaggccagccatatttttttccatgatgtttggataagggtcacatgagagcgtgaacaccggagcaatttttcctgacggcgcggtcccaaaaaaacgtgtgaccaaaaaagagctcttgcgttgcctcccaactttatccttaccctaccccctctcatcatttatcttggtgacggatcttggcggccgggagccaatgcacgtggccgccatcgtgagggtgagcataagcacaagcgcaggcgaaggcgagcgtccaggcgagcggccgaccaagtgcacatcaccggcttgtcggctgccttccgggaactccaaccaccggaccagcatcggaacgtctaagaacaatctccctggcaccagcacaagaacatccaagaacaagtatgccccaatgtaatccttatcgttgtgctactagatctggtcatttttgcttcggtgacaatggttatcattgatttgtgccatacttggtttctttgatgctatatgtggtgctattagaactgactcgggttgcctgatgctacttggtttgtgccctaatgtgaagataattgctaaatgtaaattaaaaaagaaatgttgatag

SEQ ID NO: 20607 - DNA, 6079 bp, Zea Mays
tagtattcatagttatccttgttgcaagatcaaaaatccagccccttgatcctttcactgcctatataaagagcaaaccatggggggaaaggagcaggagcagaggagtaatccttgtctcagttcttgatcaccatgtgtagcttcagttagttgtactgtgttcccttcctccaaaatcataacctggacacgccccaaatccattaatcaaggcactgaacacctgcagatcctccacttcaccgtggccagaacgcgaagaagaagtggaagtccctgaagcgaagacaacaccacctttggagtctcaggcagggtctcgtctctactttaacatctgcgggcctgagactaactcatctataaacaaagaacgcgaagaagaagtggaagtccctgaagcgaagacaacaccacctttggagtctcaggcagggtctcgtctctactttaacatctgcgggcctgagactaactcatctataaacaaaggcaagccccggtgcatgcaaccccttccttgtgtttttaaatacttttcgcacactttaagtctagtgaaatgtgcattaagtttataggagttgcttgaaaccctttgatgcattgccttccttgatatccatacccgttatagatacttcttggaagtatcaaaatttgatttacaaaaatgcttagccctgcttagatcttgtggatggaagttgtcttttgcgttaaggccttgctcaggggttatcctgaggaaagatgacttctacctgcaagaatatattttcattgggagcatggtgggatcttactgcaaagttccctgtgatgctcttttcatcctaaggaacagaaacaatcctaaggatggaaatacttaaatcgagacttgggctaggaacaggtgatgttctacccaggttgattaaggattgaatgcgtatgtaggcttgatagagcaaggactatcttagctagccgcataccctggaaatgggacagggtaagctttgcctcgggcagactaaggccagaataagataacacgaaatgggcgtggagcggtggcgggagtagcgtgtaccctccgtggcaagaggctggacggtggtgtatctgtgctctcggtttgcgtgaacctgatctggtcttaagaaccctggggtcgagttgacatatgcaaggattaagtgctacatatgtcgtgtggttagagatcctcagctgagtaaatcgattcggatcgccgttatatccccggagagtggagacttgatcactgacctgcaacctaaagtcaggacgtgaacactatggataaaaatgatgttgtcttgatgtgatgtgaaattagactagatgcaaatagagtctattaatacttaatatggcgttaaaagattgaaagtaaggactcactttagtaagctacttctgcaaaagtataagttgatttttgctaaagcgtctccttgactcctatttatccagcatacccttgagagtcttttccttagtcgggtaagacttgctgagtaattccatactcagggtttatccctttgttgtttttaggtgaggaagcgacaaatttttgttgcttttgctccaaggtggtaccaaatgaagaaaaacaagagtgaagatgcgggaggacgtggtcctccatataggatctttttgtttaaaagctatcgggaggagtttctgcctcccttgatatgtgtaataataatactcagcactcgtttatagctctggtctgtaaaaagtaacttgatcttactttctaaacaaatgtaagtttatgtaattgcttccgcatttctttacctccgatgttctgtaatgtctgcaagacgggtgaaacgttcctggtaaggtaaggaaagataccgaacttgtcaagtgacttaggaacatctacagggtgtttgatgtctgttggacaaggacaactgtaggtgggcctaattacttgggaggttccatcacaggctctgctcctcaaatatcaaaataaaagcagttcccggcaggtgggtcttcaagtggtggtggtgcaacttcatcttcttcaaccactacttcttcctcgttctctatatatatcatatataaccatgaatgctcgtgtgatgcttataaaaatgcaatataaaggtacatcgtattaagtcttgaatacaattttccttcacggtactccagaaaactagggtaggcactagttagaagtctagggttttggggtttaggtaccaaacattgcccaaatcatgccaatttttacccaaggtttctaaatatcattttaagcttatccaaaagttgggtgatttttggagtgactaattaatttctaaaatttcaggagtataggatttagcatttttattaaatactatagaaatttaggagcctaacaaaattggtctcacatttttagtattttcctggaattttctatggattttctaactctagcagaaaaaaaaggaaaaagatcaacaatgttgggcttaatctggcccgagccagccctcgataggcaaaatgcctccacgcgcgcgcgcccgcatggcgggtttgcaccgaggccctcaacggttcgaataactagcgaagaaccctatgcactatttgtttgagtcactgacaaatgcagataggcccttctacttctttttctttacaacccacgatcctcgacggcgaacagcgacaggccgagctccggcgagcttgtactggtcagaataagtaacggctagcccttccatttgctagacaccaaattcaaccctaaacgaccatttcccctcacttaattgcaagatttgagttctaaatcacactgcgcacggtgacagcgcgattactggacagcatggagcgttcccgacgatctaccccggtctagtacaattggttgggccgatgagcttcaaggacatatcagagaactgaaacaaagaaaaagagagtgggaatggacctgtaactcgctggccatggtgagagtctttcacggtggcggagaactgatttgggggaagtgagcaattcggaggctctggtgaacaattggaggcaaatgctggtgctttggctgggtaactaccctatggagctcatggcgtactcaatttatagagtcagtgagcggtggtgtccaattcgaaaggattgcgttagcggccgagaagaagagatgagtcaccggtgcggttaaccgtggcactcactggctgagggctacggcggtcattggcgagctgttgcggctagtagcgacgtggttaaagggtcatggtcgtggcacgattacggcgacgatgtttacctcgacgacggccagttggccacgtcgctggtgcggtggatgagtgaccgaacgcaacagtgctccaagctcatcctcagcgacagatttttcacccggggatcgttatccgtgtttaatttgggcgtgaatggggcgatggcacgaatccgcgtgcaaggtcaccggcggtgaggaatctgcacttggcaatctgatccgaacaatgtaccatcgcgctgcccatttagtcagtctgacatagcctatttgggggcaatttgctccaaatttcgtgtggtgaccagatcaacattcttcatcaaaattgtagtttaacaaaccaactctaactttgtcacacgggttttagttaaacatccattaaatcgagctccacatggtcccaaagttgatccaatacactgctttctctgaatatcatagtcttagtctgactgccagacttcaaaccaatttaactcctaattttgcataataccaaggcttaagtacttaagcaaagttgttctcctttcctagctctacaagtttgatgtgttgaccctaggcaaattccttgtatttttagaaatgcagagctccaaagtcgttcactagttttggacttaggcatatgagaggtatacagtggctttttgcaaataagcccaaatctcatgggtttgatttgcaaatcctcaaatgtgtgaaccatacgatttgaggtgccctaataccttggtttttgcacttgggtccaaaagtgtacaaaatttgcacatagccccctagggttttaatttagggttttccaggggtcttttcatgattttcaacactttagggttttggtgctttccaagtccattaatggtgatatcttatgatcatttctaatgagttttgagattttaaacttatttaggcttcattttcactcattaagcctagtttagggtttaagtactctatcctagggtttcacacatatcaagtcacaccaatacaacttgtttgaaatttttgcctagtgaatgcactctaagtgtaacaaacacatgatatgctaatgctcatgatgttatgctcaagttttagtgacagtaacaccaaaggtgttacagaccgtgccatttgttggcttcttacacacttcttgatcttattgcaaggtcatgacagttcagatgagttgagatgtatcgagcatcagtatttattgcatttctgtaaaaaaataatttgagagtacaaagccgattttattggttataccaaacaaatggttaccactatcacaggcacaaatgatggctttattaaacatttgacaaacataccacaacttctctaatagtaccatagacatctagcttcttagctctattcttctgtataacttccaaggaagcacccacagttgacctcgagtatggcttcttggtggtgcagcgcctcttcttgacagcttcatcatggatatcctatagagaaaaatgtcaaatacatgtgagttagacttccagcaccaatatgagcatggtaaaaataattgttttgcaaacatcttattagatgtcatgcgtcaaatagttcaatacaaagataatgacgaagtgtaaggttacaaaggatgcaacaatcacatgattgagaagaaactaaccatattagctaacattaaatgtacattaacacctgaagattatatagttaatgttatataccagtgctgcagataaatatcaaagttaacatatgaatcataatctagattccagaatggcaagaaaatgtccaaagctttggtttattggaatcctggtcctagtttaataagacttgtattttgctaatactagaaagttgtagctaatctataataaaaaacatggaatctttataagagaaatgaacgaatgacactcttaggaagttaagaaagttagctaggtaatatcacatcccttcttttgttgcttcctgtgcattgttgtctaggtaagctttgtaggcttcaggtagtcgtggaagtagcgcttgcatttcgagttggcaaaaaggaatacctataaaacaaatgtatgttcttcatttgattaatcatttgaaatctgttgatacatccttgtcatggtcttgcaaattttgtaataaaatgaccgtggtcatcaggtagaactatcgcctggtgcgattagagactgtatcatggttctaagttcatatatatggtaataaagaaggaactgattgcatactgtaatgcttacaacattcctggtgtcaaaagcaaggttcctcctgaagacctatatgtagcaaaaagggctagggaagtattcccacaatccaccatcttctaaaatacacaataatcagctaaaaccattgtacgctatgtttagaagaaaagttttatattctatgattccttgtattggagaaaagaccccttattaacttttcattgcaaatctctttttttgttgttgtattatatataacgctgaagattacaacatgaggctagtcttcttaattattcagaaaagaataaataaaagcaagaaaggccatttgtttctcccaatgaaacagaatcctaaagaacagaccagagccaagcagaccaatgtttgtcaaagcagtagtaagatgacttgtataagcaaatagatgaagtgcgccttgtaaaagcagtgtaacatttttgtgtgctaattatatcgtaccatgagaaggaagaataag

SEQ ID NO: 20608 - DNA, 372 bp, Zea Mays
aaaggagcaggagcagaggagtaatccttgtctcagttcttgatcaccatgtgtagcttcagttagttgtactgtgttcccttcctccaaaatcataacctggacacgccccaaatccattaatcaaggcactgaacacctgcagatcctccacttcaccgtggccagaaaagaataaataaaagcaagaaaggccatttgtttctcccaatgaaacagaatcctaaagaacagaccagagccaagcagaccaatgtttgtcaaagcagtagtaagatgacttgtataagcaaatagatgaagtgcgccttgtaaaagcagtgtaacatttttgtgtgctaattatatcgtaccatgagaaggaagaataag

SEQ ID NO: 20609 - DNA, 5852 bp, Zea Mays
gtaatccttgtctcagttcttgatcaccatgtgtagcttcagttagttgtattgtgttcccttcctccaaaatcataacctggacacgccccaaatccattaatcaaggcactgaacacctgcagatcctccatttcaccgtggccagaacgcgaagaagaagtggaagtccctgaagcgaagacaacaccacctttggagtctcaggcagggtctcgtctctactttaacatctgcgggcctgagactaactcatctataaacaaaggcaagccccggtgcatgcaaccccttccttgtgtttttaaatacttttcgcacactttaagtctagtgaaatgtgcattaagtttataggagttgcttgaaaccctttgatgcattgccttccttgatatccatacccgttatagatacttcttggaagtatcaaaatttgatttacaaaaatgcttagccctgcttagatcttgtggatggaagttgtcttttgcgttaaggccttgctcaggggttatcctgaggaaagatgacttctacctgcaagaatatattttcattgggagcatggtgggatcttactgcaaagttccctgtgatgctcttttcatcctaaggaacagaaacaatcctaaggatggaaatacttaaatcgagacttgggctaggaacaggtgatgttctacccaggttgattaaggattgaatgcgtatgtaggcttgatagagcaaggactatcttagctagccgcataccctggaaatgggacagggtaagctttgcctcgggcagactaaggccagaataagataacacgaaatgggcgtggagcggtggcgggagtagcgtgtaccctccgtggcaagaggctggacggtggtgtatctgtgctctcggtttgcgtgaacctgatctggtcttaagaaccctggggtcgagttgacatatgcaaggattaagtgctacatatgtcgtgtggttagagatcctcagctgagtaaatcgattcggatcgccgttatatccccggagagtggagacttgatcactgacctgcaacctaaagtcaggacgtgaacactatggataaaaatgatgttgtcttgatgtgatgtgaaattagactagatgcaaatagagtctattaatacttaatatggcgttaaaagattgaaagtaaggactcactttagtaagctacttctgcaaaagtataagttgatttttgctaaagcgtctccttgactcctatttatccagcatacccttgagagtcttttccttagtcgggtaagacttgctgagtaattccatactcagggtttatccctttgttgtttttaggtgaggaagcgacaaatttttgttgcttttgctccaaggtggtaccaaatgaagaaaaacaagagtgaagatgcgggaggacgtggtcctccatataggatctttttgtttaaaagctatcgggaggagtttctgcctcccttgatatgtgtaataataatactcagcactcgtttatagctctggtctgtaaaaagtaacttgatcttactttctaaacaaatgtaagtttatgtaattgcttccgcatttctttacctccgatgttctgtaatgtctgcaagacgggtgaaacgttcctggtaaggtaaggaaagataccgaacttgtcaagtgacttaggaacatctacagggtgtttgatgtctgttggacaaggacaactgtaggtgggcctaattacttgggaggttccatcacaggctctgctcctcaaatatcaaaataaaagcagttcccggcaggtgggtcttcaagtggtggtggtgcaacttcatcttcttcaaccactacttcttcctcgttctctatatatatcatatataaccatgaatgctcgtgtgatgcttataaaaatgcaatataaaggtacatcgtattaagtcttgaatacaattttccttcacggtactccagaaaactagggtaggcactagttagaagtctagggttttggggtttaggtaccaaacattgcccaaatcatgccaatttttacccaaggtttctaaatatcattttaagcttatccaaaagttgggtgatttttggagtgactaattaatttctaaaatttcaggagtataggatttagcatttttattaaatactatagaaatttaggagcctaacaaaattggtctcacatttttagtattttcctggaattttctatggattttctaactctagcagaaaaaaaaggaaaaagatcaacaatgttgggcttaatctggcccgagccagccctcgataggcaaaatgcctccacgcgcgcgcgcccgcatggcgggtttgcaccgaggccctcaacggttcgaataactagcgaagaaccctatgcactatttgtttgagtcactgacaaatgcagataggcccttctacttctttttctttacaacccacgatcctcgacggcgaacagcgacaggccgagctccggcgagcttgtactggtcagaataagtaacggctagcccttccatttgctagacaccaaattcaaccctaaacgaccatttcccctcacttaattgcaagatttgagttctaaatcacactgcgcacggtgacagcgcgattactggacagcatggagcgttcccgacgatctaccccggtctagtacaattggttgggccgatgagcttcaaggacatatcagagaactgaaacaaagaaaaagagagtgggaatggacctgtaactcgctggccatggtgagagtctttcacggtggcggagaactgatttgggggaagtgagcaattcggaggctctggtgaacaattggaggcaaatgctggtgctttggctgggtaactaccctatggagctcatggcgtactcaatttatagagtcagtgagcggtggtgtccaattcgaaaggattgcgttagcggccgagaagaagagatgagtcaccggtgcggttaaccgtggcactcactggctgagggctacggcggtcattggcgagctgttgcggctagtagcgacgtggttaaagggtcatggtcgtggcacgattacggcgacgatgtttacctcgacgacggccagttggccacgtcgctggtgcggtggatgagtgaccgaacgcaacagtgctccaagctcatcctcagcgacagatttttcacccggggatcgttatccgtgtttaatttgggcgtgaatggggcgatggcacgaatccgcgtgcaaggtcaccggcggtgaggaatctgcacttggcaatctgatccgaacaatgtaccatcgcgctgcccatttagtcagtctgacatagcctatttgggggcaatttgctccaaatttcgtgtggtgaccagatcaacattcttcatcaaaattgtagtttaacaaaccaactctaactttgtcacacgggttttagttaaacatccattaaatcgagctccacatggtcccaaagttgatccaatacactgctttctctgaatatcatagtcttagtctgactgccagacttcaaaccaatttaactcctaattttgcataataccaaggcttaagtacttaagcaaagttgttctcctttcctagctctacaagtttgatgtgttgaccctaggcaaattccttgtatttttagaaatgcagagctccaaagtcgttcactagttttggacttaggcatatgagaggtatacagtggctttttgcaaataagcccaaatctcatgggtttgatttgcaaatcctcaaatgtgtgaaccatacgatttgaggtgccctaataccttggtttttgcacttgggtccaaaagtgtacaaaatttgcacatagccccctagggttttaatttagggttttccaggggtcttttcatgattttcaacactttagggttttggtgctttccaagtccattaatggtgatatcttatgatcatttctaatgagttttgagattttaaacttatttaggcttcattttcactcattaagcctagtttagggtttaagtactctatcctagggtttcacacatatcaagtcacaccaatacaacttgtttgaaatttttgcctagtgaatgcactctaagtgtaacaaacacatgatatgctaatgctcatgatgttatgctcaagttttagtgacagtaacaccaaaggtgttacagaccgtgccatttgttggcttcttacacacttcttgatcttattgcaaggtcatgacagttcagatgagttgagatgtatcgagcatcagtatttattgcatttctgtaaaaaaataatttgagagtacaaagccgattttattggttataccaaacaaatggttaccactatcacaggcacaaatgatggctttattaaacatttgacaaacataccacaacttctctaatagtaccatagacatctagcttcttagctctattcttctgtataacttccaaggaagcacccacagttgacctcgagtatggcttcttggtggtgcagcgcctcttcttgacagcttcatcatggatatcctatagagaaaaatgtcaaatacatgtgagttagacttccagcaccaatatgagcatggtaaaaataattgttttgcaaacatcttattagatgtcatgcgtcaaatagttcaatacaaagataatgacgaagtgtaaggttacaaaggatgcaacaatcacatgattgagaagaaactaaccatattagctaacattaaatgtacattaacacctgaagattatatagttaatgttatataccagtgctgcagataaatatcaaagttaacatatgaatcataatctagattccagaatggcaagaaaatgtccaaagctttggtttattggaatcctggtcctagtttaataagacttgtattttgctaatactagaaagttgtagctaatctataataaaaaacatggaatctttataagagaaatgaacgaatgacactcttaggaagttaagaaagttagctaggtaatatcacatcccttcttttgttgcttcctgtgcattgttgtctaggtaagctttgtaggcttcaggtagtcgtggaagtagcgcttgcatttcgagttggcaaaaaggaatacctataaaacaaatgtatgttcttcatttgattaatcatttgaaatctgttgatacatccttgtcatggtcttgcaaattttgtaataaaatgaccgtggtcatcaggtagaactatcgcctggtgcgattagagactgtatcatggttctaagttcatatatatggtaataaagaaggaactgattgcatactgtaatgcttacaacattcctggtgtcaaaagcaaggttcctcctgaagacctatatgtagcaaaaagggctagggaagtattcccacaatccaccatcttctaaaatacacaataatcagctaaaaccattgtacgctatgtttagaagaaaagttttatattctatgattccttgtattggagaaaagaccccttattaacttttcattgcaaatctctttttttgttgttgtattatatataacgctgaagattacaacatgaggctagtcttcttaattattcagaaaagaataaataaaagcaagaaaggccatttgtttctcccaatgaaacagaatcctaaagaacagaccagagccaagcagaccaatgtttgtcaaagcagtagtaagatgacttgtataagcaaatagatgaagtgcgccttgtaaaagcagtgtaacatttttgtgtgctaattatatcgtaccatgagaaggaagaataag

SEQ ID NO: 20610 - DNA, 1907 bp, Zea Mays
aaaaaatcaagatatggtgaatttgtattgcgaacaaaatgtaatataataatatataatggtagggcagattgtgcacagattcctgatctcacatgtccctctcgctatggatgttcacttgttctgttctatagacttttctgagttttctcgttgagcaaagtagaaatgtacaagtttctctactccgaacgcatttcatggcaaaaaatcacaaatcaaaagcatactatcagcatagaggcatggttcctggggttcttgattcgaaatctccatctcatcgccatgcacacttccttctgtgcagcatcttcatattaatctcctccaacacagcaacgctatcatcagcgcaggccagcaataggtcagaggatgaccggcaagccctcctttgcttcaagtctggtctctccgggaactctgctggtgtcctaggatcatggagcaacgactcactgaacttctgcaaatgggaaggggtcacctgcagcacggccatcccaatccgcgtggcatccttgaagctaaggtcagtgcaactcagaggaaaactatcaagttgcgtagcaaatcttacttccctagtgcagatggatctctcaaacaattcgatttctggggagatacctgatgaaataggttcactacccctacttcagactctaatcctctcgaagaacctcctatcaggaactataccacctgagataggaaaacttgtgagtctcacaaaacttgccatggaccaaaacatgctttcaggaatcattccctggactattgggaatttatcaaatttggttgtcctggcactgtccacaaacagcttgtcaggtgaaatcccagccagaattggctatctccctcaactgatccagctttacctggatgacaatacgttatctggacgcataccagcacaactagtgcagtgcacaaggttggctatgttaaatttatcagtcaatagccttaatggatccataccaagtgaaatcctcagtatttcttcgctttctttggggttggacttatcaaacaacaatcttataggaacaataccatcacagattggaaaactgatcaatcttggcttactgaatgtttccagcaacaagttatctggtgaaataccatctgaacttgggcagtgtgttttattgttatcccttcagatggaaggcaacatgctcgatggggttattccacagtctctcaatacactgaagggcatacaacacatggatctctctgaaaacatcttatctggtcaaattccagatttcttcgagaacttcagtaccttagattatcttaatctatcatacaacagactagaaggaccaattccaaccagtggtatcttcacaaattctaatgcagtcatgttagaaggtaacaaggcgttatgtcaacaaattgacatatttgcattgccgatctgccacatcacatctggccttgtgctttgcaataatcaggtcatcccagtgtgtgcatcaaaatacacattgcaatatccaacccaatgtacagcataagaagcttgttcaccctttcttcagtggcatgaaacatcataaacacctgaaatgcagcgacctgtcaaatccgctgcattttggagttatataatgaacatgttgctgaacaagcaaacagaggaggctgataagctcggcctgagaggcggcgggtggtggccacgagagcaaagtgtggttgctttgcctagcagctttgactgcagtcgccagaatgcgccccgcgcctggaacggtggccggcgggtttgggaggcaccacgcttggcttggtcggccacggattggagtggccttttcccttttgcgaccgacactttgcggaggccgccggcggcgatgcgagttgagggc

SEQ ID NO: 20611 - DNA, 418 bp, Zea Mays
tgagccgacagatggtgttacaggtttataaaacccgatccccatgtgccttccgccataaccagggttgggagctagcgcaaccttgcatggatgattacgctgaagcacagcgatgagtaggagagagagaatagagccgctgcgaccacgcctcgcgttcaccatcgcccagcctctcgatcgctggggaatcgggcgagatcaccaagtcgtgcagatcgtgcgtgtggtcagcagagcaaggaagttggcgggggagacgaattgcttgccggtgcttggccgaatcctcaccgggaatcctcgggcggcactacagcgtcgaccggccgcatcgacgtcttctcgagtgcagtgaggacacgagttacctgaagatcatcctggtacctggaatctcaagtcccaggcaagt

SEQ ID NO: 20612 - DNA, 415 bp, Zea Mays
tgagccgacagatggtgttacaggtttataaaacccgatccccatgtgccttccgccataaccagggttgggagctagcgcaaccttgcatggatgattacgctgaagcacagcgatgagtaggagagagagaatagagccgctgcgaccacgcctcgcgttcaccatcgcccagcctctcgatcgctggggaatcgggcgagatcaccaagtcgtgcagatcgtgcgtgtggtcagcagagcaaggaagttggcgggggagacgaattgcttgccggtgcttggccgaatcctcaccgggaatcctcgggcggcactacagcgtcgaccggccgcatcgacgtcttctcgagtgtgaggacacgagttacctgaagatcatcctggtacctggaatctcaagtcccaggcaagt

SEQ ID NO: 20613 - DNA, 2387 bp, Zea Mays
aatcctcgggcggcactgcagcgtcgaccggccgcatcgacgtcttttcgagtggtgagaccctactaaattactcgccgtagcatccgcatagatgatccccattcaatttccgaatttagacctagaaatcggcagggttggttcgccaccaatggcgacgtcgtgccttagcgttctgtcgccggtcgggcaccgtggtgagagagagaggattgggggggagaaaaatgaagggcttgggctgttggatcatacacggacggcgccgatctaaccacgcataccccttcgctcaataggatttgggccgtagatctgagatcaagcgatcaggatttgatcatagtcattcttaatctggactgacgatctttaatccggtggtcctcatggcttaccggttcatttttaatgaagtctaatcctggccgtggaatttagatctgacggctgaagtcagcccgtaccccttcggccggggataattgcatgtgagccctcataaaactatcaaataaacccgtcgtccactcacgtggaaaactaattaaatctaggtcctgagtttcacagtttagaccctgtgttttctagaaattgtgttcgcaggccagaattaatagggatattcataattaaatcagaaaatgattttttttataaaaataaatctaggaacttgtttaattcatagttaattcattttagctccagattgagttattccagttgcaataattttgttttaatattatctttcatctagtgcttctgtttagccataaaacttgaattaaaaatgttcatttgaattaatctattctaggtgcttaacaactccagaaattcataacttgttaaccgtaactccgaatttagtaattcttgttcttatgatctcgttacgcagcttagaatattattatgtagtttgatcttatatttggtgtgatgttaattttgcatatacatgtttgtctgtattgctacgtttagcaatgaggacacaagttacctgaagatcatcctggtacctggaatctcatgtcccaggcaagttgtgcccttgatcacttctttttacccagtcatgttctgattaatcataatgatctgcataggttaattttgatgggacccaataggttaccctagtttgattatctttataccttgattaccactggactttttgggtagtacctgctattgctttatgtggttttgggtatgaagattacattattcatgattacacttttgttattagttgttatttactattcatgataagatcattatgttaattggaacatggagaaccacccgggaaaacagtgctaccacaagggtttatggacgcccttggctgattaactaggaaagctagtggaggtctaccttacccgaaaggggcaagggcagtaggggagtggtcagtgtaggaaggtccttagttgattttgctgcgatggcggtcaggcaagaaccctgcattggagcttcctataaactgtagcgggatttctgaagctagtggacctttgtaaaggcctcgtagtgttaccctgcctcgcctcctcggtagaggtgtatgggattggccgtctcttggcagatgggtaacatgacttgtgggtaaagatgcgcaacctctgcagagtgtaaaactggtatactagccgtgctcacggtcatgagcggctcggacactcacatgattaaattatggaacttaaactcaatttgtcatatgcattgcatcgcaggtgaggttgttacttttattctactaaattgggctggtatttacttatacttagtaattgctaataaaattttgaccaactttaaaagcaatgcttagctctaaccatcctctttggtaagccttacacttcacgtgagctcccacctttggcgagttcatgcacattattccccacaacttgttgagcgatgaacgtatgtgagctcactcttgctgtctcacaccccccccacaggtcaagaacaggtaccacaggatgaggcgcttggaggatgctgtgacaagttcgtgagaggtctaggtcgtcgtctcccagtcaactttgggttgctggaccgttgtctccatataatgtatttatttatttattttgtacaaaactccgattatatagtaaagatgtgacattcgatcatgtgccatgattcatcatatgtgtgagacttggtcccagcacacctggtgattatgttcgcgcacgagtcttggtgccccgaaacccgggtgtaacaattacatagacgtggttgaaatgtttcggtggtaggtcgtagtatggttgtgttcatgattttgagttagagattggtggttgacgattcgtataaattgg

SEQ ID NO: 20614 - DNA, 2390 bp, Zea Mays
cgcgcccttctctaccacgctcctctccctaccccacgcaagaaccgccgcacctcacgcccacctagagcgcccatctgctcccatgtttgttgaattgagctctccccttcccctctgctccccagccgatgctcgaccgtgtgcggccatagtcgtggcagcgccctgtgcagcagccctggcgcggcccgcatccctgcgcgataactgttcgttcgcggaatccggggaagttgcgggagaagaccttgagcagcagctgtttggagaaggcaagtgtcctctggcctatttatgtcctactcactttataattcatttccctgcattatataattaatacctaagaatttactagtcttttgttcgtcatatccttgataacctatttgggttacactgtctatgattagctttatgctagtgctctactataatcaatgaacatgatgagatttccttatgatacgttgtttatttctggatatgattatagcattatgacactaaaggaggctgagctatttcccgagtacttctccgtaaggacctattcgttggatgaccaccagggaaaacaatgcagccatgagggtggtatgagacgccctttgctaactaattagaggaactgagttgtaatttgctttgccgttgtgtcgtcaatggggctcggtgtacatcactagctctaccaagggtggtccaccccttagtactgtacatttagtaaaatctaatagtcggctatacctttggggaatctttgtaaaggctttgtagtgaatccctacctgctcacctcggaagtgaataagggccttgcaaacccgggctagagagagaatcacggcacatgggtaaattgtgcgacctctacagagtaataaaactaatatattaatcatgctcacggttaagagcggccttaggagctcctttgattagagatactatggttacggatgatgatgatgatggctttaatgatgatagttctaattatgaattctgttattttctctatgaggaagtacctttgggattataacttgggtctttatcataaaatatggcttctactagtaataaatacctaacgagctaaaagccaaccgccttgagcttaactccacataaagctagtccacctcagccaaacggggcatttactgagtacgttgatgtgtactcacccttgcttcaacacaccaggttgtcctcattgcaaccacttctcaggagaatacgaaggcacatcggaggatttctaggagttttaggactatgatgagttttagatccgagttcatggcaaacccccagtcagctgcttgtgaaggccttatcttactacgtttcgccttagcactttgacttacctgttaaattgatgactatgtggatgtcttcgacatcatgatgtaataagttaatacctctctatgttattactcgagcaatatgcaatgatgttcatttatgtaatcgctgtgtacgtgaattcttatcctaccacgtacatggttcgcattcggttttcatactgaaccgggtgtgacataatgttacctctaaattatgatcatgtattatcactattgttggattttttattgttcatgataagatcattttgttaattggaacatggagcaaccacccgggaagctaatggaggacgcctttggctgactaattaggaaagctaatggaggactaccttacccgaaaggggcaagggcggtagaggagctaccggtatagggaggttctcgggtcgatcatgatgtgatggctttacggacaacatatcatatatcacccctcaagaaaccgtagcgggttttctgaagcttgtggaactttgtaaaggcctcgtagtgctacactgcctcatctcctcggtaaagatgtgcaacctctatagagtgtaaaactgatatatcagtcgtgctcacggtcatgagcggctcggaccatcacatgagtaacttatagaattaaacttaatatgtcatttgcattgcactgtgggatttattatcaattgtgatcaattatttaattgggttggtatctacttacatttggtaattgctaataaatttttgaccaacttattaaaagtaatgctcagtcataaccactttctctttggtaagccttacacttcacatcagcccccaccgtaagtgagctcatacacattattccccacaacttgttgagcgatgaacgtatgtgagctcactcttactatactcaccccctaggtcaaggataggtaccacaagataaggagcatgaaggatgtcgcgatgagttcgtgagaggtctagaccgtcgtctcctagtcaaatatggttgcaaaggatcgtgtcgtc

SEQ ID NO: 20615 - DNA, 2167 bp, Zea Mays
cgcgcccttctctaccacgctcctctccctaccccacgcaagaaccgccgcacctcacgcccacctagagcgcccatctgctcccatgtttgttgaattgagctctccccttcccctctgctccccagccgatgctcgaccgtgtgcggccatagtcgtggcagcgccctgtgcagcagccctggcgcggcccgcatccctgcgcggtagtacgtgcccctacatggtccagctcacggcgtcggcgagatctcagtcaaccccaccccagcgcgcctctgcggtgacccgtagccagcttgcccacggctcgcggcctgcctgcgtggcggctcgtggccagccggtgcggaacttttatgcaacggctcacgtccgagctcacgcgcgctacgcactgcagcgccacgctcattgccataccagtgtcgctgccgctctcgcactcgcgtgcgcacaacgcgtcactgggtctccgtcaatgtccgtctaccactgttcacgcccatctacccccctcatgcacgttttcatcgtcaggtgcatcgttttcgtgcggcatgcgccttgcgccttgtcgtgcatcgatagtttgttttacctagagtcgctcgtgctaattaaattacttatttaattgataattatttgagtagcaaattaatcaatagtaagtaaccattttattttgcgcctgatagatgtcgatcaatataattgtgtcaaactaaatactctagttcatattcgtttagcacaaacatgatatcccttaacagtagttattgccttcgcaattcccttatcttgcgccatcgtaaatgcgagttcgatattgcgttgcgtattaaatgatttgttctattgtatggtgtattgtttccttttgttttgagaatgttgaatgtatgtttgcactcgcgtagataactgttcgttcgcggaatccggggaagttgcgggagaagaccttgagcagcagctgtttggagaaggttgtcctcattgcaaccacttctcaggagaatacgaaggcacatcggaggatttctaggagttttaggactatgatgagttttagatccgagttcatggcaaacccccagtcagctgcttgtgaaggccttatcttactacgtttcgccttagcactttgacttacctgttaaattgatgactatgtggatgtcttcgacatcatgatgtaataagttaatacctctctatgttattactcgagcaatatgcaatgatgttcatttatgtaatcgctgtgtacgtgaattcttatcctaccacgtacatggttcgcattcggttttcatactgaaccgggtgtgacataatgttacctctaaattatgatcatgtattatcactattgttggattttttattgttcatgataagatcattttgttaattggaacatggagcaaccacccgggaagctaatggaggacgcctttggctgactaattaggaaagctaatggaggactaccttacccgaaaggggcaagggcggtagaggagctaccggtatagggaggttctcgggtcgatcatgatgtgatggctttacggacaacatatcatatatcacccctcaagaaaccgtagcgggttttctgaagcttgtggaactttgtaaaggcctcgtagtgctacactgcctcatctcctcggtaaagatgtgcaacctctatagagtgtaaaactgatatatcagtcgtgctcacggtcatgagcggctcggaccatcacatgagtaacttatagaattaaacttaatatgtcatttgcattgcactgtgggatttattatcaattgtgatcaattatttaattgggttggtatctacttacatttggtaattgctaataaatttttgaccaacttattaaaagtaatgctcagtcataaccactttctctttggtaagccttacacttcacatcagcccccaccgtaagtgagctcatacacattattccccacaacttgttgagcgatgaacgtatgtgagctcactcttactatactcaccccctaggtcaaggataggtaccacaagataaggagcatgaaggatgtcgcgatgagttcgtgagaggtctagaccgtcgtctcctagtcaaatatggttgcaaaggatcgtgtcgtc

SEQ ID NO: 20616 - DNA, 2169 bp, Zea Mays
cgcgcccttctctaccacgctcctctccctaccccacgcaagaaccgccgcacctcacgcccacctagagcgcccatctgctcccatgtttgttgaattgagctctccccttcccctctgctccccagccgatgctcgaccgtgtgcggccatagtcgtggcagcgccctgtgcagcagccctggcgcggcccgcatccctgcgcggtaataactgttcgttcgcggaatccggggaagttgcgggagaagaccttgagcagcagctgtttggagaagcattatgacactaaaggaggctgagctatttcccgagtacttctccgtaaggacctattcgttggatgaccaccagggaaaacaatgcagccatgagggtggtatgagacgccctttgctaactaattagaggaactgagttgtaatttgctttgccgttgtgtcgtcaatggggctcggtgtacatcactagctctaccaagggtggtccaccccttagtactgtacatttagtaaaatctaatagtcggctatacctttggggaatctttgtaaaggctttgtagtgaatccctacctgctcacctcggaagtgaataagggccttgcaaacccgggctagagagagaatcacggcacatgggtaaattgtgcgacctctacagagtaataaaactaatatattaatcatgctcacggttaagagcggccttaggagctcctttgattagagatactatggttacggatgatgatgatgatggctttaatgatgatagttctaattatgaattctgttattttctctatgaggaagtacctttgggattataacttgggtctttatcataaaatatggcttctactagtaataaatacctaacgagctaaaagccaaccgccttgagcttaactccacataaagctagtccacctcagccaaacggggcatttactgagtacgttgatgtgtactcacccttgcttcaacacaccaggttgtcctcattgcaaccacttctcaggagaatacgaaggcacatcggaggatttctaggagttttaggactatgatgagttttagatccgagttcatggcaaacccccagtcagctgcttgtgaaggccttatcttactacgtttcgccttagcactttgacttacctgttaaattgatgactatgtggatgtcttcgacatcatgatgtaataagttaatacctctctatgttattactcgagcaatatgcaatgatgttcatttatgtaatcgctgtgtacgtgaattcttatcctaccacgtacatggttcgcattcggttttcatactgaaccgggtgtgacataatgttacctctaaattatgatcatgtattatcactattgttggattttttattgttcatgataagatcattttgttaattggaacatggagcaaccacccgggaagctaatggaggacgcctttggctgactaattaggaaagctaatggaggactaccttacccgaaaggggcaagggcggtagaggagctaccggtatagggaggttctcgggtcgatcatgatgtgatggctttacggacaacatatcatatatcacccctcaagaaaccgtagcgggttttctgaagcttgtggaactttgtaaaggcctcgtagtgctacactgcctcatctcctcggtaaagatgtgcaacctctatagagtgtaaaactgatatatcagtcgtgctcacggtcatgagcggctcggaccatcacatgagtaacttatagaattaaacttaatatgtcatttgcattgcactgtgggatttattatcaattgtgatcaattatttaattgggttggtatctacttacatttggtaattgctaataaatttttgaccaacttattaaaagtaatgctcagtcataaccactttctctttggtaagccttacacttcacatcagcccccaccgtaagtgagctcatacacattattccccacaacttgttgagcgatgaacgtatgtgagctcactcttactatactcaccccctaggtcaaggataggtaccacaagataaggagcatgaaggatgtcgcgatgagttcgtgagaggtctagaccgtcgtctcctagtcaaatatggttgcaaaggatcgtgtcgtc

SEQ ID NO: 20617 - DNA, 3099 bp, Zea Mays
ctaccacgctcctctccctaccccacgcaagaaccgccgcacctcacgcccacctagagcgcccatctgctcccatgtttgttgaattgagctctccccttcccctctgctccccagccgatgctcgaccgtgtgcggccatagtcgtggcagcgccctgtgcagcagccctggcgcggcccgcatccctgcgcggtagtacgtgcccctacatggtccagctcacggcgtcggcgagatctcagtcaaccccaccccagcgcgcctctgcggtgacccgtagccagcttgcccacggctcgcggcctgcctgcgtggcggctcgtggccagccggtgcggaacttttatgcaacggctcacgtccgagctcacgcgcgctacgcactgcagcgccacgctcattgccataccagtgtcgctgccgctctcgcactcgcgtgcgcacaacgcgtcactgggtctccgtcaatgtccgtctaccactgttcacgcccatctacccccctcatgcacgttttcatcgtcaggtgcatcgttttcgtgcggcatgcgccttgcgccttgtcgtgcatcgatagtttgttttacctagagtcgctcgtgctaattaaattacttatttaattgataattatttgagtagcaaattaatcaatagtaagtaaccattttattttgcgcctgatagatgtcgatcaatataattgtgtcaaactaaatactctagttcatattcgtttagcacaaacatgatatcccttaacagtagttattgccttcgcaattcccttatcttgcgccatcgtaaatgcgagttcgatattgcgttgcgtattaaatgatttgttctattgtatggtgtattgtttccttttgttttgagaatgttgaatgtatgtttgcactcgcgtagataactgttcgttcgcggaatccggggaagttgcgggagaagaccttgagcagcagctgtttggagaaggcaagtgtcctctggcctatttatgtcctactcactttataattcatttccctgcattatataattaatacctaagaatttactagtcttttgttcgtcatatccttgataacctatttgggttacactgtctatgattagctttatgctagtgctctactataatcaatgaacatgatgagatttccttatgatacgttgtttatttctggatatgattatagcattatgacactaaaggaggctgagctatttcccgagtacttctccgtaaggacctattcgttggatgaccaccagggaaaacaatgcagccatgagggtggtatgagacgccctttgctaactaattagaggaactgagttgtaatttgctttgccgttgtgtcgtcaatggggctcggtgtacatcactagctctaccaagggtggtccaccccttagtactgtacatttagtaaaatctaatagtcggctatacctttggggaatctttgtaaaggctttgtagtgaatccctacctgctcacctcggaagtgaataagggccttgcaaacccgggctagagagagaatcacggcacatgggtaaattgtgcgacctctacagagtaataaaactaatatattaatcatgctcacggttaagagcggccttaggagctcctttgattagagatactatggttacggatgatgatgatgatggctttaatgatgatagttctaattatgaattctgttattttctctatgaggaagtacctttgggattataacttgggtctttatcataaaatatggcttctactagtaataaatacctaacgagctaaaagccaaccgccttgagcttaactccacataaagctagtccacctcagccaaacggggcatttactgagtacgttgatgtgtactcacccttgcttcaacacaccaggttgtcctcattgcaaccacttctcaggagaatacgaaggcacatcggaggatttctaggagttttaggactatgatgagttttagatccgagttcatggcaaacccccagtcagctgcttgtgaaggccttatcttactacgtttcgccttagcactttgacttacctgttaaattgatgactatgtggatgtcttcgacatcatgatgtaataagttaatacctctctatgttattactcgagcaatatgcaatgatgttcatttatgtaatcgctgtgtacgtgaattcttatcctaccacgtacatggttcgcattcggttttcatactgaaccgggtgtgacataatgttacctctaaattatgatcatgtattatcactattgttggattttttattgttcatgataagatcattttgttaattggaacatggagcaaccacccgggaagctaatggaggacgcctttggctgactaattaggaaagctaatggaggactaccttacccgaaaggggcaagggcggtagaggagctaccggtatagggaggttctcgggtcgatcatgatgtgatggctttacggacaacatatcatatatcacccctcaagaaaccgtagcgggttttctgaagcttgtggaactttgtaaaggcctcgtagtgctacactgcctcatctcctcggtaaagatgtgcaacctctatagagtgtaaaactgatatatcagtcgtgctcacggtcatgagcggctcggaccatcacatgagtaacttatagaattaaacttaatatgtcatttgcattgcactgtgggatttattatcaattgtgatcaattatttaattgggttggtatctacttacatttggtaattgctaataaatttttgaccaacttattaaaagtaatgctcagtcataaccactttctctttggtaagccttacacttcacatcagcccccaccgtaagtgagctcatacacattattccccacaacttgttgagcgatgaacgtatgtgagctcactcttactatactcaccccctaggtcaaggataggtaccacaagataaggagcatgaaggatgtcgcgatgagttcgtgagaggtctagaccgtcgtctcctagtcaaatatggttgcaaaggatcgtgtcgtc

SEQ ID NO: 20618 - DNA, 2481 bp, Zea Mays
ctcctctccctaccccacgcaagaaccgccgcacctcacgcccacctagagcgcccatctgctcccatgtttgttgaattgagctctccccttcccctctgctccccagccgatgctcgaccgtgtgcggccatagtcgtggcagcgccctgtgcagcagccctggcgcggcccgcatccctgcgcggtagtacgtgcccctacatggtccagctcacggcgtcggcgagatctcagtcaaccccaccccagcgcgcctctgcggtgacccgtagccagcttgcccacggctcgcggcctgcctgcgtggcggctcgtggccagccggtgcggaacttttatgcaacggctcacgtccgagctcacgcgcgctacgcactgcagcgccacgctcattgccataccagtgtcgctgccgctctcgcactcgcgtgcgcacaacgcgtcactgggtctccgtcaatgtccgtctaccactgttcacgcccatctacccccctcatgcacgttttcatcgtcagataactgttcgttcgcggaatccggggaagttgcgggagaagaccttgagcagcagctgtttggagaagcattatgacactaaaggaggctgagctatttcccgagtacttctccgtaaggacctattcgttggatgaccaccagggaaaacaatgcagccatgagggtggtatgagacgccctttgctaactaattagaggaactgagttgtaatttgctttgccgttgtgtcgtcaatggggctcggtgtacatcactagctctaccaagggtggtccaccccttagtactgtacatttagtaaaatctaatagtcggctatacctttggggaatctttgtaaaggctttgtagtgaatccctacctgctcacctcggaagtgaataagggccttgcaaacccgggctagagagagaatcacggcacatgggtaaattgtgcgacctctacagagtaataaaactaatatattaatcatgctcacggttaagagcggccttaggagctcctttgattagagatactatggttacggatgatgatgatgatggctttaatgatgatagttctaattatgaattctgttattttctctatgaggaagtacctttgggattataacttgggtctttatcataaaatatggcttctactagtaataaatacctaacgagctaaaagccaaccgccttgagcttaactccacataaagctagtccacctcagccaaacggggcatttactgagtacgttgatgtgtactcacccttgcttcaacacaccaggttgtcctcattgcaaccacttctcaggagaatacgaaggcacatcggaggatttctaggagttttaggactatgatgagttttagatccgagttcatggcaaacccccagtcagctgcttgtgaaggccttatcttactacgtttcgccttagcactttgacttacctgttaaattgatgactatgtggatgtcttcgacatcatgatgtaataagttaatacctctctatgttattactcgagcaatatgcaatgatgttcatttatgtaatcgctgtgtacgtgaattcttatcctaccacgtacatggttcgcattcggttttcatactgaaccgggtgtgacataatgttacctctaaattatgatcatgtattatcactattgttggattttttattgttcatgataagatcattttgttaattggaacatggagcaaccacccgggaagctaatggaggacgcctttggctgactaattaggaaagctaatggaggactaccttacccgaaaggggcaagggcggtagaggagctaccggtatagggaggttctcgggtcgatcatgatgtgatggctttacggacaacatatcatatatcacccctcaagaaaccgtagcgggttttctgaagcttgtggaactttgtaaaggcctcgtagtgctacactgcctcatctcctcggtaaagatgtgcaacctctatagagtgtaaaactgatatatcagtcgtgctcacggtcatgagcggctcggaccatcacatgagtaacttatagaattaaacttaatatgtcatttgcattgcactgtgggatttattatcaattgtgatcaattatttaattgggttggtatctacttacatttggtaattgctaataaatttttgaccaacttattaaaagtaatgctcagtcataaccactttctctttggtaagccttacacttcacatcagcccccaccgtaagtgagctcatacacattattccccacaacttgttgagcgatgaacgtatgtgagctcactcttactatactcaccccctaggtcaaggataggtaccacaagataaggagcatgaaggatgtcgcgatgagttcgtgagaggtctagaccgtcgtctcctagtcaaatatggttgcaaaggatcgtgtcgtc

SEQ ID NO: 20619 - DNA, 1783 bp, Zea Mays
aaccgccgcacctcacgcccacctagagcgcccatctgctcccatgtttgttgaattgagctctccccttcccctctgctccccagccgatgctcgaccgtgtgcggccatagtcgtggcagcgccctgtgcagcagccctggcgcggcccgcatccctgcgcggtagtacgtgcccctacatggtccagctcacggcgtcggcgagatctcagtcaaccccaccccagcgcgcctctgcggtgacccgtagccagcttgcccacggctcgcggcctgcctgcgtggcggctcgtggccagccggtgcggaacttttatgcaacggctcacgtccgagctcacgcgcgctacgcactgcagcgccacgctcattgccataccagtgtcgctgccgctctcgcactcgcgtgcgcacaacgcgtcactgggtctccgtcaatataactgttcgttcgcggaatccggggaagttgcgggagaagaccttgagcagcagctgtttggagaagcattatgacactaaaggaggctgagctatttcccgagtacttctccgtaaggacctattcgttggatgaccaccagggaaaacaatgcagccatgagggtggttgtcctcattgcaaccacttctcaggagaatacgaaggcacatcggaggatttctaggagttttaggactatgatgagttttagatccgagttcatggcaaacccccagtcagctgcttgtgaaggccttatcttactacgtttcgccttagcactttgacttacctgttaaattgatgactatgtggatgtcttcgacatcatgatgtaataagttaatacctctctatgttattactcgagcaatatgcaatgatgttcatttatgtaatcgctgtgtacgtgaattcttatcctaccacgtacatggttcgcattcggttttcatactgaaccgggtgtgacataatgttacctctaaattatgatcatgtattatcactattgttggattttttattgttcatgataagatcattttgttaattggaacatggagcaaccacccgggaagctaatggaggacgcctttggctgactaattaggaaagctaatggaggactaccttacccgaaaggggcaagggcggtagaggagctaccggtatagggaggttctcgggtcgatcatgatgtgatggctttacggacaacatatcatatatcacccctcaagaaaccgtagcgggttttctgaagcttgtggaactttgtaaaggcctcgtagtgctacactgcctcatctcctcggtaaagatgtgcaacctctatagagtgtaaaactgatatatcagtcgtgctcacggtcatgagcggctcggaccatcacatgagtaacttatagaattaaacttaatatgtcatttgcattgcactgtgggatttattatcaattgtgatcaattatttaattgggttggtatctacttacatttggtaattgctaataaatttttgaccaacttattaaaagtaatgctcagtcataaccactttctctttggtaagccttacacttcacatcagcccccaccgtaagtgagctcatacacattattccccacaacttgttgagcgatgaacgtatgtgagctcactcttactatactcaccccctaggtcaaggataggtaccacaagataaggagcatgaaggatgtcgcgatgagttcgtgagaggtctagaccgtcgtctcctagtcaaatatggttgcaaaggatcgtgtcgtc

SEQ ID NO: 20620 - DNA, 511 bp, Zea Mays
cagcacattccatacagtgttgtccatgtaattgtagagagaacaagaacttgactggaacagcaagatatgcaagtgtaaatacccaccttggaattgaacaaagccggagggatgacatggaatctcttggatatgtactgatgtacttcttgcgaggaagccttccatggcagggcctgaaagctgggaacaaaaaacaaaagtatgaaaagatcaacgaaaggaaaattgcatttaatacacccaatatttgggaaggttggtttaatacacccaatatttcatttaatgactaaaccatgtatgcatttctcagtgtagcaaaaatgctaaatcggaattatgttatccattgggcaggttttcagtttgattatgtttttaacaggaccattctaaagtaccaacaggcacagatgaccactgctccacctcgtgcaattgctccagcagtaggaaaaagctctgggatggctcctgtgctccaaggacgagaagctactcgtgt

SEQ ID NO: 20621 - DNA, 1524 bp, Zea Mays
tttttttggtgtacggttctgccatctaccgtcgcatcgccggctacaccacgcccccgctccatccctgcagcgcgtccgcggccctccgccctcgccctcccccctccccacaaatctcgcctcctcacccaacgccatcagcgctgccctccgctccatccctgtagcgcagaccttcgccaccgtccctgcccttcctcaccgcgcaatcaccgcccttcccgacgtgcctcggccgccatccacggcatcaccttccttccccacgcgcgcgccccctcctctgtgcgtgccccgcccccgttctttgctcacccgatgccccgccacctccgccgcgatagcctcccccacgaagtgcccccgtgatgtcttccattcccttcctccctcattcgtcctgttgcagcgattgctcccagtggctcggcggcaatggaggcaccacctgacccggtcgtcccatcctgctcgacgagatcgtcggcgacatccacggtgtggttccagattttcctttgctggctgccagggctatcaatgcagctcagcgagctagccccactgccagcttagttgtcgtgacagccattggggctgcacgccgtcagtggggtgaaggcgacagctgacgagatgttggccgaagcggagaaggcaaatgtcctagctgcaaaaaaaattgatcgcctgcttcgtcgttgacctcccatgatgttggtttatgctatgactttctgaaggagaagatgaagaacatgtcgacgatgagttcgatgaccggagtctgtggagtgagaagtaaagacgatagtacccgatgacgtcctgggcaaggccgaggcaaggtgttccattactccgccatgttttatttcatttgtactactgtcgtctcctatggtttaatttcagcagtacaaacggagctcatcctatctctttggttgaagctttcccaaatatgagatttttaaaggtcgttatgatatcaaattattaataatggatctcccaggcttggtaaattagtggttctaaggaatactactaagtgatactggacttccttggtggtctgcgttcatccatccaatatggaggctccaacacatctcttcattatctgtatctggatttatctgtgtaatagcattatggtgctcctaacttccaagcttcattaaacaaggaaactgaaagtgtcagaactgcaattcatatagactagatttttatgatacattgtaactaatgcattggtaagcattactttgaatgtgtgggtttttccaggggttgagtggtatgttgtggtcagatttggcaacaatgtatctgccatcatgtgctatatcgataaattatgatacaatgtggtcagattctaggtttagttactgtttttgcgcaacctgtgtgccatctgtttaccgacaactggacaaataggacatattgcaatcggataaataacttggcactcttagtcaaaattttgattttccaatatttagaatc

SEQ ID NO: 20622 - DNA, 2815 bp, Zea Mays
tttttttggtgtacggttctgccatctaccgtcgcatcgccggctacaccacgcccccgctccatccctgcagcgcgtccgcggccctccgccctcgccctcccccctccccacaaatctcgcctcctcacccaacgccatcagcgctgccctccgctccatccctgtagcgcagaccttcgccaccgtccctgcccttcctcaccgcgcaatcaccgcccttcccgacgtgcctcggccgccatccacggcatcaccttccttccccacgcgcgcgccccctcctctgtgcgtgccccgcccccgttctttgctcacccgatgccccgccacctccgccgcgatagcctcccccacgaagtgcccccgtgatgtcttccattcccttcctccctcattcgtcctgttgcagcgattgctcccagtggctcggcggcaatggaggcaccacctgacccggtcgtcccatcctgctcgacgagatcgtcggcgacatccacggtgtggttccagattttcctttgctggctgccagggctatcaatgcagctcagcgagctagccccactgccagcttagttgtcgtgacagccattggggctgcacgccgtcagtggggtgaaggcgacagctgacgagatgttggccgaagcggagaaggcaaatgtcctagctgcaaaaaaaattgatcgcctgcttcgtcgttgacctcccatgatgttggtttatgctatgactttctgaaggagaagatgaagaacatgtcgacgatgagttcgatgaccggagtctgtggagtgaggtattttgcaaggacatgtccaatttacctcctcgtccaactctttctaaaatgtgtgcagagtacgacctcacatagatgagatactagatcgcttgatatgagtcagcttttgtttatgcttatgaagccatttctgtttcactgaagtctgtatcgtatgctttatgaactatagtgtattgcagtttacaaaagaaccaaaatataggaaactcagttaccagttagtccattcagattctgggcaacagttaacaggaacagctaacagttaacatgaacttactaggaaacccgttcacattttacataatccagttctacaaattgcagttattaaagtgccataatactacgataacaccattgaacagctcacagttctacaagtgccataatacatcacttatatcttttccttcagagtaagcttcttcacacctctcctttcaattctaggtgtgaatagagtagaaacaacctctgttgtagattgcacaggatccacaagttgctgaaaggaagatggcgttgcaccaagttgctgataggaagtgccagtggttacaagctgctgtcagcgaagtcaatggtgatggagcagtctgcgttcgttggcgcaggggcagtcagcgaaggaaaatctggaaccgcactgtggatgtcagcgacgatcttgtcgagcaggatgggacggccgggtcaggtggcacctccattgccgcctagccgccgggagcaatcgctgcaacgggaagaatgagggaggaagggaatggaagacaagaccatgatccattttcaccaacgggatatcaagcacgggggtaaaagaagttaatgagcggcaccttacggttgatgacaatagaaagggtttcaaaccagcgatgaaaacaaaactacaaacagaagagtgttataagactgcggtatcctgtacggcgtatcctctatgtcctacgggcccatgcccagtcacgcaaacgagaggagccgggagctaggacttgccggatgctccctcgtcctccatatctgcgggatggagccacccccctggataatacggaacgaggtaccgggtaccactgcagacgttttttattctcagatccggtattctacaggtccaggacgacatacaggccaccgctgctaccagtctaatactataaatccaattgcatgatttgggaagtaaagacgatagtacccgatgacgtcctgggcaaggccgaggcaaggtgttccattactccgccatgttttatttcatttgtactactgtcgtctcctatggtttaatttcagcagtacaaacggagctcatcctatctctttggttgaagctttcccaaatatgagatttttaaaggtcgttatgatatcaaattattaataatggatctcccaggcttggtaaattagtggttctaagtcgtcgaacttccaagtcctagtgtatttgtttcttcattgcaaagaaacttttctcgtttcttgggactgaaagcttaccacaacaaaggaatactactaagtgatactggacttccttggtggtctgcgttcatccatccaatatggaggctccaacacatctcttcattatctgtatctggatttatctgtgtaatagcattatggtgctcctaacttccaagcttcattaaacaaggaaactgaaagtgtcagaactgcaattcatatagactagatttttatgatacattgtaactaatgcattggtaagcattactttgaatgtgtgggtttttccaggggttgagtggtatgttgtggtcagatttggcaacaatgtatctgccatcatgtgctatatcgataaattatgatacaatgtggtcagattctaggtttagttactgtttttgcgcaacctgtgtgccatctgtttaccgacaactggacaaataggacatattgcaatcggataaataacttggcactcttagtcaaaattttgattttccaatatttagaatc

SEQ ID NO: 20623 - DNA, 2253 bp, Zea Mays
tttttttggtgtacggttctgccatctaccgtcgcatcgccggctacaccacgcccccgctccatccctgcagcgcgtccgcggccctccgccctcgccctcccccctccccacaaatctcgcctcctcacccaacgccatcagcgctgccctccgctccatccctgtagcgcagaccttcgccaccgtccctgcccttcctcaccgcgcaatcaccgcccttcccgacgtgcctcggccgccatccacggcatcaccttccttccccacgcgcgcgccccctcctctgtgcgtgccccgcccccgttctttgctcacccgatgccccgccacctccgccgcgatagcctcccccacgaagtgcccccgtgatgtcttccattcccttcctccctcattcgtcctgttgcagcgattgctcccagtggctcggcggcaatggaggcaccacctgacccggtcgtcccatcctgctcgacgagatcgtcggcgacatccacggtgtggttccagattttcctttgctggctgccagggctatcaatgcagctcagcgagctagccccactgccagcttagttgtcgtgacagccattggggctgcacgccgtcagtggggtgaaggcgacagctgacgagatgttggccgaagcggagaaggcaaatgtcctagctgcaaaaaaaattgatcgcctgcttcgtcgttgacctcccatgatgttggtttatgctatgactttctgaaggagaagatgaagaacatgtcgacgatgagttcgatgaccggagtctgtggagtgaggtgtgaatagagtagaaacaacctctgttgtagattgcacaggatccacaagttgctgaaaggaagatggcgttgcaccaagttgctgataggaagtgccagtggttacaagctgctgtcagcgaagtcaatggtgatggagcagtctgcgttcgttggcgcaggggcagtcagcgaaggaaaatctggaaccgcactgtggatgtcagcgacgatcttgtcgagcaggatgggacggccgggtcaggtggcacctccattgccgcctagccgccgggagcaatcgctgcaacgggaagaatgagggaggaagggaatggaagacaagaccatgatccattttcaccaacgggatatcaagcacgggggtaaaagaagttaatgagcggcaccttacggttgatgacaatagaaagggtttcaaaccagcgatgaaaacaaaactacaaacagaagagtgttataagactggtagcaacggtagcctgtatattgcatcccctaaatactaatttagagattcctccaaaagagtttttcccctaaataaattttatccgcagcggtatcctgtacggcgtatcctctatgtcctacgggcccatgcccagtcacgcaaacgagaggagccgggagctaggacttgccggatgctccctcgtcctccatatctgcgggatggagccacccccctggataatacggaacgaggtaccgggtaccactgcagacgttttttattctcagatccggtattctacaggtccaggacgacatacaggccaccgctgctaccagtctaatactataaatccaattgcatgatttggggtaatatttttaagaagcacagtgttcgggataatccagttcaaaaaaactcatctgattctgcttccatttttttgctatgtttcgatggaggcagaagtaaagacgatagtacccgatgacgtcctgggcaaggccgaggaatactactaagtgatactggacttccttggtggtctgcgttcatccatccaatatggaggctccaacacatctcttcattatctgtatctggatttatctgtgtaatagcattatggtgctcctaacttccaagcttcattaaacaaggaaactgaaagtgtcagaactgcaattcatatagactagatttttatgatacattgtaactaatgcattggtaagcattactttgaatgtgtgggtttttccaggggttgagtggtatgttgtggtcagatttggcaacaatgtatctgccatcatgtgctatatcgataaattatgatacaatgtggtcagattctaggtttagttactgtttttgcgcaacctgtgtgccatctgtttaccgacaactggacaaataggacatattgcaatcggataaataacttggcactcttagtcaaaattttgattttccaatatttagaatc

SEQ ID NO: 20624 - DNA, 2058 bp, Zea Mays
tttttttggtgtacggttctgccatctaccgtcgcatcgccggctacaccacgcccccgctccatccctgcagcgcgtccgcggccctccgccctcgccctcccccctccccacaaatctcgcctcctcacccaacgccatcagcgctgccctccgctccatccctgtagcgcagaccttcgccaccgtccctgcccttcctcaccgcgcaatcaccgcccttcccgacgtgcctcggccgccatccacggcatcaccttccttccccacgcgcgcgccccctcctctgtgcgtgccccgcccccgttctttgctcacccgatgccccgccacctccgccgcgatagcctcccccacgaagtgcccccgtgatgtcttccattcccttcctccctcattcgtcctgttgcagcgattgctcccagtggctcggcggcaatggaggcaccacctgacccggtcgtcccatcctgctcgacgagatcgtcggcgacatccacggtgtggttccagattttcctttgctggctgccagggctatcaatgcagctcagcgagctagccccactgccagcttagttgtcgtgacagccattggggctgcacgccgtcagtggggtgaaggcgacagctgacgagatgttggccgaagcggagaaggcaaatgtcctagctgcaaaaaaaattgatcgcctgcttcgtcgttgacctcccatgatgttggtttatgctatgactttctgaaggagaagatgaagaacatgtcgacgatgagttcgatgaccggagtctgtggagtgagaagtaaagacgatagtacccgatgacgtcctgggcaaggccgaggcaaggtgttccattactccgccatgttttatttcatttgtactactgtcgtctcctatggtttaatttcagcagtacaaacggagctcatcctatctctttggttgaagctttcccaaatatgagatttttaaaggtcgttatgatatcaaattattaataatggatctcccaggcttggtaaattagtggttctaaggtattaacactactatttttggtacatctcgatcctgtctcttgtgcattgtccatctagatatgtgagtttgtctatgtcaatagaatcatttgctgaaatgaggacacactatttatctatcaagacacttcgtaataaaggagatgattaacagtggttataaaaagtgcaatataaaccttatatatgtaaaacccactaaagtttttattttatttctctgaggttatattaattagttggttatttctcatctaagctcaataagcacaaacatggtttcagtatgtgcatggtatatcagtacattcttgcatgtcagtgtgatatagtcatgaaaacaagctaatatattatttgcttaataaaagaaaaccgagtgtgcgtattgaggccctaaacatgctgattttctacatatctttacggtcactcatacagtcgtcgaacttccaagtcctagtgtatttgtttcttcattgcaaagaaacttttctcgtttcttgggactgaaagcttaccacaacaaaggaatactactaagtgatactggacttccttggtggtctgcgttcatccatccaatatggaggctccaacacatctcttcattatctgtatctggatttatctgtgtaatagcattatggtgctcctaacttccaagcttcattaaacaaggaaactgaaagtgtcagaactgcaattcatatagactagatttttatgatacattgtaactaatgcattggtaagcattactttgaatgtgtgggtttttccaggggttgagtggtatgttgtggtcagatttggcaacaatgtatctgccatcatgtgctatatcgataaattatgatacaatgtggtcagattctaggtttagttactgtttttgcgcaacctgtgtgccatctgtttaccgacaactggacaaataggacatattgcaatcggataaataacttggcactcttagtcaaaattttgattttccaatatttagaatc

SEQ ID NO: 20625 - DNA, 2062 bp, Zea Mays
tttttttggtgtacggttctgccatctaccgtcgcatcgccggctacaccacgcccccgctccatccctgcagcgcgtccgcggccctccgccctcgccctcccccctccccacaaatctcgcctcctcacccaacgccatcagcgctgccctccgctccatccctgtagcgcagaccttcgccaccgtccctgcccttcctcaccgcgcaatcaccgcccttcccgacgtgcctcggccgccatccacggcatcaccttccttccccacgcgcgcgccccctcctctgtgcgtgccccgcccccgttctttgctcacccgatgccccgccacctccgccgcgatagcctcccccacgaagtgcccccgtgatgtcttccattcccttcctccctcattcgtcctgttgcagcgattgctcccagtggctcggcggcaatggaggcaccacctgacccggtcgtcccatcctgctcgacgagatcgtcggcgacatccacggtgtggttccagattttcctttgctggctgccagggctatcaatgcagctcagcgagctagccccactgccagcttagttgtcgtgacagccattggggctgcacgccgtcagtggggtgaaggcgacagctgacgagatgttggccgaagcggagaaggcaaatgtcctagctgcaaaaaaaattgatcgcctgcttcgtcgttgacctcccatgatgttggtttatgctatgactttctgaaggagaagatgaagaacatgtcgacgatgagttcgatgaccggagtctgtggagtgaggcagaagtaaagacgatagtacccgatgacgtcctgggcaaggccgaggcaaggtgttccattactccgccatgttttatttcatttgtactactgtcgtctcctatggtttaatttcagcagtacaaacggagctcatcctatctctttggttgaagctttcccaaatatgagatttttaaaggtcgttatgatatcaaattattaataatggatctcccaggcttggtaaattagtggttctaaggtattaacactactatttttggtacatctcgatcctgtctcttgtgcattgtccatctagatatgtgagtttgtctatgtcaatagaatcatttgctgaaatgaggacacactatttatctatcaagacacttcgtaataaaggagatgattaacagtggttataaaaagtgcaatataaaccttatatatgtaaaacccactaaagtttttattttatttctctgaggttatattaattagttggttatttctcatctaagctcaataagcacaaacatggtttcagtatgtgcatggtatatcagtacattcttgcatgtcagtgtgatatagtcatgaaaacaagctaatatattatttgcttaataaaagaaaaccgagtgtgcgtattgaggccctaaacatgctgattttctacatatctttacggtcactcatacagtcgtcgaacttccaagtcctagtgtatttgtttcttcattgcaaagaaacttttctcgtttcttgggactgaaagcttaccacaacaaaggaatactactaagtgatactggacttccttggtggtctgcgttcatccatccaatatggaggctccaacacatctcttcattatctgtatctggatttatctgtgtaatagcattatggtgctcctaacttccaagcttcattaaacaaggaaactgaaagtgtcagaactgcaattcatatagactagatttttatgatacattgtaactaatgcattggtaagcattactttgaatgtgtgggtttttccaggggttgagtggtatgttgtggtcagatttggcaacaatgtatctgccatcatgtgctatatcgataaattatgatacaatgtggtcagattctaggtttagttactgtttttgcgcaacctgtgtgccatctgtttaccgacaactggacaaataggacatattgcaatcggataaataacttggcactcttagtcaaaattttgattttccaatatttagaatc

SEQ ID NO: 20626 - DNA, 2014 bp, Zea Mays
tttttttggtgtacggttctgccatctaccgtcgcatcgccggctacaccacgcccccgctccatccctgcagcgcgtccgcggccctccgccctcgccctcccccctccccacaaatctcgcctcctcacccaacgccatcagcgctgccctccgctccatccctgtagcgcagaccttcgccaccgtccctgcccttcctcaccgcgcaatcaccgcccttcccgacgtgcctcggccgccatccacggcatcaccttccttccccacgcgcgcgccccctcctctgtgcgtgccccgcccccgttctttgctcacccgatgccccgccacctccgccgcgatagcctcccccacgaagtgcccccgtgatgtcttccattcccttcctccctcattcgtcctgttgcagcgattgctcccagtggctcggcggcaatggaggcaccacctgacccggtcgtcccatcctgctcgacgagatcgtcggcgacatccacggtgtggttccagattttcctttgctggctgccagggctatcaatgcagctcagcgagctagccccactgccagcttagttgtcgtgacagccattggggctgcacgccgtcagtggggtgaaggcgacagctgacgagatgttggccgaagcggagaaggcaaatgtcctagctgcaaaaaaaattgatcgcctgcttcgtcgttgacctcccatgatgagaagatgaagaacatgtcgacgatgagttcgatgaccggagtctgtggagtgaggtgtgaatagagtagaaacaacctctgttgtagattgcacaggatccacaagttgctgaaaggaagatggcgttgcaccaagttgctgataggaagtgccagtggttacaagctgctgtcagcgaagtcaatggtgatggagcagtctgcgttcgttggcgcaggggcagtcagcgaaggaaaatctggaaccgcactgtggatgtcagcgacgatcttgtcgagcaggatgggacggccgggtcaggtggcacctccattgccgcctagccgccgggagcaatcgctgcaacgggaagaatgagggaggaagggaatggaagacaagaccatgatccattttcaccaacgggatatcaagcacgggggtaaaagaagttaatgagcggcaccttacggttgatgacaatagaaagggtttcaaaccagcgatgaaaacaaaactacaaacagaagagtgttataagactggtagcaacggtagcctgtatattgcatcccctaaatactaatttagagattcctccaaaagagtttttcccctaaataaattttatccgcagcggtatcctgtacggcgtatcctctatgtcctacgggcccatgcccagtcacgcaaacgagaggagccgggagctaggacttgccggatgctccctcgtcctccatatctgcgggatggagccacccccctggataatacggaacgagaagtaaagacgatagtacccgatgacgtcctgggcaaggccgaggcaaggaatactactaagtgatactggacttccttggtggtctgcgttcatccatccaatatggaggctccaacacatctcttcattatctgtatctggatttatctgtgtaatagcattatggtgctcctaacttccaagcttcattaaacaaggaaactgaaagtgtcagaactgcaattcatatagactagatttttatgatacattgtaactaatgcattggtaagcattactttgaatgtgtgggtttttccaggggttgagtggtatgttgtggtcagatttggcaacaatgtatctgccatcatgtgctatatcgataaattatgatacaatgtggtcagattctaggtttagttactgtttttgcgcaacctgtgtgccatctgtttaccgacaactggacaaataggacatattgcaatcggataaataacttggcactcttagtcaaaattttgattttccaatatttagaatc

SEQ ID NO: 20627 - DNA, 2161 bp, Zea Mays
tttttttggtgtacggttctgccatctaccgtcgcatcgccggctacaccacgcccccgctccatccctgcagcgcgtccgcggccctccgccctcgccctcccccctccccacaaatctcgcctcctcacccaacgccatcagcgctgccctccgctccatccctgtagcgcagaccttcgccaccgtccctgcccttcctcaccgcgcaatcaccgcccttcccgacgtgcctcggccgccatccacggcatcaccttccttccccacgcgcgcgccccctcctctgtgcgtgccccgcccccgttctttgctcacccgatgccccgccacctccgccgcgatagcctcccccacgaagtgcccccgtgatgtcttccattcccttcctccctcattcgtcctgttgcagcgattgctcccagtggctcggcggcaatggaggcaccacctgacccggtcgtcccatcctgctcgacgagatcgtcggcgacatccacggtgtggttccagattttcctttgctggctgccagggctatcaatgcagctcagcgagctagccccactgccagcttagttgtcgtgacagccattggggctgcacgccgtcagtggggtgaaggcgacagctgacgagatgttggccgaagcggagaaggcaaatgtcctagctgcaaaaaaaattgatcgcctgcttcgtcgttgacctcccatgatgttggtttatgctatgactttctgaaggagaagatgaagaacatgtcgacgatgagttcgatgaccggagtctgtggagtgaggtgtgaatagagtagaaacaacctctgttgtagattgcacaggatccacaagttgctgaaaggaagatggcgttgcaccaagttgctgataggaagtgccagtggttacaagctgctgtcagcgaagtcaatggtgatggagcagtctgcgttcgttggcgcaggggcagtcagcgaaggaaaatctggaaccgcactgtggatgtcagcgacgatcttgtcgagcaggatgggacggccgggtcaggtggcacctccattgccgcctagccgccgggagcaatcgctgcaacgggaagaatgagggaggaagggaatggaagacaagaccatgatccattttcaccaacgggatatcaagcacgggggtaaaagaagttaatgagcggcaccttacggttgatgacaatagaaagggtttcaaaccagcgatgaaaacaaaactacaaacagaagagtgttataagactggtagcaacggtagcctgtatattgcatcccctaaatactaatttagagattcctccaaaagagtttttcccctaaataaattttatccgcagcggtatcctgtacggcgtatcctctatgtcctacgggcccatgcccagtcacgcaaacgagaggagccgggagctaggacttgccggatgctccctcgtcctccatatctgcgggatggagccacccccctggataatacggaacgaggtaccgggtaccactgcagacgttttttattctcagatccggtattctacaggtccaggacgacatacaggccaccgctgctaccagtctaatactataaatccaattgcatgatttgggaagtaaagacgatagtacccgatgacgtcctgggcaaggccgaggcaaggaatactactaagtgatactggacttccttggtggtctgcgttcatccatccaatatggaggctccaacacatctcttcattatctgtatctggatttatctgtgtaatagcattatggtgctcctaacttccaagcttcattaaacaaggaaactgaaagtgtcagaactgcaattcatatagactagatttttatgatacattgtaactaatgcattggtaagcattactttgaatgtgtgggtttttccaggggttgagtggtatgttgtggtcagatttggcaacaatgtatctgccatcatgtgctatatcgataaattatgatacaatgtggtcagattctaggtttagttactgtttttgcgcaacctgtgtgccatctgtttaccgacaactggacaaataggacatattgcaatcggataaataacttggcactcttagtcaaaattttgattttccaatatttagaatc

SEQ ID NO: 20628 - DNA, 1330 bp, Zea Mays
tttttttggtgtacggttctgccatctaccgtcgcatcgccggctacaccacgcccccgctccatccctgcagcgcgtccgcggccctccgccctcgccctcccccctccccacaaatctcgcctcctcacccaacgccatcagcgctgccctccgctccatccctgtagcgcagaccttcgccaccgtccctgcccttcctcaccgcgcaatcaccgcccttcccgacgtgcctcggccgccatccacggcatcaccttccttccccacgcgcgcgccccctcctctgtgcgtgccccgcccccgttctttgctcacccgatgccccgccacctccgccgcgatagcctcccccacgaagtgcccccgtgatgtcttccattcccttcctccctcattcgtcctgttgcagcgattgctcccagtggctcggcggcaatggaggcaccacctgacccggtcgtcccatcctgctcgacgagatcgtcggcgacatccacggtgtggttccagattttcctttgctggctgccagggctatcaatgcagctcagcgagctagccccactgccagcttagttgtcgtgacagccattggggctgcacgccgtcagtggggtgaaggcgacagctgacgagatgttggccgaagcggagaaggcaaatgtcctagctgcaaaaaaaattgatcgcctgcttcgtcgttgacctcccatgatgttggtttatgctatgactttctgaaggagaagatgaagaacatgtcgacgatgagttcgatgaccggagtctgtggagtgagaagtaaagacgatagtacccgatgacgtcctgggcaaggccgaggcaaggaatactactaagtgatactggacttccttggtggtctgcgttcatccatccaatatggaggctccaacacatctcttcattatctgtatctggatttatctgtgtaatagcattatggtgctcctaacttccaagcttcattaaacaaggaaactgaaagtgtcagaactgcaattcatatagactagatttttatgatacattgtaactaatgcattggtaagcattactttgaatgtgtgggtttttccaggggttgagtggtatgttgtggtcagatttggcaacaatgtatctgccatcatgtgctatatcgataaattatgatacaatgtggtcagattctaggtttagttactgtttttgcgcaacctgtgtgccatctgtttaccgacaactggacaaataggacatattgcaatcggataaataacttggcactcttagtcaaaattttgattttccaatatttagaatc

SEQ ID NO: 20629 - DNA, 1303 bp, Zea Mays
tttttttggtgtacggttctgccatctaccgtcgcatcgccggctacaccacgcccccgctccatccctgcagcgcgtccgcggccctccgccctcgccctcccccctccccacaaatctcgcctcctcacccaacgccatcagcgctgccctccgctccatccctgtagcgcagaccttcgccaccgtccctgcccttcctcaccgcgcaatcaccgcccttcccgacgtgcctcggccgccatccacggcatcaccttccttccccacgcgcgcgccccctcctctgtgcgtgccccgcccccgttctttgctcacccgatgccccgccacctccgccgcgatagcctcccccacgaagtgcccccgtgatgtcttccattcccttcctccctcattcgtcctgttgcagcgattgctcccagtggctcggcggcaatggaggcaccacctgacccggtcgtcccatcctgctcgacgagatcgtcggcgacatccacggtgtggttccagattttcctttgctggctgccagggctatcaatgcagctcagcgagctagccccactgccagcttagttgtcgtgacagccattggggctgcacgccgtcagtggggtgaaggcgacagctgacgagatgttggccgaagcggagaaggcaaatgtcctagctgcaaaaaaaattgatcgcctgcttcgtcgttgacctcccatgatgagaagatgaagaacatgtcgacgatgagttcgatgaccggagtctgtggagtgagaagtaaagacgatagtacccgatgacgtcctgggcaaggccgaggcaaggaatactactaagtgatactggacttccttggtggtctgcgttcatccatccaatatggaggctccaacacatctcttcattatctgtatctggatttatctgtgtaatagcattatggtgctcctaacttccaagcttcattaaacaaggaaactgaaagtgtcagaactgcaattcatatagactagatttttatgatacattgtaactaatgcattggtaagcattactttgaatgtgtgggtttttccaggggttgagtggtatgttgtggtcagatttggcaacaatgtatctgccatcatgtgctatatcgataaattatgatacaatgtggtcagattctaggtttagttactgtttttgcgcaacctgtgtgccatctgtttaccgacaactggacaaataggacatattgcaatcggataaataacttggcactcttagtcaaaattttgattttccaatatttagaatc

SEQ ID NO: 20630 - DNA, 2540 bp, Zea Mays
tttttttggtgtacggttctgccatctaccgtcgcatcgccggctacaccacgcccccgctccatccctgcagcgcgtccgcggccctccgccctcgccctcccccctccccacaaatctcgcctcctcacccaacgccatcagcgctgccctccgctccatccctgtagcgcagaccttcgccaccgtccctgcccttcctcaccgcgcaatcaccgcccttcccgacgtgcctcggccgccatccacggcatcaccttccttccccacgcgcgcgccccctcctctgtgcgtgccccgcccccgttctttgctcacccgatgccccgccacctccgccgcgatagcctcccccacgaagtgcccccgtgatgtcttccattcccttcctccctcattcgtcctgttgcagcgattgctcccagtggctcggcggcaatggaggcaccacctgacccggtcgtcccatcctgctcgacgagatcgtcggcgacatccacggtgtggttccagattttcctttgctggctgccagggctatcaatgcagctcagcgagctagccccactgccagcttagttgtcgtgacagccattggggctgcacgccgtcagtggggtgaaggcgacagctgacgagatgttggccgaagcggagaaggcaaatgtcctagctgcaaaaaaaattgatcgcctgcttcgtcgttgacctcccatgatgttggtttatgctatgactttctgaaggagaagatgaagaacatgtcgacgatgagttcgatgaccggagtctgtggagtgaggtattttgcaaggacatgtccaatttacctcctcgtccaactctttctaaaatgtgtgcagagtacgacctcacatagatgagatactagatcgcttgatatgagtcagcttttgtttatgcttatgaagccatttctgtttcactgaagtctgtatcgtatgctttatgaactatagtgtattgcagtttacaaaagaaccaaaatataggaaactcagttaccagttagtccattcagattctgggcaacagttaacaggaacagctaacagttaacatgaacttactaggaaacccgttcacattttacataatccagttctacaaattgcagttattaaagtgccataatactacgataacaccattgaacagctcacagttctacaagtgccataatacatcacttatatcttttccttcagagtaagcttcttcacacctctcctttcaattctaggtgtgaatagagtagaaacaacctctgttgtagattgcacaggatccacaagttgctgaaaggaagatggcgttgcaccaagttgctgataggaagtgccagtggttacaagctgctgtcagcgaagtcaatggtgatggagcagtctgcgttcgttggcgcaggggcagtcagcgaaggaaaatctggaaccgcactgtggatgtcagcgacgatcttgtcgagcaggatgggacggccgggtcaggtggcacctccattgccgcctagccgccgggagcaatcgctgcaacgggaagaatgagggaggaagggaatggaagacaagaccatgatccattttcaccaacgggatatcaagcacgggggtaaaagaagttaatgagcggcaccttacggttgatgacaatagaaagggtttcaaaccagcgatgaaaacaaaactacaaacagaagagtgttataagactggtagcaacgcggtatcctgtacggcgtatcctctatgtcctacgggcccatgcccagtcacgcaaacgagaggagccgggagctaggacttgccggatgctccctcgtcctccatatctgcgggatggagccacccccctggataatacggaacgaggtaccgggtaccactgcagacgttttttattctcagatccggtattctacaggtccaggacgacatacaggccaccgctgctaccagtctaatactataaatccaattgcatgatttgggaagtaaagacgatagtacccgatgacgtcctgggcaaggccgaggcaaggaatactactaagtgatactggacttccttggtggtctgcgttcatccatccaatatggaggctccaacacatctcttcattatctgtatctggatttatctgtgtaatagcattatggtgctcctaacttccaagcttcattaaacaaggaaactgaaagtgtcagaactgcaattcatatagactagatttttatgatacattgtaactaatgcattggtaagcattactttgaatgtgtgggtttttccaggggttgagtggtatgttgtggtcagatttggcaacaatgtatctgccatcatgtgctatatcgataaattatgatacaatgtggtcagattctaggtttagttactgtttttgcgcaacctgtgtgccatctgtttaccgacaactggacaaataggacatattgcaatcggataaataacttggcactcttagtcaaaattttgattttccaatatttagaatc

SEQ ID NO: 20631 - DNA, 625 bp, Zea Mays
aaattggtgcttcaagcaatggttcaaatgggtgtccttgttcctactggagatatgactgttgtcagaagaaccgctcaatttttccttaatagctttcaagagtgcctaatagcacaaaggaaggagagagaaatggcaaccgcagaactgggtttcaaaaagcaattaactaaggaggagaagtttgaaaagaggaagcagagacttgctgcaatcggagaggatcttttggcgattgctgctgatcaaccatttcgcttccctgccacatttacatttgtggtcagagcattctcagttctagatggtactgggaaaggccttcatcctaggtttcatattacagagattgctaagccgtgagtactttttgcattactagcatctgaatacttattcaaaaacacacaaagcttgcacatcttcacttattatgtactgtctatattttcatcttgaacttttctggtactgacttgaaatgtctgttaaatttgctagaaatgccaaggaattgctaagatttaatgacgctggtgttgaaatagttgtgaaggcaagtttcaacatttggtcaaagctgttaacctatctctatgatagcacatctcctaagggttag

SEQ ID NO: 20632 - DNA, 2024 bp, Zea Mays
tgaggatcctcctacgcctgaggttttgaagttcttcgagctccttaaagctttcgaagagcagttgcacgagcatacgaaagtgattgtccatgtttttgtgactcagctaatggctattaagtccaagtttgcattctcaaataactgctataaggagcttctgaacttgatcagagatgtacttctggagaatcacaagatgccaaaagagatttattagtccaagaagtttctctcgggtctcggtatgcattacgaaaaaattgatttctgtgagaataactgtatacttttctggaaggagaccgtgaatgagaagaagtgtacaatatgtggtgagcctagattcgtagaggttgaaaacgatgatggtgcggccataacgaccgaggtagcacataagaagcttcgttacatgcctcttatacctcggttgaaacgtttgtttatctcgaagaatacaaccagacacatgatgaaggaccggtgaggcgaccagagggggtgaatgggagccactacaaaattctcaacttgtgataacttcacttgtgacttgattcccaatataaccctaaaaccttaagggtctcacaaagaaccagatcgttgtgtatttcaaaccagtgttgttggaacacaccaaaacctacaaacagatgaacccaactatctgcgtttcttcagagggcgtggtagtgccggtccttagaccggcagcgccggacagggagttttcatcctttttcactcaaacttcatggttcacctcttctccctcgtatcttgttgcctgcaaaatttgagatcattctagaaaggttctgtagtccgacactgcggctctcacgcacagcgctaccgctcgatgaatttttcagacttccagaatttttactagacctttagggtcttctttggagtttcttgtgaaagtttgggttcaaatcaagtctttaagtcccattgagcttatattcttctctagaacttggttgtagcagttaatcgatccatggttgatctattcttttgcggagtgtttttggtgtccctagaggttggattgggtcagggaatcaagtcacagtgttctcgcaattcgagaatttttagtggctctcattcacccccctctggttgcctcactagtccttcaattggtatcagagtcggttaaggatttcccttttttaatcgattcgaaatccatgaaggcgacatggaacgtggtgttggcaagccaccattcttggatgggacaaactacccatactggaagatttgcatatctacgtttcttcagagtatttggtatcgagtttgggagatttgcctcgatgctacttttgatgcccacagtgctcggatcactcatattcagttggagtaacatgatttgaacaacaaagcttggaaagctttgttctcgtgcctctcactgctgagcttgagcaagttggacactttgctatggctcacgagatctggtccaccctcgaaagattccatgtgggcaatgatcatgtaaagactagactctttgagacataccggcgagagtacgagaactttgtttagttggctagagagatgattgacacgatgttctctcgattccagtcaaacgtgaacaagatgagtgccaacaaggcacatcttccctatgatgatcatgagagagcactaaagcttctacatgctctggatcggagggtttgggaggtgaaggtatcgacgatcattgagttacctaactacgagactctcaccatggacgagcttttcaacaagctcaagtccaccgagattgaccaccagacccgtgccaagattgagaaccctggtgcacacaccatggccctagtctctgtaggtggttcctctcctaacccttcacctgctatgtttgctctttcttttttgttgaccatcacagaggagcaggtgaagagccttggggatgagaagctggcacttgtggccagttggttcacatggttccacaacaaccgtatgag

SEQ ID NO: 20633 - DNA, 658 bp, Zea Mays
atttagatgtctttgtgaaatttgttgtgtgcgaatttgatggctttgtgaaactgttgtgtgcgaacttggtggctttgtgaaactgtcatgtgaaaatttgatgtctttgtggaacttttatgtgctaacttgaggcctttatgaaactattatgtgcgacttacctttgtggaattattatatatatgaacttaatagttcctaacagttgtaaattgatcacgctcattattaaagcagatgcaaagtctagatattcttacttgtttatattaaaattccgtatgcaaagtatccaaacaacatttagaatttaattctaggaattcaattacttgtataaccaaacgaaaataatggaattcaatcactttctagtcgattgaattctaaataattaaattcttggaatttatttctagccatccaaacggggtgttaggaaaattgggtttctaagctagtccgaaatggaaacgaacacggtgcatgacctcatcaggtgacaaaactaatttgtttctcatcaggagcctgcctgaacgtcacctaccaggctagcactaccagaaacgaaccaacacggaggctacaaataaacgaaagcaaacaaggatgacatcacaaacctggatccattattccttatcttctt

SEQ ID NO: 20634 - DNA, 602 bp, Zea Mays
ctcatatatatagtttctctcctgccacttttgcgagcttaccctcagcacgccgccgctacagcccgcacctcgtttcctctcccgtctccgagatgacgaagcgaaccaagaaggccggaattgttggcaaatatggaaccaggtatggtgctagcttgcgtaagcaaatcaagaagatggaggtatctcagcactccaagtatttctgtgagttctgtgggaagtttgctgtgaagaggaaagcggttgggatttggggatgcaaggactgtgggaaggtcaaggccggtggtgcttacaccatgaacactgctagtgcggtcactgtcaggagcacgatccgtcgcttgagggagcagactgaagcatgatcggtcgcttgtcaggcatactggggtccactatattggctgtgtagccgagacagtactccagcatttttgggttatgctctaggatctctaaagctagcatgatattgacgcttggttgacgccgacataaatcatcgacctctacttggttccaagtgccaacacattctacatgtctacgctgcgtagaaccaacctgagaatttcccttttcgccgccaagag

SEQ ID NO: 20635 - DNA, 2018 bp, Zea Mays
tagctgaaaggcagatctcttgccattgtgttaaaagaagtttcctgccatcctagtactggatatttctcagtttaagttgtgcttcaggcaaacaacagttaagctttggtcatagtatcttttggctgctaagtctgactttatgcctcttgcctcccttattaacacactctgggaaaaaaatgtgtaaaggccattgtgtgatagaagaatatttttgtgcgacaaaagtgctcagtctatttctaggtttccaatatcatacattcatacttttgtactgtcaagttatttgacgtacctcactagcacaacgaactacattaacctttgtttggtaccaggatatgttggaaaaatgatctttgtatcctatcattttgaattagttggttctgatgccttcctacccaacaaagcattatttatctccacaatttcatcatcaagaatatgcattgcccttttgcattgtctgttgtttgtgtaatttgcacctcttaattacctactcataccagcaggaaattgacccttgcaagagtattagtgatgaagatattcgcacgaccatccagaattctgggggtccaaaaggggctatgtttctgcccgaggtaccatttgagattcttgtgcggaagcagataggtcgcctacttgacccaagtcttcagtgtgcccagtttatctatgatgaattaatcaaaattagccacagtgcttaatcagcgaacttcagaaatttccagctcttaaaaagcggttgagtgaagtcgtttgcagtttcttgagagatggtcttcgacctgcagaaacaatgataacccatatcatcgaaatggagatggattatataaatacttcgcacccaagctttgttggaggcaccaaggttgttgaacttgcaaagcatgaagttctacctcccaaaacatcagcttcactatcaggtcgtaaggatggtactattgttggttctgagatacaattagcagccgaaagaagccaaaagtcacgtgctgttttcgcaagagatgcaatcagaagagtaacatctgaacaggcttctgtggaagcagaaacaagtctgactggtggtaatcagataggtaattcacaggttggtgagagttcaagcaaattaccctcaatcattcctctaaaagagccacccattaccttgaagccatcagaaactgagcaggatgcaacagaggtagccgttgtaaaactattgatcaaatcctactatgacattgtaagaaaaaacattgaggatgcaatcccaaaagctgtaatgcactttctggtgaaccatacaaagcgggatctgcacaacttcctaattcgcaaactatatagagagaacctgctcaatgaattgatgagggaaactgatgaagtacttatgagaaggcagcgtatccaagaaatgcttgaaattcttgaacaggcacataggacacttgaggaattcccctttgaagttgataagcttgagaagggctacaaccttactgaacatgcaactggcctgtcaaaaatccatggagtcagcggggacagcacaaatgtcatttacacatcctcccctaattgctactctccacatcgagcgtctcatatggtcctatagagcagcatgtaccagtcaccaatggagcttacctttccgcaacagtggtatgtacctgttgccaatggagcttgcctttccacaccagtgttacgcgttaccgatggagcttgcctttccgcagcagtgtatggtagtcaccaaatgacctttgatcccaattcttgaggtttttaagcaatgagcttgagagttacctgtaaattctagttttgctagggagcaaactgctttctagtagaaagctatttgctggtagagaactttaattgtgtattcttgaaattgtcacagccgacatcaatgcggtagtgaatatgggcaacaaggtagttgtatagggctatatccaacataccaatttgccctagttatc

SEQ ID NO: 20636 - DNA, 1830 bp, Zea Mays
gtaaaggccattgtgtgatagaagaatatttttgtgcgacaaaagtgctcagtctatttctaggtttccaatatcatacattcatacttttgtactgtcaagttatttgacgtacctcactagcacaacgaactacattaacctttgtttggtaccaggatatgttggaaaaatgatctttgtatcctatcattttgaattagttggttctgatgccttcctacccaacaaagcattatttatctccacaatttcatcatcaagaatatgcattgcccttttgcattgtctgttgtttgtgtaatttgcacctcttaattacctactcataccagcaggaaattgacccttgcaagagtattagtgatgaagatattcgcacgaccatccagaattctgggggtccaaaaggggctatgtttctgcccgaggtaccatttgagattcttgtgcggaagcagataggtcgcctacttgacccaagtcttcagtgtgcccagtttatctatgatgaattaatcaaagtatgtccacagtgcttaatcagcgaacttcagaaatttccagctcttaaaaagcggttgagtgaagtcgtttgcagtttcttgagagatggtcttcgacctgcagaaacaatgataacccatatcatcgaaatggagatggattatataaatacttcgcacccaagctttgttggaggcaccaaggttgttgaacttgcaaagcatgaagttctacctcccaaaacatcagcttcactatcaggtcgtaaggatggtactattgttggttctgagatacaattagcagccgaaagaagccaaaagtcacgtgctgttttcgcaagagatgcaatcagaagagtaacatctgaacaggcttctgtggaagcagaaacaagtctgactggtggtaatcagataggtaattcacaggttggtgagagttcaagcaaattaccctcaatcattcctctaaaagagccacccattaccttgaagccatcagaaactgagcaggatgcaacagaggtagccgttgtaaaactattgatcaaatcctactatgacattgtaagaaaaaacattgaggatgcaatcccaaaagctgtaatgcactttctggtgaaccatacaaagcgggatctgcacaacttcctaattcgcaaactatatagagagaacctgctcaatgaattgatgagggaaactgatgaagtacttatgagaaggcagcgtatccaagaaatgcttgaaattcttgaacaggcacataggacacttgaggaattcccctttgaagttgataagcttgagaagggctacaaccttactgaacatgcaactggcctgtcaaaaatccatggagtcagcggggacagcacaaatgtcatttacacatcctcccctaattgctactctccacatcgagcgtctcatatggtcctatagagcagcatgtaccagtcaccaatggagcttacctttccgcaacagtggtatgtacctgttgccaatggagcttgcctttccacaccagtgttacgcgttaccgatggagcttgcctttccgcagcagtgtatggtagtcaccaaatgacctttgatcccaattcttgaggtttttaagcaatgagcttgagagttacctgtaaattctagttttgctagggagcaaactgctttctagtagaaagctatttgctggtagagaactttaattgtgtattcttgaaattgtcacagccgacatcaatgcggtagtgaatatgggcaacaaggtagttgtatagggctatatccaacataccaatttgccctagttatc

SEQ ID NO: 20637 - DNA, 1405 bp, Zea Mays
cgaggtaccatttgagattcttgtgcggaagcagataggtcgcctacttgacccaagtcttcagtgtgcccagtttatctatgatgaattaatcaaagtaattagccacagtgcttaatcagcgaacttcagaaatttccagctcttaaaaagcggttgagtgaagtcgtttgcagtttcttgagagatggtcttcgacctgcagaaacaatgataacccatatcatcgaaatggagatggattatataaatacttcgcacccaagctttgttggaggcaccaaggttgttgaacttgcaaagcatgaagttctacctcccaaaacatcagcttcactatcaggtcgtaaggatggtactattgttggttctgagatacaattagcagccgaaagaagccaaaagtcacgtgctgttttcgcaagagatgcaatcagaagagtaacatctgaacaggcttctgtggaagcagaaacaagtctgactggtggtaatcagataggtaattcacaggttggtgagagttcaagcaaattaccctcaatcattcctctaaaagagccacccattaccttgaagccatcagaaactgagcaggatgcaacagaggtagccgttgtaaaactattgatcaaatcctactatgacattgtaagaaaaaacattgaggatgcaatcccaaaagctgtaatgcactttctggtgaaccatacaaagcgggatctgcacaacttcctaattcgcaaactatatagagagaacctgctcaatgaattgatgagggaaactgatgaagtacttatgagaaggcagcgtatccaagaaatgcttgaaattcttgaacaggcacataggacacttgaggaattcccctttgaagttgataagcttgagaagggctacaaccttactgaacatgcaactggcctgtcaaaaatccatggagtcagcggggacagcacaaatgtcatttacacatcctcccctaattgctactctccacatcgagcgtctcatatggtcctatagagcagcatgtaccagtcaccaatggagcttacctttccgcaacagtggtatgtacctgttgccaatggagcttgcctttccacaccagtgttacgcgttaccgatggagcttgcctttccgcagcagtgtatggtagtcaccaaatgacctttgatcccaattcttgaggtttttaagcaatgagcttgagagttacctgtaaattctagttttgctagggagcaaactgctttctagtagaaagctatttgctggtagagaactttaattgtgtattcttgaaattgtcacagccgacatcaatgcggtagtgaatatgggcaacaaggtagttgtatagggctatatccaacataccaatttgccctagttatc

SEQ ID NO: 20638 - DNA, 1818 bp, Zea Mays
aaagtattcgcagtttcataccatagcccagtaggtggaccattctgtcgtgctcacccaatgccaatggagtcggttgcggtcgtggcggtgccgttcccggcgcagggccacctgaacgcgctgctgcacctgtcgctgcagctggcggcgcgcggggtacccgtacactacgcggcgcccatggagcacgtccgccaggcccggtcgcgcgttcaaggctggggcgacgacaccctctgccgcgtacacttccacgagctctccgtctccgcgtacgcctccccgccgccagaccctgccgccgaatcggccttcccctcgcacctcgtgcccatgtgggaggccttcaccaccgacgcgcccgccccgctcgcggcgctcctcggcgggatctccgcctcctgccgccgcttcgtcgtcctgtacgacatcgccaacgggttcgccgccgaagaggccgcgcggctgcccaacggcgaggggttcgggctggtgtgcaccgcggtgtcgtgcatcgtcgggcggacggacgccggcagccggctcgtgcgtgagcgcgggctcgacttcttccccgtcaactcctttgtgacggaggagtttctggctaccgtcggcaagcgggcgagatgggcgcagtccataccgtgcagcgtcggcatcctcgccaacacctgccgcgcgctcgagggtgagttcatcgatattttcgcgcagcagcttgccgccgccggcaagaacctctttgtcgtcggccccttgaacccactactgctgccggacgcgaggtcgcccaagcatggaattagcaaggagcgccacgagtgcctggactggctcgacctgcagccgccggcatcggtggtctacgtgtcgttgggttctacgtcgtcgctgcgagacgagcaagtcgaggagctcgcatctgcgctgcgcgacagcaagcagcggttcatctgggtgctgcgcgacgccgaccgggccaacatattcgcggaccacggcgagagcccccggcacgccaagttcctgcccgagttcgctgaacacacccaggacagggggctggtgatcaccgggtgggcgccgcagctggagatcctggcgcacggcgccacggcggcgttcctgagccactgcggctggaactcgatcatggagagcatgggacacgggaagcccatcctcgcctggcccatgcactccgaccagccatgggacgctgagctcgtatgcaagcaccacaaggcgggcatcctgatccgcccgatggagaagcaaagggaggtgatttcggcagcggccatacaggaggcaatcgagaagatgatggtctctgatgaaggctacaagatccaacagcgcgcaatggcgctgggccaagctatccgtgcgtcagcagcagtaggcggtgggtcagagaacaaggacctggataagttcattgcccacatctcaaggcatttatcggagtgagaatggacatcaatttgctcgacaccccggaaaacacacatgggccagttcacaagcaaccacagcgctggatctggcaatcccaatcaactgtttcctttcaccatttaagaaccggaaaaatcagttagcgccatcaaatttgtactcaagtcttaggactagtttggtaaggatcacgagagtatccataggtaaggaatctccttgttcctctgatctcttatcaccaaatcagcttttaccgactagacattaacggaagcagttcagtgtggctctagacaaatgcttgcatctgaatataacaagacaaacgttgtaagatgaccgtctttc

SEQ ID NO: 20639 - DNA, 1613 bp, Zea Mays
cttttcaatagccgacacgtcgagaggagccccttgttgcagcgtgagtgcagcaggcacagggaaggggacaacgtcaagatcctgtcctctgcgtcgactgtcgagggatcggcatggcgttgagggtgtcccccgtgtcgcatggcgccgcggcagcgccgctgccgccgctcgcccggaggaggatggcccgtggggtggtggtggccatggcgtccaccatcaacagggtcaagactgtcaaagaaccctatactcctccacgtgagttgaaaagtcatggcagccacaggacttcctaccagagccgtcttctgatggattttatgatgaggttaaagaactgagggaacgggcaaatgaaatacctgatgagtactttgtttgcttagttggtgatatggttactgaggaagccttaccaacctatcaaacaatgcttaacacccttgatggagtccgggatgaaactggtgcaagtccaaccacgtgggcagtttggacaagggcatggacagctgaagagaacagacatggtgacctccttaataagtacatgtaccttactggacgggttgacatgaaacaaattgagaagaccattcagtatctgattggttccggaatggatcctgggactgagaacaacccgtacttgggtttcctttacacatcatttcaagaaagagcaacatttgtatcacatggaaacactgcaagacatgccaaggagtatggtgatctcaagctggcacagatatgcggtacgatagcagctgacgaaaagcgccacgaaacagcctacaccaagatagtcgagaagctcttcgagactgatcctgactacacggtgcttgcattttctgacatgatgaggaagaagatcacaatgcctgctcatctcatgtacgatggcaaggacgacaacctgtttgagcacttcagtgcagtagcacagaggatgggtgtgtacactgctaaagattatgccgacatcctcgagttcttggtccagaggtggaaagtcgcagatctcaccgggctgtctggagaagggagaagggcgcaagatttcgtctgtaccttggcaccgagaatcaggcggttggatgaaagagctcgggcaagggcgaagcaagcaccggttattcctttcagttggatttatggccgcaaggtgcagctttaatcaagaacactaggcaatgttggcacttactataccattttcagtcctggggttctctgtaagaaacagtctctaggttatctagcagggtagactactaatggatctcactcacgcaaagtatgctgtctgctattgtgaaagttgcaaagtttggattactatgtgggcctagtgaagacttctgttgtgggggggggggggggggggggggggggctgcgtccagttatgaatggtggctccatcacaactgagtgaacttttgttgaacatgttacaggacttgcgtaataatatggagtttgtatatggacaagcttgctttgatgcatcatgagaatctgaagttagtattttgtgagtgtgtgtgttggtttctgaattggtctcaacttctgatatcatctcgacaatgtctt

SEQ ID NO: 20640 - DNA, 1531 bp, Zea Mays
gcttttttgcggaaacgtgtcggttgttgggagccacaatcgttgggggtcaagactgtcaaagaaccctatactcctccacgtgaggtacatcgccaaattacccattcactaccacctcagaagcgggagattttcgattcacttcaaccttgggccaaggataacctattgaacctgctgaagccagttgaaaagtcatggcagccacaggacttcctaccagagccgtcttctgatggattttatgatgaggttaaagaactgagggaacgggcaaatgaaatacctgatgagtactttgtttgcttagttggtgatatggttactgaggaagccttaccaacctatcaaacaatgcttaacacccttgatggagtccgggatgaaactggtgcaagtccaaccacgtgggcagtttggacaagggcatggacagctgaagagaacagacatggtgacctccttaataagtacatgtaccttactggacgggttgacatgaaacaaattgagaagaccattcagtatctgattggttccggaatggatcctgggactgagaacaacccgtacttgggtttcctttacacatcatttcaagaaagagcaacatttgtatcacatggaaacactgcaagacatgccaaggagtatggtgatctcaagctggcacagatatgcggtacgatagcagctgacgaaaagcgccacgaaacagcctacaccaagatagtcgagaagctcttcgagactgatcctgactacacggtgcttgcattttctgacatgatgaggaagaagatcacaatgcctgctcatctcatgtacgatggcaaggacgacaacctgtttgagcacttcagtgcagtagcacagaggatgggtgtgtacactgctaaagattatgccgacatcctcgagttcttggtccagaggtggaaagtcgcagatctcaccgggctgtctggagaagggagaagggcgcaagatttcgtctgtaccttggcaccgagaatcaggcggttggatgaaagagctcgggcaagggcgaagcaagcaccggttattcctttcagttggatttatggccgcaaggtgcagctttaatcaagaacactaggcaatgttggcacttactataccattttcagtcctggggttctctgtaagaaacagtctctaggttatctagcagggtagactactaatggatctcactcacgcaaagtatgctgtctgctattgtgaaagttgcaaagtttggattactatgtgggcctagtgaagacttctgttgtgggggggggggggggggggggggggggctgcgtccagttatgaatggtggctccatcacaactgagtgaacttttgttgaacatgttacaggacttgcgtaataatatggagtttgtatatggacaagcttgctttgatgcatcatgagaatctgaagttagtattttgtgagtgtgtgtgttggtttctgaattggtctcaacttctgatatcatctcgacaatgtctt

SEQ ID NO: 20641 - DNA, 1762 bp, Zea Mays
gtttggtcggcccgtgataagcaggaggccaggagcagccgccagccagctagcagcgtccctgctgctccgcgccacacctctccgcttcattcctatccgtctcccctgctctatcgtcgtcctcctccgtcgggccggaggagcgtctctttgtcggcgcagcgtgcagagcaccgcagattcagagacacgatgatgtcgcgacagtgtgcaaaccgcatctttcttaccggaggttccagcttcctccatggcctcaaatctagagttgcatccagtaggagtcacggcaccgtcagactcaactggcgctgcgtgagaactaatctctggagggccgagcgccttggtgtcaaggctactccgtctgagcatatcattgcagtactgcaagcgtcagatattttcagtggcatcaggaaatggagcaagttgcaattggtcgccatgacaggggtgatggcatgtgtagttctggtagtcccttcttctgatgcagtcgatgctctcaagacatgcacttgcctgctaaaggaatgcagaatagagctggctaaatgcatagcgaacccatcctgtgcagcaaacgtagcatgcttgaacacgtgcaacaatcgacctgatgaaactgaatgtcagataaaatgcggagacctgtttgagaacagtgtagtcgatgaattcaatgattgtgctgtttcacgcaagaaatgtgttccaaaaaaatccgacgtcggcgagttccccgtccccgatccatcttcgctggttaagagcttcaacatggcagattttaatggcaaatggacccatcgcagcccggcatactctacaaccatgacaatgagttcctgcactatcaagatgactggtacattatctcatccaaggttgagaacaaggatgacgactacatatttgtgtactatcgtgggcgaaatgacgcatgggatggttatggtggttctgtattgtacacaagaagtaaaactgtacctgaaacaataataccggagctggaaagagctgcaaagagcgtaggtcgggacttctcgacgttcatcatgaccgacaacacctgtggtcctgagcctcctcttgtggagagaatcgagaaaactgtggtggaaggagagaagaccatcgtcagggaggtgaaggagatcgaggaggaggttgaggagctggagaaggaggaggcgtcactgtttcagaagctggcagaaggtctcatggaggtgaaacaggatttcatgaacttcttgcaggggctgagcaaggaggagatggagctgttggatcagctcaacatggaagcgactgaagttgagcaagtcttcagccgtgcactaccgttgaggaagctaaggtagctgcagagcaaaggacttggagaaaacaagccatcaagtactggccgaaacggattctatttgccacagcagtacccacagtagagattgttgaacagatacaacaaacatttttaattttcttttctttttcttttcttttcttttcttttctttgtttacccttttctgtggtcaaaacacatgcctacgttagccctatttgtaaagcatcaagagacaacgtaactttttcttgccaaacagagaaaaaaaacaagtgtacttaagactacgctgaccatctcttgcatgacaattgtttgttgttatagtttcctttgccattccatctaaatttaagtcatttccctatgtaaaatgcaaaatcaaaaggaactcttata

SEQ ID NO: 20642 - DNA, 2052 bp, Zea Mays
caggagcagccgccagccagctagcagcgtccctgctgctccgcgccacacctctccgcttcattcctatccgtctcccctgctctatcgtcgtcctcctccgtcgggccggaggagcgtctctttgtcggcgcagcgtgcagagcaccgcagattcagagacacgatgatgtcgcgacagtgtgcaaaccgcatctttcttaccggaggttccagcttcctccatggcctcaaatctagagttgcatccagtaggagtcacggcaccgtcagactcaactggcgctgcgtgagaactaatctctggagggccgagcgccttggtgtcaaggctactccgtctgagcatatcattgcagtactgcaagcgtcagatattttcagtggcatcaggaaatggagcaagttgcaattggtcgccatgacaggggtgatggcatgtgtagttctggtagtcccttcttctgatgcagtcgatgctctcaagacatgcacttgcctgctaaaggaatgcaggtgactcttcatcatactgtcaacatagttttgacaccatataggggctgcttggttcggaaatagtctcgcctggccaagcaagccttgccttgccaccgtagccgagtgtaattctctcgtagaaactagccaaaatcatgcctacagaccacaaagaatagagctggctaaatgcatagcgaacccatcctgtgcagcaaacgtagcatgcttgaacacgtgcaacaatcgacctgatgaaactgaatgtcagataaaatgcggagacctgtttgagaacagtgtagtcgatgaattcaatgattgtgctgtttcacgcaagaaatgtgttccaaaaaaatccgacgtcggcgagttccccgtccccgatccatcttcgctggttaagagcttcaacatggcagattttaatggcaaatggtacatttcaagtggcttaaacccgacgtttgacacattcgattgtcagcttcacgagtttcatgtcgagggagacaaattgatcgcgaacatcacatggagagtccgcaccccagactctggcttctttaccaggtcaaccgtgcagcgttttgtgcaggacccatcgcagcccggcatactctacaaccatgacaatgagttcctgcactatcaagatgactggtacattatctcatccaaggttgagaacaaggatgacgactacatatttgtgtactatcgtgggcgaaatgacgcatgggatggttatggtggttctgtattgtacacaagaagtaaaactgtacctgaaacaataataccggagctggaaagagctgcaaagagcgtaggtcgggacttctcgacgttcatcatgaccgacaacacctgtggtcctgagcctcctcttgtggagagaatcgagaaaactgtggtggaaggagagaagaccatcgtcagggaggtgaaggagatcgaggaggaggttgaggagctggagaaggaggaggcgtcactgtttcagaagctggcagaaggtctcatggaggtgaaacaggatttcatgaacttcttgcaggggctgagcaaggaggagatggagctgttggatcagctcaacatggaagcgactgaagttgagcaagtcttcagccgtgcactaccgttgaggaagctaaggtagctgcagagcaaaggacttggagaaaacaagccatcaagtactggccgaaacggattctatttgccacagcagtacccacagtagagattgttgaacagatacaacaaacatttttaattttcttttctttttcttttcttttcttttcttttctttgtttacccttttctgtggtcaaaacacatgcctacgttagccctatttgtaaagcatcaagagacaacgtaactttttcttgccaaacagagaaaaaaaacaagtgtacttaagactacgctgaccatctcttgcatgacaattgtttgttgttatagtttcctttgccattccatctaaatttaagtcatttccctatgtaaaatgcaaaatcaaaaggaactcttata

SEQ ID NO: 20643 - DNA, 1512 bp, Zea Mays
agctagcagcgtccctgctgctccgcgccacacctctccgcttcattcctatccgtctcccctgctctatcgtcgtcctcctccgtcgggccggaggagcgtctctttgtcggcgcagcgtgcagagcaccgcagaatagagctggctaaatgcatagcgaacccatcctgtgcagcaaacgtagcatgcttgaacacgtgcaacaatcgacctgatgaaactgaatgtcagataaaatgcggagacctgtttgagaacagtgtagtcgatgaattcaatgattgtgctgtttcacgcaagaaatgtgttccaaaaaaatccgacgtcggcgagttccccgtccccgatccatcttcgctggttaagagcttcaacatggcagattttaatggcaaatggtacatttcaagtggcttaaacccgacgtttgacacattcgattgtcagcttcacgagtttcatgtcgagggagacaaattgatcgcgaacatcacatggagagtccgcaccccagactctggcttctttaccaggtcaaccgtgcagcgttttgtgcaggacccatcgcagcccggcatactctacaaccatgacaatgagttcctgcactatcaagatgactggtacattatctcatccaaggttgagaacaaggatgacgactacatatttgtgtactatcgtgggcgaaatgacgcatgggatggttatggtggttctgtattgtacacaagaagtaaaactgtacctgaaacaataataccggagctggaaagagctgcaaagagcgtaggtcgggacttctcgacgttcatcatgaccgacaacacctgtggtcctgagcctcctcttgtggagagaatcgagaaaactgtggtggaaggagagaagaccatcgtcagggaggtgaaggagatcgaggaggaggttgaggagctggagaaggaggaggcgtcactgtttcagaagctggcagaaggtctcatggaggtgaaacaggatttcatgaacttcttgcaggggctgagcaaggaggagatggagctgttggatcagctcaacatggaagcgactgaagttgagcaagtcttcagccgtgcactaccgttgaggaagctaaggtagctgcagagcaaaggacttggagaaaacaagccatcaagtactggccgaaacggattctatttgccacagcagtacccacagtagagattgttgaacagatacaacaaacatttttaattttcttttctttttcttttcttttcttttcttttctttgtttacccttttctgtggtcaaaacacatgcctacgttagccctatttgtaaagcatcaagagacaacgtaactttttcttgccaaacagagaaaaaaaacaagtgtacttaagactacgctgaccatctcttgcatgacaattgtttgttgttatagtttcctttgccattccatctaaatttaagtcatttccctatgtaaaatgcaaaatcaaaaggaactcttata

SEQ ID NO: 20644 - DNA, 4614 bp, Zea Mays
aagaaggagcaagcacatgctgtccaagaagaagaggaggctacacttcttgtcgcaagaacgttcccggtaaaatcctccacagaacttcaaacatgctgcaagatgtctggttctcatctagagatcagggaggagaaggtgtttctgcaacgtcaagaagaggagaaactggaggagggaacctggatcctggacactggagccacaaaccatatgtctggatccagggctgtcttcactgatctggacacagaagtgctgggcattgtccggtttggtgacaattcggtggctcggattgagggacgaggaaccatcaagtttgtgtgcaagaatggcgagacccggtcgttcgttggggcttatttcattccccgactgacgacgaacatcattagtattgggcaacttgatgaagcgaagtacaagatccatgttgatgatggggtgatgcgtattcgggaacccgatggaagattgctggcaagaatagtgcgggctgaaaacaggctgtaccttctccatctgaagatacaacagcctgtgtgcttagcagtgcgtgggcgtgaagaggaagtagcctggcggtggcatgagaggttcggccatgtcaatatggctgcactacggaagctggagaaggaagagttagtccgaggcttgcccaagctcggacaagttgaaagagtgtgcgaggcctgccaggcaggcaagcaaaaacgcacctccttcccggcgcaggcggagtaccgggcgaagcagcgtctggagttggtgcacggtgatctctgcggtcccattacaccaatgactccaagaggtaacaaatacttcttattgttggtggatgatctgagcagatatatgtggatggctgccatctcgtcgaaggatcaagctgctgatgctgtgaaaagaattcagatgcaagctgaaggagagtctggactcaagctgaaggcactccggactgatcgaggtggagaattcacctcgggtgagttcgcggagtattgtgcggctggtggtgttcaccgacaacacactgcgccgtacagtcctcagcagaatggcgtggtggagcgccgtaatgggactgttgtagcagcagcaaggagcatgctcaaggcgaagaaactccctggctggttttggggagaggcggtaaaaactgttgtgtatgtcttgaacaggtgcccaaccaagagtgtagatgggatgactccatttgaggcgtggcacggcaagaagccggccgtgcaccacctcaagacgttcggctgcatcgtctacgtccgcaacaccgtacctcatctgaagaagctggaagatcgaggaaagaagatgatcttcatcggctatgaagaaggcacgaaggcataccgcgcctacgaccccgtcaccgagcgcgtccatgtctcaagggacgtcatcttcgacgagcaggcccagtgggactgggaaacccacggcaacaccgacccagtaaatgaagaccaggatgtgtttacgatggagtatgccatcgggaagcaaacacgtccagaggtagaagaggctggtgaagaatcgggagatgagcaaactgctggtgaaactgaagatgagcaagctactggcgaatctgaaactgctggtggtctgtcccctttaacccctcatgctgatacagagcacacttcggaagaggaggatgaaatgcaggaagtggagtttgcttcaccaccggagggaaatattgatgagtatctagatgcctatagagcagaagatgatccacttagattccgcaaggtagatggactactggaatccaaaactccacctggttatgcaacaaggaggctgttagatgaggagttacatgcagaaatagctaatatggtagtagttcagtcctatatggacagatctggtcggcaggatcagggctgatagcagccggtttatttccttgtaatgattagtttgtttccatgtaatggtctataaatatatggccttagaggctaagaaaaggcagtcaatagggcgccaccaaaacctctctgtgttctgtctctgagttccagcattcgcgtgtgtgtgtgtgagactgacccggaggagggaggagctcgccggcaacctgtaaaaggttgtctctccggcgtggtttccaacagcctagaactggaacttgtgggcgtcagcggcagcacaggtggccacctggaacttgtgggcggcactgcagctgtgcaggtgcagcagcacgggtggctctctgtgatgtgttcttgcgcagctgtagcttgttgcctagtttggcaaccctaaaaggccacaatagcagcccatgaggccgcagatgcaacagcaacggcaccccatagcccacagccacagcacccattaatctcaaaagcccatctaaaaacacatgcccaatctggtcgtctcacaccaaatcgaacgattaatcgtgattagacgtcgactaatcggacgactagaattctggtcggtctaatcgcttcagtgggtctagtcgggtttgggttaacgattagtctgactagtcgcgattagtcagatgacttgaaaacactgcttaaaactatgtaaccctacagtctctaaaatatgtcaagatcaaatgctatgcatagttcacattattaattaatgcattccccttaatcaaatatttgggcacaaaaattctgttttcaactagaaaaatgcaaatgctcacatgagtacatgacaatggctgaaatgcaaatgctcacatgaccgagtatatgagatgtgactttggtactgcaattagtgaggatgcagatataagcttgggaggccaggtgttatgtatggccaagcctatgttaggcacaacagggccaaggctgcctaagggggcgtgccaggtggggcctaaggcccgttagctaatagatcagctctatctagatagttatacttatccaaagctagtagatagacttgagatagctctatatatagatatgtaaactcttgaataaaggaagcagaatacctatttattctggcttcccagaggaagccagagtctcttgggatcttctccctgcgcgcgacctagccagggtcacaacggtgccccagcgctgtcgcccttctcgcgcccaatccccaccctacaacctgcgcaatctgcccggtaggatccgtcgttctaccaatctggtaccagaggactcgacgatcatgagttcttccaagtcgccgtcaccaggacagcagccgccgccggccacaagcccgtccgcagcgccggtcgtctccctggccgcggtccctgcgccgtcggaggccatggcgctcggccctcccggcgcggccatcaaccagcaggccgcccccgcgctcaccccggcccagatcgcgacgtcattggcggatctcagccacgccgtgcgtgacatgcagatcaccatgaacgccatgctgacaggccaccttcccttccccaatccacaagccgcccatccaccccagccgccgcacccgtccctgacggcgcagccaccgccggccgcactgcccccacccacgcagccgcctgcgccactccctccactcgtccggcaaccaatctcttaccagtacggcatgccgatcgaccccgggccttcatccaccgcaccaccgcagaccacaacccccatccatatgatccgtttcccaccatccacatcccccatcccatcttcggcgcagggcgcgtctacggtttcaccaccagtgtactccgaggcatccccgcgaccggcgctcacgacttccttacctagcagcgccgccggggggcctcccggggtgctgttaggaggcggcaacggccccctgttcccgggtcgggggcccttgcgccctcacgtggccgcagcgacagcagcgtggtcaccgtaccacgggctgcctcaggacgacgacatggagaccgcaacctacgggggcgctgaggcgcgcgcgcctccacgctactacaaactagagttcgccacagacgatggctctgaggatccgctgaactggctaaatcattgtaagtagttcttccgggggcagcgcacgccagcctcggatcgcacgtggcttgcctcgtaccatcttaaggggccggcacagacgtggtactatgccctggaacaggacgagggcatgccgtcttgggatcgcttcgctgagctgtgtcgccttcgcttcggtccagcaatgcgcggttctcgccttgcggagctgggacgcatccccttcctgtccacgatccaggagtactcggaccgcttccaggcgttgctatgtcgagctcgggacgtctcccccatgtagaagacagagttgttcgtgggcagcctccccgagtacttgcgggtggacgttgagctgcgcaacccgcaggatctacaaactgccatgtacctggcgcgggcgttcgaacggcgcgcggcggcctggcccccatcccagcagcgcgggtcgcgaccaccgcaacgggcgcaggggtcgggacgcgcgacaccagcaccgcccggggctccaccgaccggtacgacgacgtcaggcgatagtacgactccg

SEQ ID NO: 20645 - DNA, 2884 bp, Zea Mays
ataggcacagccggtcagccgcacaccacactccgtctctactctataacctaggccatcggcggcggcggatcggccacacgcccacacctcaggctcaaccatccgtccctcgacctgtgacctgcccacccaccgccgccagcctcgaaccgtcgaacggccagccagctagccgcacggccagccagcccgcagcatggccagctagacggcacccagccagccagccagccgcacggacagccagcccgtagcggaggagcccctgtccgcccggcgccccggccaccggccaccgctagccaaacaccgaagcacgtcgctgtgaaggttgtatcagtttatcttgcctcaggagctttgttaattaagaatttgacatcattggcatatggcgtcccagaagagttgtcttctgatcactttctcccaggagattgtagatggggtgcctttgtatgtttcatcaaactgccttcctgtaaaagctttgaaatatgaacctgctggtcattcgttccatgctgcggcaatgaagcttcttggtcttgtggagcatgaagatatagaaactgatgatcgcagcgtttcatcggatgacaaaagccaagattttaatactgcttctgatacctttagcagcaaagggaagaagaagtcatctggcagtcaacagcaggaccactatgctttgcttgggttggggcacttgaggttcttggccactgaagatcaaattcggaaaagttaccgtgagatggctctcaaacatcatccagataagcaggctgccctgattcttgcagagacaacagaggaggcaaaacaagcaaaaaaggatgagatagagagccatttcaaggccatccaagaggcctatgaagttctcatagaccctacaaagaggaggatttatgactctacagatgagtttgatgatgatgtcccaacagactgtgccccacaagacttcttcaaagtttttggcccagccttcatgagaaatggacgctggtctgttacccagcctattccttctcttggagatgatactactccagtagaggaggttgataagttctacaatttctggtacaacttcaagagttggagagaatttccagatgatgatgagtacgatttggagcaagctgaatctcgtgaacataagagatggatggagaggcagaatgcaaagctacaagagaaggccaaaaaggtggaatacgcgcgagtgcgcatacttgtagacaatgcttataagaaagacccaaggatccagaggaggaaagaggaggagaaagctgagaaacagagaagaagggaggcgaagtatttggcaaagaaattacaagaagaggaagcagcaaaagctgttgaagaggaaaggataaggaaagaagaagagtctaagaaagctgcagaagctgctctacatcagaagaagctaaaggagaaagagaagaagctgctccgcaaagagaaaactcggttgcgcactcttgcagcacctgtcattgcagatagccactttggtctgtcagaggcaaatgttgaatcggcatgtgcttcacttgatatggaacagctgaagaagctctgtgatggaatggatagtaaggatgcagctggaaaggccaggttgctgagcaatgtacttcgcaatgaaagttcctcaaaggaagcaaagaaaattgaagggaatggtgtggagccttctgccccaaaatccaactctacaggaggtagagcgacagaagccagtaacagcatattgaacagctatgagaaaaaagagagaccatggggaaaggaagagattgagatgcttaggaaagcaattcaaaagtatcctaagggaacatcgaggagatgggaggttgtttctgaatttattgggactagcagatcggttgaggaaattctcaaggccaccaagactgttcttctgcagaagccagactcatcgaaagctttcgactctttccttgagaagcggaaaccgacacaatcaattgcttcgcctctttcgacccgagatgaaattagttcaactgagggagctgggactgcatcgtcaaaggctgcagcacaatctgcgaatagccagacagccaatgagaaagctgctgctgatcctgtcacggatggaggaccatccgtgtcagatccagatgcctggacagatgcgcaggtcctggctctagtccaagctttgaaggcttttcccaaggatgcaagccaaagatgggagcgtgtggctgctgctgttccatgtaaaaccgtagtccagtgcaagaaaaaagtagcggcaatgagagagaatttccggagcaagaaaagtggggagtaggctgaggcattgcctcactggaagtatattttgcaagaaagagtctggacggcaatatttatagaatggattcagcatcttagctagagaggtattgcttggcgaacctttcatctcatgccaccagtggtgaggataattttgttatggagctgtgacagctcatttattgtggctggccaccagggttgttttactttgagcagccgtagcaggatgccatcgaagctcatctattgttgatgggctgatggttggcaattttgccgcagtggttcgtgtgggattttgtttctgcaggctcctggggttgtatatgcgctgctgtaagccaatgaatgaattgtgagctattccaacattcttagagtcaattcatctcaggtttgatcaaatttatataataaaacactaatatttatgataccaactatgtcattagattctttatttaactacattttatagtatatctatttgatgttatcgatctttgtaatttcctctacaagtttggtctaaattgag

SEQ ID NO: 20646 - DNA, 911 bp, Zea Mays
atttctccatgcccctacccagccattcccctaaaaatctccagccgtctgtcttgctgctcgttcctgcagctcagacgtcgcctcccttctaccccttgctcctcagccaggcttgttagccgagcccctccaactagcgtgctagacctttgacgccgtttccccgtcgtccaagctccaccatgcccacacgtccgtcctgctcctccatgcacacgcccatgcatccttatctccctggaaacttcactcgtgtacggctccctggtgataatattcagcgatgcttcgccagggcaccgttcccctgcgcgctcgctggacgccgtcgcacatgctccctgctcggcctccccggcgtgctgctccctcgccttggtgcccctgcgagctccttctctctggcccggtttccagctcgggcctcgctagatgccgatgccgcttttctgacctcgtctcgatactcaatcgctgcagcacgccatgccgtgtgtgctgcactgtcatcattcgctatcctcatttttgctaatttttctcgtcgtttctcgtctacaaccttgtcagctcctgcgtgtcgtgcgcgtcttgtgttcgggtcgagccccaggattttgaggaaaaggaagctccagtgcattggccggtgaaatgaataaaatggattttgaagaaaaggaagctccaatgcatcagccggtgaaatgaataaaatggtggtaattatggtccttgtgaaatctgagatcaacttagtcgcgggtctcgctgccgcagaacgttgtcgcagaccgcttcaccgtcgaccctttgaactgcgtcatccccggttaatctcgcgcgcgtaccgacagcttcgaagtgtccccgctgccgaattaaacacgtgtctacgttcaccgtgg

SEQ ID NO: 20647 - DNA, 1978 bp, Zea Mays
atttctccatgcccctacccagccattcccctaaaaatctccagccgtctgtcttgctgctcgttcctgcagctcagacgtcgcctcccttctaccccttgctcctcagccaggcttgttagccgagcccctccaactagcgtgctagacctttgacgccgtttccccgtcgtccaagctccaccatgcccacacgtccgtcctgctcctccatgcacacgcccatgcatccttatctccctggaaacttcactcgtgtacggctccctggtgataatattcagcgatgcttcgccagggcaccgttcccctgcgcgctcgctggacgccgtcgcacatgctccctgctcggcctccccggcgtgctgctccctcgccttggtgcccctgcgagctccttctctctggcccggtttccagctcgggcctcgctagatgccgatgccgcttttctgacctcgtctcgatactcaatcgctgcagcacgccatgccgtgtgtgctgcactgtcatcattcgctatcctcatttttgctaatttttctcgtcgtttctcgtctacaaccttgtcagctcctgcgtgtcgtgcgcgtcttgtgttcgggtcgagccccaggattttgaggaaaaggaagctccagtgcattggccggtgaaatgaataaaatggattttgaagaaaaggaagctccaatgcatcagccggtgaaatgaataaaatggtggtaattatggtccttgtgaaatctgagatcaacttagtcgcgtgacacaccaagataacacgtgttatgtgctctccatcaacaagtgaagctcaccgaagaaggatcattaactctaccggtgtctactgctcagaacagggtctcgctgccgcagaacgttgtcgcagaccgcttcaccgtcgaccctttgaactgcgtcatccccggttaatctcgcgcgcgtaccgacagcttcgaagaacacctagatgaggtggtacttgaagaagtctactccagtgcctgctcatcaagtggatggagctatctaactaaaggttaggtataaggatctagaatctcttctctgcaacaaaggcaagccccggtgcatttaccccttccttgtatttttaaaaagacttttatatactttaagtctagtgaaatgtgcattaagtttataggaattgattggaaactattggatgcattgactaccttgatatccattcctgttatatatacttctttcgaagtatcaaatattgtttacaaaaatgcttagccctgcttagatctggtggatagaggttgtcttttgcaataatgcctagctcaggggttatcctgaggacggatggcttctaccagcaagaatattttcattgggagcatggtgggatcttactacaaagttccctataatgctcttttcatcctaaggaacacaaaacaatcctaaggatggaagtacttaaatcgagacttgggctaggaacaggtgatgctcctcccaggttaattaaggattggatgcgtatgtaggcctgtatgatcaaggactatcttaactggccacatgccctggatatgggacagggtaagcttgaacccctctattccatacatgaaaagacaatcgcgcactgggagtggagagatggcgagagtgacacatacgctcctggcaaaggaccgcctaaaaggggtggtgtgctctcgggtggcgcgcacctgttcatgcagtggaggatccgtgggaattgtagacatatgcaagagttacgagaaacatatgtcgtgtggttagagatcctcagctgagtaaatcgattcggatcgtcgttatatccccggaaagtggagacttgatctctgtccttcaacctaagtcaggatgtaaacattatgaataaaaatgatgttgtattgatgagatgctgaaataagactagatgtaaccagagtctattaatatttaatctggc

SEQ ID NO: 20648 - DNA, 1780 bp, Zea Mays
tttctccatgcccctacccagccattcccctaaaaatctccagccgtctgtcttgctgctcgttcctgcagctcagacgtcgcctcccttctaccccttgctcctcagccaggcttgttagccgagcccctccaactagcgtgctagacctttgacgccgtttccccgtcgtccaagctccaccatgcccacacggcaccgttcccctgcgcgctcgctggacgccgtcgcacatgctccctgctcggcctccccggcgtgctgctccctcgccttggtgcccctgcgagctccttctctctggcccggtttccagctcgggcctcgctagatgccgatgccgcttttctgacctcgtctcgatactcaatcgctgcagcacgccatgccgtgtgtgctgcactgtcatcattcgctatcctcatttttgctaatttttctcgtcgtttctcgtctacaaccttgtcagctcctgcgtgtcgtgcgcgtcttgtgttcgggtcgagccccaggattttgaggaaaaggaagctccagtgcattggccggtgaaatgaataaaatggattttgaagaaaaggaagctccaatgcatcagccggtgaaatgaataaaatggtggtaattatggtccttgtgaaatctgagatcaacttagtcgcgaacagggtctcgctgccgcagaacgttgtcgcagaccgcttcaccgtcgaccctttgaactgcgtcatccccggttaatctcgcgcgcgtaccgacagcttcgaagaacacctagatgaggtggtacttgaagaagtctactccagtgcctgctcatcaagtggatggagctatctaactaaaggttaggtataaggatctagaatctcttctctgcaacaaaggcaagccccggtgcatttaccccttccttgtatttttaaaaagacttttatatactttaagtctagtgaaatgtgcattaagtttataggaattgattggaaactattggatgcattgactaccttgatatccattcctgttatatatacttctttcgaagtatcaaatattgtttacaaaaatgcttagccctgcttagatctggtggatagaggttgtcttttgcaataatgcctagctcaggggttatcctgaggacggatggcttctaccagcaagaatattttcattgggagcatggtgggatcttactacaaagttccctataatgctcttttcatcctaaggaacacaaaacaatcctaaggatggaagtacttaaatcgagacttgggctaggaacaggtgatgctcctcccaggttaattaaggattggatgcgtatgtaggcctgtatgatcaaggactatcttaactggccacatgccctggatatgggacagggtaagcttgaacccctctattccatacatgaaaagacaatcgcgcactgggagtggagagatggcgagagtgacacatacgctcctggcaaaggaccgcctaaaaggggtggtgtgctctcgggtggcgcgcacctgttcatgcagtggaggatccgtgggaattgtagacatatgcaagagttacgagaaacatatgtcgtgtggttagagatcctcagctgagtaaatcgattcggatcgtcgttatatccccggaaagtggagacttgatctctgtccttcaacctaagtcaggatgtaaacattatgaataaaaatgatgttgtattgatgagatgctgaaataagactagatgtaaccagagtctattaatatttaatctggc

SEQ ID NO: 20649 - DNA, 1853 bp, Zea Mays
tcccctaaaaatctccagccgtctgtcttgctgctcgttcctgcagctcagacgtcgcctcccttctaccccttgctcctcagccaggcttgttagccgagcccctccaactagcgtgctagacctttgacgccgtttccccgtcgtccaagctccaccatgcccacacgtccgtcctgctcctccatgcacacgcccatgcatccttatctccctggaaacttcactcgtgtacggctccctggtgataatattcagcgatgcttcgccagggcaccgttcccctgcgcgctcgctggacgccgtcgcacatgctccctgctcggcctccccggcgtgctgctccctcgccttggtgcccctgcgagctccttctctctggcccggtttccagctcgggcctcgctagatgccgatgccgcttttctgacctcgtctcgatactcaatcgctgcagcacgccatgccgtgtgtgctgcactgtcatcattcgctatcctcatttttgctaatttttctcgtcgtttctcgtctacaaccttgtcagctcctgcgtgtcgtgcgcgtcttgtgttcgggtcgagccccaggattttgaggaaaaggaagctccagtgcattggccggtgaaatgaataaaatggattttgaagaaaaggaagctccaatgcatcagccggtgaaatgaataaaatggtggtaattatggtccttgtgaaatctgagatcaacttagtcgcgggtctcgctgccgcagaacgttgtcgcagaccgcttcaccgtcgaccctttgaactgcgtcatccccggttaatctcgcgcgcgtaccgacagcttcgaagaacacctagatgaggtggtacttgaagaagtctactccagtgcctgctcatcaagtggatggagctatctaactaaaggttaggtataaggatctagaatctcttctctgcaacaaaggcaagccccggtgcatttaccccttccttgtatttttaaaaagacttttatatactttaagtctagtgaaatgtgcattaagtttataggaattgattggaaactattggatgcattgactaccttgatatccattcctgttatatatacttctttcgaagtatcaaatattgtttacaaaaatgcttagccctgcttagatctggtggatagaggttgtcttttgcaataatgcctagctcaggggttatcctgaggacggatggcttctaccagcaagaatattttcattgggagcatggtgggatcttactacaaagttccctataatgctcttttcatcctaaggaacacaaaacaatcctaaggatggaagtacttaaatcgagacttgggctaggaacaggtgatgctcctcccaggttaattaaggattggatgcgtatgtaggcctgtatgatcaaggactatcttaactggccacatgccctggatatgggacagggtaagcttgaacccctctattccatacatgaaaagacaatcgcgcactgggagtggagagatggcgagagtgacacatacgctcctggcaaaggaccgcctaaaaggggtggtgtgctctcgggtggcgcgcacctgttcatgcagtggaggatccgtgggaattgtagacatatgcaagagttacgagaaacatatgtcgtgtggttagagatcctcagctgagtaaatcgattcggatcgtcgttatatccccggaaagtggagacttgatctctgtccttcaacctaagtcaggatgtaaacattatgaataaaaatgatgttgtattgatgagatgctgaaataagactagatgtaaccagagtctattaatatttaatctggc

SEQ ID NO: 20650 - DNA, 1148 bp, Zea Mays
gccgtctgtcttgctgctcgttcctgcagctcagacgtcgcctcccttctaccccttgctcctcagccaggcttgttagccgagcccctccaactagcgtgctagacctttgacgccgtttccccgtcgtccaagctccaccatgcccacacgtccgtcctgctcctccatgcacacgcccatgcatccttatctccctggaaacttcactcgtgtacggctccctggtgataatattcagcgatgcttcgccagggcaccgttcccctgcgcgctcgctggacgccgtcgcacatgctccctgctcggcctccccggcgtgctgctccctcgccttggtgcccctgcgagctccttctctctggcccggtttccagctcgggcctcgctagatgccgatgccgcttttctgacctcgtctcgatactcaatcgctgcagcacgccatgccgtgtgtgctgcactgtcatcattcgctatcctcatttttgctaatttttctcgtcgtttctcgtctacaaccttgtcagctcctgcgtgtcgtgcgcgtcttgtgttcgggtcgagccccaggattttgaggaaaaggaagctccagtgcattggccggtgaaatgaataaaatggattttgaagaaaaggaagctccaatgcatcagccggtgaaatgaataaaatggtggtaattatggtccttgtgaaatctgagatcaacttagtcgcgaacagggtctcgctgccgcagaacgttgtcgcagaccgcttcaccgtcgaccctttgaactgcgtcatccccggttaatctcgcgcgcgtaccgacagcttcgaaggtgatgaggagtactctaagtgttcctgtggctggagggcgtttccagttctggaggaagactagttaggctagtgtataagctttggagggttcctaccgtcctgcttttgtaataagttatgcattttgagtatatcaggacttgtaataaatgtaactcttactatgtgtcaaacgatttttgtttgatttcaaactttaccagagtatgttcaaggtaatttggcaccactttcatatttgggttttgtagatttgagttttggaaaacagagaacacggctgaacttcataaaggggtaaaaattcagttctg

SEQ ID NO: 20651 - DNA, 871 bp, Zea Mays
cgtctgtcttgctgctcgttcctgcagctcagacgtcgcctcccttctaccccttgctcctcagccaggcttgttagccgagcccctccaactagcgtgctagacctttgacgccgtttccccgtcgtccaagctccaccatgcccacacgtccgtcctgctcctccatgcacacgcccatgcatccttatctccctggaaacttcactcgtgtacggctccctggtgataatattcagcgatgcttcgccagggcaccgttcccctgcgcgctcgctggacgccgtcgcacatgctccctgctcggcctccccggcgtgctgctccctcgccttggtgcccctgcgagctccttctctctggcccggtttccagctcgggcctcgctagatgccgatgccgcttttctgacctcgtctcgatactcaatcgctgcagcacgccatgccgtgtgtgctgcactgtcatcattcgctatcctcatttttgctaatttttctcgtcgtttctcgtctacaaccttgtcagctcctgcgtgtcgtgcgcgtcttgtgttcgggtcgagccccaggattttgaggaaaaggaagctccagtgcattggccggtgaaatgaataaaatggattttgaagaaaaggaagctccaatgcatcagccggtgaaatgaataaaatggtggtaattatggtccttgtgaaatctgagatcaacttagtcgcgaacagggtctcgctgccgcagaacgttgtcgcagaccgcttcaccgtcgaccctttgaactgcgtcatccccggttaatctcgcgcgcgtaccgacagcttcgaagtgtccccgctgccgaattaaacacgtgtctacgttcaccgtgg

SEQ ID NO: 20652 - DNA, 1455 bp, Zea Mays
cgtctgtcttgctgctcgttcctgcagctcagacgtcgcctcccttctaccccttgctcctcagccaggcttgttagccgagcccctccaactagcgtgctagacctttgacgccgtttccccgtcgtccaagctccaccatgcccacacgtccgtcctgctcctccatgcacacgcccatgcatccttatctccctggaaacttcactcgtgtacggctccctggtgataatattcagcgatgcttcgccagggcaccgttcccctgcgcgctcgctggacgccgtcgcacatgctccctgctcggcctccccggcgtgctgctccctcgccttggtgcccctgcgagctccttctctctggcccggtttccagctcgggcctcgctagatgccgatgccgcttttctgacctcgtctcgatactcaatcgctgcagcacgccatgccgtgtgtgctgcactgtcatcattcgctatcctcatttttgctaatttttctcgtcgtttctcgtctacaaccttgtcagctcctgcgtgtcgtgcgcgtcttgtgttcgggtcgagccccaggattttgaggaaaaggaagctccagtgcattggccggtgaaatgaataaaatggattttgaagaaaaggaagctccaatgcatcagccggtgaaatgaataaaatggtggtaattatggtccttgtgaaatctgagatcaacttagtcgcggacacaccaagataacacgtgttatgtgctctccatcaacaagtgaagctcaccgaagaaggatcattaactctaccggtgtctactgctcagaacagggtctcgctgccgcagaacgttgtcgcagaccgcttcaccgtcgaccctttgaactgcgtcatccccggttaatctcgcgcgcgtaccgacagcttcgaagagcctgtgtcgatgccctcgccgtcgtcaatgaagcgccaccgtggtcgatctggcgcagaccgccggagttctgcactgcggcgttgtgggctagaacttttgtaaaagagtggaatctgagggacttaagtgaatctgtcagtgagtaagatcaatagtggcaaggaccgatgtggattagtttgagcgcgaaggtcctttttgcaagatgtgtggtgcggtcgcgggctgttcattgtgggccaactctacctgccactgggtcggctgggctaggtttcggcacagtactgtactcagttttgttgtttcttttatcagcaaacttgtaaattgagctaaaaatcatagaaaattccaaaaatcatgggataaattttgttggatgtctaaaatcaagagctctctggtaaagttggttttaggatttttaaagtaattagaaaatattaagtgaattaaaggtgctttcggaaggactgtttggattttagaaataaaggtacaatgcaaaaaattatggaaatttttt

SEQ ID NO: 20653 - DNA, 881 bp, Zea Mays
cgtctgtcttgctgctcgttcctgcagctcagacgtcgcctcccttctaccccttgctcctcagccaggcttgttagccgagcccctccaactagcgtgctagacctttgacgccgtttccccgtcgtccaagctccaccatgcccacacgtccgtcctgctcctccatgcacacgcccatgcatccttatctccctggaaacttcactcgtgtacggctccctggtgataatattcagcgatgcttcgccagggcaccgttcccctgcgcgctcgctggacgccgtcgcacatgctccctgctcggcctccccggcgtgctgctccctcgccttggtgcccctgcgagctccttctctctggcccggtttccagctcgggcctcgctagatgccgatgccgcttttctgacctcgtctcgatactcaatcgctgcagcacgccatgccgtgtgtgctgcactgtcatcattcgctatcctcatttttgctaatttttctcgtcgtttctcgtctacaaccttgtcagctcctgcgtgtcgtgcgcgtcttgtgttcgggtcgagccccaggattttgaggaaaaggaagctccagtgcattggccggtgaaatgaataaaatggattttgaagaaaaggaagctccaatgcatcagccggtgaaatgaataaaatggtggtaattatggtccttgtgaaatctgagatcaacttagtcgcgaacagggtctcgctgccgcagaacgttgtcgcagaccgcttcaccgtcgaccctttgaactgcgtcatccccggttaatctcgcgcgcgtaccgacagcttcgaaggagataagtttacctagtgagagttgctctttggatgaaggaaccaaaggaag

SEQ ID NO: 20654 - DNA, 1512 bp, Zea Mays
aaaaactaattagtggacattgttttttagtgttttaaatctttaggatctaagtggtttacaaagttgattaatatgtttctatccttattctgaattattggtatataaaaatagtgaattaaagtttggcgagttgtttgacattggactcagttaaattaaaatagcgtggacatgcatggtatttagtaccatctcgacacctagtaatttcttttaagtggtattatgtgcctcgccatcaagtgttcagttttctactgtgttcaccttaccgtggccatgatactcgaagcagtgacacaccaagataacacgtgttatgtgctctccatcaacaagtgaagctcaccgaagaaggatcattaactctaccggtgtctactgctcagaacagggtctcgctgccgcagaacgttgtcgcagaccgcttcaccgtcgaccctttgaactgcgtcatccccggttaatctcgcgcgcgtaccgacagcttcgaagaacacctagatgaggtggtacttgaagaagtctactccagtgcctgctcatcaagtggatggagctatctaactaaaggttaggtataaggatctagaatctcttctctgcaacaaaggcaagccccggtgcatttaccccttccttgtatttttaaaaagacttttatatactttaagtctagtgaaatgtgcattaagtttataggaattgattggaaactattggatgcattgactaccttgatatccattcctgttatatatacttctttcgaagtatcaaatattgtttacaaaaatgcttagccctgcttagatctggtggatagaggttgtcttttgcaataatgcctagctcaggggttatcctgaggacggatggcttctaccagcaagaatattttcattgggagcatggtgggatcttactacaaagttccctataatgctcttttcatcctaaggaacacaaaacaatcctaaggatggaagtacttaaatcgagacttgggctaggaacaggtgatgctcctcccaggttaattaaggattggatgcgtatgtaggcctgtatgatcaaggactatcttaactggccacatgccctggatatgggacagggtaagcttgaacccctctattccatacatgaaaagacaatcgcgcactgggagtggagagatggcgagagtgacacatacgctcctggcaaaggaccgcctaaaaggggtggtgtgctctcgggtggcgcgcacctgttcatgcagtggaggatccgtgggaattgtagacatatgcaagagttacgagaaacatatgtcgtgtggttagagatcctcagctgagtaaatcgattcggatcgtcgttatatccccggaaagtggagacttgatctctgtccttcaacctaagtcaggatgtaaacattatgaataaaaatgatgttgtattgatgagatgctgaaataagactagatgtaaccagagtctattaatatttaatctggc

SEQ ID NO: 20655 - DNA, 462 bp, Zea Mays
ggtttcgtggcctgatcgggaacgggaccatatggaacatcgtatggaaccatggttgggacacgaccctcacccaagtaggatgtcggataaaccatcatcctgcacaagcaaggggcatgtaccttcgcggaagcgaagcaccgcatggatattggaggagcggaggtcagaggactggcaaagcaataagacaaagggatcgccaaccatgtgctcatattacatggacaaattgttaatcatgtcacgttgctttgaattatttttttctatacaggaatatttactagttggctgttttgggaacctcgttccacattatcgttccaaaattttacggttggcgttctggttatcaaatagagcatacaaggagctatagcccctttgttccatgcctccaaaaaatagtgatcctcgacccgagttcccgttcctcaatctcttcgccccaggaac

SEQ ID NO: 20656 - DNA, 1541 bp, Zea Mays
ggccgacgggtcgtgcggtcgtgcccaacggccttctcagcccatctcgtgcccacgtccctcttcccatttctgaccaacccctcttcatccctcggactacaaatgcggcgcaaccgtgagcgcagctgcagttggggagtgtgcagcagtatgttctcggtctcgccatcgcatctcgcagagtagacactcaaatccgattgtcgagggggagaaggtggagatcgttgtaacggctagttgcgtcggcccgatggacccgtcgtaccatggcggcggcgccgccggtggaagcgccgacgaccatggccaaattctttgggattggacagaacagcattgtgaacctaacgattcaagtcatgatgctactaaatttgtgtgggattgcctcaatcaagatgacaatgagctgttgggattgcttggaaatcaaaccccattgagatactgccgtgatttcttcgctgaccttgatgatatcacatgcaaggagaccctggacctggaggaatctcgggaatcaaagcggcggcgcacattggagtaccctttggagtctagtcagtcagaagttgggactcatgaaaccggttcacctttcgtcacacctgaggtagcagaaatttcattgctctgcactgataaaccacagagcttaaattgtgatacaataaattccttgtcagatgaagcaccctaccagcaagaagatatccttttggaacattgctcttatggaacggcagtgtaccttgagccagatcaaacaccttgtagccagcagagcattgcatgtacaaatgatcaagctggtatttcaggaacaagtgagattgcaccaatgacagaaagtttcataatgcaggaaactaggaagctttctacactcaaagtctccaatggagcaagctcgtcactagttacgaaggacaacttaactacctcagtagcatatccttttactctcatcaaaccatcctggcaagaaggcgatgttaccttgcaggatataaatcggcgaatccgtcctcctaagaaggccccagagatccttggaacttcagcattctctggcaagccagtgattaacaagacaagaatcagaacagaaggagggaaaggaagcatcacaatactaagaacaaagggctgagaaccggaaaatacctttgatccttatttatctgctcctttgtggtcaattgtacaggtctgagcacttgaggctgccattgattcacagttcatggaacagagggcttagagcttgaggatgccattgattcttatttatctgccattctctcgattgcttttggcactctggtcaatgtgcaggcctcttagctttccagctgttactttttttctttcagttttgtaccgtgactttgtcttgtgaatagtattatgacatgtggatgtggtcaacgatatatacaaagcactaaagttaatggaattagtgtgttaaattccatgtacttgagtctgttcaagctctgtgccgagaaaatttcttatatgacactagc

SEQ ID NO: 20657 - DNA, 1571 bp, Zea Mays
ggccgacgggtcgtgcggtcgtgcccaacggccttctcagcccatctcgtgcccacgtccctcttcccatttctgaccaacccctcttcatccctcggactacaaatgcggcgcaaccgtgagcgcagctgcagttggggagtgtgcagcagtatgttctcggtctcgccatcgcatctcgcagagtagacactcaaatccgattgtcgagggggagaaggtggagatcgttgtaacggctagttgcgtcggcccgatggacccgtcgtaccatggcggcggcgccgccggtggaagcgccgacgaccatggccaaattctttgggattggacagaacagcattgtgaacctaacgattcaagtcatgcagatgctactaaatttgtgtgggattgcctcaatcaagatgacaatgagctgttgggattgcttggaaatcaaaccccattgagatactgccgtgatttcttcgctgaccttgatgatatcacatgcaaggagaccctggacctggaggaatctcgggaatcaaagcggcggcgcacattggagtaccctttggagtctagtcagtcagaagttgggactcatgaaaccggttcacctttcgtcacacctgaggtagcagaaatttcattgctctgcactgataaaccacagagcttaaattgtggtatgcaccacactttaaataatctagatacaataaattccttgtcagatgaagcaccctaccagcaagaagatatccttttggaacattgctcttatggaacggcagtgtaccttgagccagatcaaacaccttgtagccagcagagcattgcatgtacaaatgatcaagctggtatttcaggaacaagtgagattgcaccaatgacagaaagtttcataatgcaggaaactaggaagctttctacactcaaagtctccaatggagcaagctcgtcactagttacgaaggacaacttaactacctcagtagcatatccttttactctcatcaaaccatcctggcaagaaggcgatgttaccttgcaggatataaatcggcgaatccgtcctcctaagaaggccccagagatccttggaacttcagcattctctggcaagccagtgattaacaagacaagaatcagaacagaaggagggaaaggaagcatcacaatactaagaacaaagggctgagaaccggaaaatacctttgatccttatttatctgctcctttgtggtcaattgtacaggtctgagcacttgaggctgccattgattcacagttcatggaacagagggcttagagcttgaggatgccattgattcttatttatctgccattctctcgattgcttttggcactctggtcaatgtgcaggcctcttagctttccagctgttactttttttctttcagttttgtaccgtgactttgtcttgtgaatagtattatgacatgtggatgtggtcaacgatatatacaaagcactaaagttaatggaattagtgtgttaaattccatgtacttgagtctgttcaagctctgtgccgagaaaatttcttatatgacactagc

SEQ ID NO: 20658 - DNA, 1544 bp, Zea Mays
ggccgacgggtcgtgcggtcgtgcccaacggccttctcagcccatctcgtgcccacgtccctcttcccatttctgaccaacccctcttcatccctcggactacaaatgcggcgcaaccgtgagcgcagctgcagttggggagtgtgcagcagtatgttctcggtctcgccatcgcatctcgcagagtagacactcaaatccgattgtcgagggggagaaggtggagatcgttgtaacggctagttgcgtcggcccgatggacccgtcgtaccatggcggcggcgccgccggtggaagcgccgacgaccatggccaaattctttgggattggacagaacagcattgtgaacctaacgattcaagtcatgcagatgctactaaatttgtgtgggattgcctcaatcaagatgacaatgagctgttgggattgcttggaaatcaaaccccattgagatactgccgtgatttcttcgctgaccttgatgatatcacatgcaaggagaccctggacctggaggaatctcgggaatcaaagcggcggcgcacattggagtaccctttggagtctagtcagtcagaagttgggactcatgaaaccggttcacctttcgtcacacctgaggtagcagaaatttcattgctctgcactgataaaccacagagcttaaattgtgatacaataaattccttgtcagatgaagcaccctaccagcaagaagatatccttttggaacattgctcttatggaacggcagtgtaccttgagccagatcaaacaccttgtagccagcagagcattgcatgtacaaatgatcaagctggtatttcaggaacaagtgagattgcaccaatgacagaaagtttcataatgcaggaaactaggaagctttctacactcaaagtctccaatggagcaagctcgtcactagttacgaaggacaacttaactacctcagtagcatatccttttactctcatcaaaccatcctggcaagaaggcgatgttaccttgcaggatataaatcggcgaatccgtcctcctaagaaggccccagagatccttggaacttcagcattctctggcaagccagtgattaacaagacaagaatcagaacagaaggagggaaaggaagcatcacaatactaagaacaaagggctgagaaccggaaaatacctttgatccttatttatctgctcctttgtggtcaattgtacaggtctgagcacttgaggctgccattgattcacagttcatggaacagagggcttagagcttgaggatgccattgattcttatttatctgccattctctcgattgcttttggcactctggtcaatgtgcaggcctcttagctttccagctgttactttttttctttcagttttgtaccgtgactttgtcttgtgaatagtattatgacatgtggatgtggtcaacgatatatacaaagcactaaagttaatggaattagtgtgttaaattccatgtacttgagtctgttcaagctctgtgccgagaaaatttcttatatgacactagc

SEQ ID NO: 20659 - DNA, 1524 bp, Zea Mays
ggccgacgggtcgtgcggtcgtgcccaacggccttctcagcccatctcgtgcccacgtccctcttcccatttctgaccaacccctcttcatccctcggactacaaatgcggcgcaaccgtgagcgcagctgcagttggggagtgtgcagcagtatgttctcggtctcgccatcgcatctcgcagagtagacactcaaatccgattgtcgagggggagaaggtggagatcgttgtaacggctagttgcgtcggcccgatggacccgtcgtaccatggcggcggcgccgccggtggaagcgccgacgaccatggccaaattctttgggattggacagaacagcattgtgaacctaacgattcaagtcatgatgctactaaatttgtgtgggattgcctcaatcaagatgacaatgagctgttgggattgcttggaaatcaaaccccattgagatactgccgtgatttcttcgctgaccttgatgatatcacatgcaaggagaccctggacctggaggaatctcgggaatcaaagcggcggcgcacattggagtaccctttggagtctagtcagtcagaagttgggactcatgaaaccggttcacctttcgtcacacctgaggtagcagaaatttcattgctctgcactgataaaccacagagcttaaattgtggtatgcaccacactttaaataatctagatacaataaattccttgtcagatgaagcaccctaccagcaagaagatatccttttggaacattgctcttatggaacggcagtgtaccttgagccagatcaaacaccttgtagccagcagagcattgcatgtacaaatgatcaagctggtatttcaggaaactaggaagctttctacactcaaagtctccaatggagcaagctcgtcactagttacgaaggacaacttaactacctcagtagcatatccttttactctcatcaaaccatcctggcaagaaggcgatgttaccttgcaggatataaatcggcgaatccgtcctcctaagaaggccccagagatccttggaacttcagcattctctggcaagccagtgattaacaagacaagaatcagaacagaaggagggaaaggaagcatcacaatactaagaacaaagggctgagaaccggaaaatacctttgatccttatttatctgctcctttgtggtcaattgtacaggtctgagcacttgaggctgccattgattcacagttcatggaacagagggcttagagcttgaggatgccattgattcttatttatctgccattctctcgattgcttttggcactctggtcaatgtgcaggcctcttagctttccagctgttactttttttctttcagttttgtaccgtgactttgtcttgtgaatagtattatgacatgtggatgtggtcaacgatatatacaaagcactaaagttaatggaattagtgtgttaaattccatgtacttgagtctgttcaagctctgtgccgagaaaatttcttatatgacactagc

SEQ ID NO: 20660 - DNA, 1404 bp, Zea Mays
ggccgacgggtcgtgcggtcgtgcccaacggccttctcagcccatctcgtgcccacgtccctcttcccatttctgaccaacccctcttcatccctcggactacaaatgcggcgcaaccgtgagcgcagctgcagttggggagtgtgcagcatctttgggattggacagaacagcattgtgaacctaacgattcaagtcatgcagatgctactaaatttgtgtgggattgcctcaatcaagatgacaatgagctgttgggattgcttggaaatcaaaccccattgagatactgccgtgatttcttcgctgaccttgatgatatcacatgcaaggagaccctggacctggaggaatctcgggaatcaaagcggcggcgcacattggagtaccctttggagtctagtcagtcagaagttgggactcatgaaaccggttcacctttcgtcacacctgaggtagcagaaatttcattgctctgcactgataaaccacagagcttaaattgtggtatgcaccacactttaaataatctagatacaataaattccttgtcagatgaagcaccctaccagcaagaagatatccttttggaacattgctcttatggaacggcagtgtaccttgagccagatcaaacaccttgtagccagcagagcattgcatgtacaaatgatcaagctggtatttcaggaacaagtgagattgcaccaatgacagaaagtttcataatgcaggaaactaggaagctttctacactcaaagtctccaatggagcaagctcgtcactagttacgaaggacaacttaactacctcagtagcatatccttttactctcatcaaaccatcctggcaagaaggcgatgttaccttgcaggatataaatcggcgaatccgtcctcctaagaaggccccagagatccttggaacttcagcattctctggcaagccagtgattaacaagacaagaatcagaacagaaggagggaaaggaagcatcacaatactaagaacaaagggctgagaaccggaaaatacctttgatccttatttatctgctcctttgtggtcaattgtacaggtctgagcacttgaggctgccattgattcacagttcatggaacagagggcttagagcttgaggatgccattgattcttatttatctgccattctctcgattgcttttggcactctggtcaatgtgcaggcctcttagctttccagctgttactttttttctttcagttttgtaccgtgactttgtcttgtgaatagtattatgacatgtggatgtggtcaacgatatatacaaagcactaaagttaatggaattagtgtgttaaattccatgtacttgagtctgttcaagctctgtgccgagaaaatttcttatatgacactagc

SEQ ID NO: 20661 - DNA, 1383 bp, Zea Mays
ggccgacgggtcgtgcggtcgtgcccaacggccttctcagcccatctcgtgcccacgtccctcttcccatttctgaccaacccctcttcatccctcggactacaaatgcggcgcaaccgtgagcgcagctgcagttggggagtgtgcagcatctttgggattggacagaacagcattgtgaacctaacgattcaagtcatgcagatgctactaaatttgtgtgggattgcctcaatcaagatgacaatgagctgttgggattgcttggaaatcaaaccccattgagatactgccgtgatttcttcgctgaccttgatgatatcacatgcaaggagaccctggacctggaggaatctcgggaatcaaagcggcggcgcacattggagtaccctttggagtctagtcagtcagaagttgggactcatgaaaccggttcacctttcgtcacacctgaggtagcagaaatttcattgctctgcactgataaaccacagagcttaaattgtggtatgcaccacactttaaataatctagatgaagcaccctaccagcaagaagatatccttttggaacattgctcttatggaacggcagtgtaccttgagccagatcaaacaccttgtagccagcagagcattgcatgtacaaatgatcaagctggtatttcaggaacaagtgagattgcaccaatgacagaaagtttcataatgcaggaaactaggaagctttctacactcaaagtctccaatggagcaagctcgtcactagttacgaaggacaacttaactacctcagtagcatatccttttactctcatcaaaccatcctggcaagaaggcgatgttaccttgcaggatataaatcggcgaatccgtcctcctaagaaggccccagagatccttggaacttcagcattctctggcaagccagtgattaacaagacaagaatcagaacagaaggagggaaaggaagcatcacaatactaagaacaaagggctgagaaccggaaaatacctttgatccttatttatctgctcctttgtggtcaattgtacaggtctgagcacttgaggctgccattgattcacagttcatggaacagagggcttagagcttgaggatgccattgattcttatttatctgccattctctcgattgcttttggcactctggtcaatgtgcaggcctcttagctttccagctgttactttttttctttcagttttgtaccgtgactttgtcttgtgaatagtattatgacatgtggatgtggtcaacgatatatacaaagcactaaagttaatggaattagtgtgttaaattccatgtacttgagtctgttcaagctctgtgccgagaaaatttcttatatgacactagc

SEQ ID NO: 20662 - DNA, 1401 bp, Zea Mays
ggccgacgggtcgtgcggtcgtgcccaacggccttctcagcccatctcgtgcccacgtccctcttcccatttctgaccaacccctcttcatccctcggactacaaatgcggcgcaaccgtgagcgcagctgcagttggggagtgtgcagcatctttgggattggacagaacagcattgtgaacctaacgattcaagtcatgatgctactaaatttgtgtgggattgcctcaatcaagatgacaatgagctgttgggattgcttggaaatcaaaccccattgagatactgccgtgatttcttcgctgaccttgatgatatcacatgcaaggagaccctggacctggaggaatctcgggaatcaaagcggcggcgcacattggagtaccctttggagtctagtcagtcagaagttgggactcatgaaaccggttcacctttcgtcacacctgaggtagcagaaatttcattgctctgcactgataaaccacagagcttaaattgtggtatgcaccacactttaaataatctagatacaataaattccttgtcagatgaagcaccctaccagcaagaagatatccttttggaacattgctcttatggaacggcagtgtaccttgagccagatcaaacaccttgtagccagcagagcattgcatgtacaaatgatcaagctggtatttcaggaacaagtgagattgcaccaatgacagaaagtttcataatgcaggaaactaggaagctttctacactcaaagtctccaatggagcaagctcgtcactagttacgaaggacaacttaactacctcagtagcatatccttttactctcatcaaaccatcctggcaagaaggcgatgttaccttgcaggatataaatcggcgaatccgtcctcctaagaaggccccagagatccttggaacttcagcattctctggcaagccagtgattaacaagacaagaatcagaacagaaggagggaaaggaagcatcacaatactaagaacaaagggctgagaaccggaaaatacctttgatccttatttatctgctcctttgtggtcaattgtacaggtctgagcacttgaggctgccattgattcacagttcatggaacagagggcttagagcttgaggatgccattgattcttatttatctgccattctctcgattgcttttggcactctggtcaatgtgcaggcctcttagctttccagctgttactttttttctttcagttttgtaccgtgactttgtcttgtgaatagtattatgacatgtggatgtggtcaacgatatatacaaagcactaaagttaatggaattagtgtgttaaattccatgtacttgagtctgttcaagctctgtgccgagaaaatttcttatatgacactagc

SEQ ID NO: 20663 - DNA, 1547 bp, Zea Mays
ggccgacgggtcgtgcggtcgtgcccaacggccttctcagcccatctcgtgcccacgtccctcttcccatttctgaccaacccctcttcatccctcggactacaaatgcggcgcaaccgtgagcgcagctgcagttggggagtgtgcagcagtatgttctcggtctcgccatcgcatctcgcagagtagacactcaaatccgattgtcgagggggagaaggtggagatcgttgtaacggctagttgcgtcggcccgatggacccgtcgtaccatggcggcggcgccgccggtggaagcgccgacgaccatggccaaattctttgggattggacagaacagcattgtgaacctaacgattcaagtcatgatgctactaaatttgtgtgggattgcctcaatcaagatgacaatgagctgttgggattgcttggaaatcaaaccccattgagatactgccgtgatttcttcgctgaccttgatgatatcacatgcaaggagaccctggacctggaggaatctcgggaatcaaagcggcggcgcacattggagtaccctttggagtctagtcagtcagaagttgggactcatgaaaccggttcacctttcgtcacacctgaggtagcagaaatttcattgctctgcactgataaaccacagagcttaaattgtggtatgcaccacactttaaataatctagatgaagcaccctaccagcaagaagatatccttttggaacattgctcttatggaacggcagtgtaccttgagccagatcaaacaccttgtagccagcagagcattgcatgtacaaatgatcaagctggtatttcaggaacaagtgagattgcaccaatgacagaaagtttcataatgcaggaaactaggaagctttctacactcaaagtctccaatggagcaagctcgtcactagttacgaaggacaacttaactacctcagtagcatatccttttactctcatcaaaccatcctggcaagaaggcgatgttaccttgcaggatataaatcggcgaatccgtcctcctaagaaggccccagagatccttggaacttcagcattctctggcaagccagtgattaacaagacaagaatcagaacagaaggagggaaaggaagcatcacaatactaagaacaaagggctgagaaccggaaaatacctttgatccttatttatctgctcctttgtggtcaattgtacaggtctgagcacttgaggctgccattgattcacagttcatggaacagagggcttagagcttgaggatgccattgattcttatttatctgccattctctcgattgcttttggcactctggtcaatgtgcaggcctcttagctttccagctgttactttttttctttcagttttgtaccgtgactttgtcttgtgaatagtattatgacatgtggatgtggtcaacgatatatacaaagcactaaagttaatggaattagtgtgttaaattccatgtacttgagtctgttcaagctctgtgccgagaaaatttcttatatgacactagc

SEQ ID NO: 20664 - DNA, 1885 bp, Zea Mays
gcccgccaccaccatggcctctcctttcccctgcccgcgcctccggccggcgcgtgccgcccccgtgctggacgaccgacgagacactcgcgctcgcgcgggcctacaccgcacgccgcctcgccgtcggccgggagcgcctgacctccgctgactgggccgccgtcgccgcggccgccccgtctaagacggccaggcagtgccgccacaaggtcgagaagctccgccgacgcctccgatccaactgccgccgcccgtgcccgctcctcgacgccatcgacctcctcgacgttccttccccgcccttcttctccaagtcccagtcccgatccacgtcccggtcctcgtcgccgccggcggcggcggtctcttcgccgtttcccccttcccctcccgcatccccgcccagaaagaggcggcgggactatgccggggacgaggaagaggaggctcatggacctcggccggggctggcgaggctggtcgaccacggctggggctcgcacaccaccgtcctcgccgacacgatggggtacatggacccggagtgcatggtcaccggcagggccaacgccgagtcggacgtctacagcttcggcgtcgtccttctggagatcgcgtgcggccggcgccccctggtgcctcgccacggcgtgggaatgcgaatccctcgcctacgcctccaaatcgtcgaagccgcatcccataatagcaaatttctctttctcgcctcgtgcgctccgcccgctggcatcgtgctcgttgagtttccaaagtctcagccaccccagtatactcctccggatccgtgttccatcacggctacaaaaatactccgcctgcatctccaaagcacacggctccctctggtttcccgcctcctcttcacctccttcgcgtcccgacgctccctcatggccgccgctgccgcagcagcagcagcagtttcctccccgattgctccacgcgctgtggccgccgcggcctcccgccgggggttcgtcacgtttggtggaggcgccgcccgctcctcgcccacgctgcggtccggccgcgggttctctggtgtgcaaacccatgttgccgctgttgaacaagcagttgtaaaagatgctacgaagctggaagctccagttgttgttgttacaggtgcctctagagggattggaaaggcaactgctctagcccttggaaaagcaggatgcaaggttctggtaaattatgctcggtcttcgaaagaggctgaagaggtctccaaagagattgaagcatctggtggtgaggctatcacctttggaggagatgtttcaaaagaagctgatgtagagtctatgatgaaagcagctctagataaatggggaacgatagatgtgctggtaaataatgcaggaattacacgagacacattattgatgaggatgaagaaatctcagtggcaagatgtaattgatctgaatcttacaggcgtctgcctgtgtacacaggctgcaacaaaagtaatgatgaagaagaaaaaggggaaaattatcaacattgcatccgtcgttggccttactggcaatgttggccaagctaattatagtgcagccaaggctggggtgaatgctattgcaccagggtttattgcatctgatatgactgccgaacttggagaagagcttgagaagaaaatcttgtcaaccattccattagggagatatggccaaccagaggaagttgcagggttagtcgagttcctggcccttagccctgcagctagctatatgaccggacaggcgacgttggttcactttcttgtgcacgggcgattttgggcaacggaattagggttctctttttcttttaatactcaccgtggataaaccaggcatgtggaagttgaaat

SEQ ID NO: 20665 - DNA, 1046 bp, Zea Mays
atggagctcaagcgcgtcctggtcgcgccaacagcagcacgccgagctccaacggtccctcccaccacctctggtgcgaccgctctgccccctgcagggctcggtctccttcccccactgccggaagctatcccctggccctccagcggtgtgcaaacccatgttgccgctgttgaacaagcagttgtaaaagatgctacgaagctggaagctccagttgttgttgttacaggtgcctctagagggattggaaaggcaactgctctagcccttggaaaagcaggatgcaaggttctggtaaattatgctcggtcttcgaaagaggctgaagaggtctccaaagagattgaagcatctggtggtgaggctatcacctttggaggagatgtttcaaaagaagctgatgtagagtctatgatgaaagcagctctagataaatggggaacgatagatgtgctggtaaataatgcaggaattacacgagacacattattgatgaggatgaagaaatctcagtggcaagatgtaattgatctgaatcttacaggcgtctgcctgtgtacacaggctgcaacaaaagtaatgatgaagaagaaaaaggggaaaattatcaacattgcatccgtcgttggccttactggcaatgttggccaagctaattatagtgcagccaaggctggggtgaatgctattgcaccagggtttattgcatctgatatgactgccgaacttggagaagagcttgagaagaaaatcttgtcaaccattccattagggagatatggccaaccagaggaagttgcagggttagtcgagttcctggcccttagccctgcagctagctatatgaccggacaggtgcttacaattgacggagggatggtaatgtaaggttcgagttggcttgatgcacttctacttttgcttaacatttaggcgacgttggttcactttcttgtgcacgggcgattttgggcaacggaattagggttctctttttcttttaatactcaccgtggataaaccaggcatgtggaagttgaaat

SEQ ID NO: 20666 - DNA, 1027 bp, Zea Mays
atggagctcaagcgcgtcctggtcgcgccaacagcagcacgccgagctccaacggtccctcccaccacctctggtgcgaccgctctgccccctgcagggctcggtctccttcccccactgccggaagctatcccctggccctccagcggtgtgcaaacccatgttgccgctgttgaacaagcagttgtaaaagatgctacgaagctggaagctccagttgttgttgttacaggtgcctctagagggattggaaaggcaactgctctagcccttggaaaagcaggatgcaaggttctggtaaattatgctcggtcttcgaaagaggctgaagaggtctccaaagagattgaagcatctggtggtgaggctatcacctttggaggagatgtttcaaaagaagctgatgtagagtctatgatgaaagcagctctagataaatggggaacgatagatgtgctggtaaataatgcaggaattacacgagacacattattgatgaggatgaagaaatctcagtggcaagatgtaattgatctgaatcttacaggcgtctgcctgtgtacacaggctgcaacaaaagtaatgatgaagaagaaaaaggggaaaattatcaacattgcatccgtcgttggccttactggcaatgttggccaagctaattatagtgcagccaaggctggggtgattggtttcacgaaaacagttgccagggagtatgcaagcagaaatatcaatgtgaatgctattgcaccagggtttattgcatctgatatgactgccgaacttggagaagagcttgagaagaaaatcttgtcaaccattccattagggagatatggccaaccagaggaagttgcagggttagtcgagttcctggcccttagccctgcagctagctatatgaccggacagtttaggcgacgttggttcactttcttgtgcacgggcgattttgggcaacggaattagggttctctttttcttttaatactcaccgtggataaaccaggcatgtggaagttgaaat

SEQ ID NO: 20667 - DNA, 1100 bp, Zea Mays
atggagctcaagcgcgtcctggtcgcgccaacagcagcacgccgagctccaacggtccctcccaccacctctggtgcgaccgctctgccccctgcagggctcggtctccttcccccactgccggaagctatcccctggccctccagcggtgtgcaaacccatgttgccgctgttgaacaagcagttgtaaaagatgctacgaagctggaagctccagttgttgttgttacaggtgcctctagagggattggaaaggcaactgctctagcccttggaaaagcaggatgcaaggttctggtaaattatgctcggtcttcgaaagaggctgaagaggtctccaaagagattgaagcatctggtggtgaggctatcacctttggaggagatgtttcaaaagaagctgatgtagagtctatgatgaaagcagctctagataaatggggaacgatagatgtgctggtaaataatgcaggaattacacgagacacattattgatgaggatgaagaaatctcagtggcaagatgtaattgatctgaatcttacaggcgtctgcctgtgtacacaggctgcaacaaaagtaatgatgaagaagaaaaaggggaaaattatcaacattgcatccgtcgttggccttactggcaatgttggccaagctaattatagtgcagccaaggctggggtgattggtttcacgaaaacagttgccagggagtatgcaagcagaaatatcaatgtgaatgctattgcaccagggtttattgcatctgatatgactgccgaacttggagaagagcttgagaagaaaatcttgtcaaccattccattagggagatatggccaaccagaggaagttgcagggttagtcgagttcctggcccttagccctgcagctagctatatgaccggacaggtgcttacaattgacggagggatggtaatgtaaggttcgagttggcttgatgcacttctacttttgcttaacatttaggcgacgttggttcactttcttgtgcacgggcgattttgggcaacggaattagggttctctttttcttttaatactcaccgtggataaaccaggcatgtggaagttgaaat

SEQ ID NO: 20668 - DNA, 707 bp, Zea Mays
ctcctctccctcaaatctctcaagccgccgattgaagcatctggtggtgaggctatcacctttggaggagatgtttcaaaagaagctgatgtagagtctatgatgaaagcagctctagataaatggggaacgatagatgtgctggtaaataatgcaggaattacacgagacacattattgatgaggatgaagaaatctcagtggcaagatgtaattgatctgaatcttacaggcgtctgcctgtgtacacaggctgcaacaaaagtaatgatgaagaagaaaaaggggaaaattatcaacattgcatccgtcgttggccttactggcaatgttggccaagctaattatagtgcagccaaggctggggtgattggtttcacgaaaacagttgccagggagtatgcaagcagaaatatcaatgtgaatgctattgcaccagggtttattgcatctgatatgactgccgaacttggagaagagcttgagaagaaaatcttgtcaaccattccattagggagatatggccaaccagaggaagttgcagggttagtcgagttcctggcccttagccctgcagctagctatatgaccggacaggcgacgttggttcactttcttgtgcacgggcgattttgggcaacggaattagggttctctttttcttttaatactcaccgtggataaaccaggcatgtggaagttgaaat

SEQ ID NO: 20669 - DNA, 2033 bp, Zea Mays
ctagagacttcacgcaggcagtcttcaccgcgcggcggcctcatacccgcaggcagttttcaccgcgcggtggcctcatccccgccggcgagcctccactctcctccgccgatcacatctcatgattccagtgagaattcgaaaaggaggaagcaatgacggaggtggcgctcctccggggcccgaccaacctcgcttccaccaagcggcagccccgagcgcactgcgggatctgctaggagccggcgactccttgaacagcatgggcaagaggccgtggaggaggaagaggagcggtggtcgttcttggcactgctcttcgagctgttgcagaagtcgctgctcgggtgcaggacggtgggcggcggcggtgaaggcgaacacggcggcggcgggatggagattgggctgcccacggacgtgcaacatgtcgcgcacgtcacgtttgacaggttccatggattcctggggctgcccgttgaattcaagcccgaagtgcccctccgtgctcccagcgtgaggtatgactcttagtgtccatcgtcaatttagattaattttaagttcacgcttccagaaatctgactttatttttgcagaatttacttatgcaataacatgaacttttttagctccaatttgaactttaacttgagggtgtttgcagttttcttcttttaattccaagtatgtctggtgctttggtaattgatatgaacagttgataacaataagtattagattatgttcttttagaaagctgtaaaatctagatgatgtttgcttgacacaggttcgttaatagttcatcactctttagcattttgatggcatgctcgtttccgcaatatagttttgatccttgaaaagtagtcccttttgtttgtgttacagcctccatgctcccttgatctgaaatatcattgaaaaagcaaaattttaagtggaatttgagtttcgtttgaattgtgttatgaagtatgaagttggttttcgtgttggcggccttagcaggatctgaactacggttgatgaaatgggcatgtcttctgatagtggatatgctttggaccgcaactgttcatagaaataatttctgtgttttttcccatgttccatcaaacaattggtcaatcatttcgctgatgcaatcttgtagcatccatgattttactgtacttgcttacctcatctaagaattattccgattgtactaggtacataaagttgattgttacatcatctgtcattagtaagattggaaagttgccagggattccatgatttatgtatggcctattttgtattgattagattattcactatttttctctagacttgcaaattactttggtttttacctttttttctatccttcatctattgttcgtacagtagaccttggcttcaaatacttggtatattattttttgtcccatataacagagctagaaatattgccagcagccgagcacatatgactccatatattgtaggaatatttctttatcagaatatgatccaagaccacctgaaggaacaatttccaattctgaacatgaaagatgagtgtaatgctaatgcatgaatctgaaagtgcaggattttcgaaccagtgcaggatggggcacaggttggctcctgtcaagtgccaataacttccgtactaaattctaaatgctggtgaatagaagttcaccaagaagacaatgaaaaaaaactagaccaacaaggaggaactaggcagcttttatatcaagaaaataggcacccaatttgcctggacaagtacttgaatgtgggtggtataggaacaccacaaagcacaaacaactgagcctgttcagctgccttagccaggaacccactgagagaacaataccaatattgggccaaaaaaatgttgtcaaatcatgtctggcaatttggaagttgcgaagttagttaaaaaaactgtgtgaaagatatgtttatggacatgaatgaactcagttacaagaaaattcatcaataaatttgcaaaattgtaataa

SEQ ID NO: 20670 - DNA, 1685 bp, Zea Mays
ctagagacttcacgcaggcagtcttcaccgcgcggcggcctcatacccgcaggcagttttcaccgcgcggtggcctcatccccgccggcgagcctccactctcctccgccggtaagcctccaccgccccatcgatcgctcctcacccgccggtggcctccccctcggcggacatttcttggtgcatttggccccccccccctccaccaccagcgaaatttacccatcccgaatcgccccccaaaatcggtcctacaccgcaccagatcacatctcatgattccagtgagaattcgaaaaggaggaagcaatgacggaggtggcgctcctccggggcccgaccaacctcgcttccaccccccgagcgcactgcgggatctgctaggagccggcgactccttgaacagcatgggcaagaggccgtggaggaggaagaggagcggtggtcgttcttggcactgctcttcgagctgttgcagaagtcgctgctcgggtgcaggacggtgggcggcggcggtgaaggcgaacacggcggcggcgggatggagattgggctgcccacggacgtgcaacatgtcgcgcacgtcacgtttgacaggttccatggattcctggggctgcccgttgaattcaagcccgaagtgcccctccgtgctcccagcgtgaggatctgaactacggttgatgaaatgggcatgtcttctgatagtggatatgctttggaccgcaactgttcatagaaataatttctgtgttttttcccatgttccatcaaacaattggtcaatcatttcgctgatgcaatcttgtagcatccatgattttactgtacttgcttacctcatctaagaattattccgattgtactaggtacataaagttgattgttacatcatctgtcattagtaagattggaaagttgccagggattccatgatttatgtatggcctattttgtattgattagattattcactatttttctctagacttgcaaattactttggtttttacctttttttctatccttcatctattgttcgtacagtagaccttggcttcaaatacttggtatattattttttgtcccatataacagagctagaaatattgccagcagccgagcacatatgactccatatattgtaggaatatttctttatcagaatatgatccaagaccacctgaaggaacaatttccaattctgaacatgaaagatgagtgtaatgctaatgcatgaatctgaaagtgcaggattttcgaaccagtgcaggatggggcacaggttggctcctgtcaagtgccaataacttccgtactaaattctaaatgctggtgaatagaagttcaccaagaagacaatgaaaaaaaactagaccaacaaggaggaactaggcagcttttatatcaagaaaataggcacccaatttgcctggacaagtacttgaatgtgggtggtataggaacaccacaaagcacaaacaactgagcctgttcagctgccttagccaggaacccactgagagaacaataccaatattgggccaaaaaaatgttgtcaaatcatgtctggcaatttggaagttgcgaagttagttaaaaaaactgtgtgaaagatatgtttatggacatgaatgaactcagttacaagaaaattcatcaataaatttgcaaaattgtaataa

SEQ ID NO: 20671 - DNA, 1694 bp, Zea Mays
ctagagacttcacgcaggcagtcttcaccgcgcggcggcctcatacccgcaggcagttttcaccgcgcggtggcctcatccccgccggcgagcctccactctcctccgccggtaagcctccaccgccccatcgatcgctcctcacccgccggtggcctccccctcggcggacatttcttggtgcatttggccccccccccctccaccaccagcgaaatttacccatcccgaatcgccccccaaaatcggtcctacaccgcaccagatcacatctcatgattccagtgagaattcgaaaaggaggaagcaatgacggaggtggcgctcctccggggcccgaccaacctcgcttccaccaagcggcagccccgagcgcactgcgggatctgctaggagccggcgactccttgaacagcatgggcaagaggccgtggaggaggaagaggagcggtggtcgttcttggcactgctcttcgagctgttgcagaagtcgctgctcgggtgcaggacggtgggcggcggcggtgaaggcgaacacggcggcggcgggatggagattgggctgcccacggacgtgcaacatgtcgcgcacgtcacgtttgacaggttccatggattcctggggctgcccgttgaattcaagcccgaagtgcccctccgtgctcccagcgtgaggatctgaactacggttgatgaaatgggcatgtcttctgatagtggatatgctttggaccgcaactgttcatagaaataatttctgtgttttttcccatgttccatcaaacaattggtcaatcatttcgctgatgcaatcttgtagcatccatgattttactgtacttgcttacctcatctaagaattattccgattgtactaggtacataaagttgattgttacatcatctgtcattagtaagattggaaagttgccagggattccatgatttatgtatggcctattttgtattgattagattattcactatttttctctagacttgcaaattactttggtttttacctttttttctatccttcatctattgttcgtacagtagaccttggcttcaaatacttggtatattattttttgtcccatataacagagctagaaatattgccagcagccgagcacatatgactccatatattgtaggaatatttctttatcagaatatgatccaagaccacctgaaggaacaatttccaattctgaacatgaaagatgagtgtaatgctaatgcatgaatctgaaagtgcaggattttcgaaccagtgcaggatggggcacaggttggctcctgtcaagtgccaataacttccgtactaaattctaaatgctggtgaatagaagttcaccaagaagacaatgaaaaaaaactagaccaacaaggaggaactaggcagcttttatatcaagaaaataggcacccaatttgcctggacaagtacttgaatgtgggtggtataggaacaccacaaagcacaaacaactgagcctgttcagctgccttagccaggaacccactgagagaacaataccaatattgggccaaaaaaatgttgtcaaatcatgtctggcaatttggaagttgcgaagttagttaaaaaaactgtgtgaaagatatgtttatggacatgaatgaactcagttacaagaaaattcatcaataaatttgcaaaattgtaataa

SEQ ID NO: 20672 - DNA, 2030 bp, Zea Mays
ctagagacttcacgcaggcagtcttcaccgcgcggcggcctcatacccgcaggcagttttcaccgcgcggtggcctcatccccgccggcgagcctccactctcctccgccgatcacatctcatgattccagtgagaattcgaaaaggaggaagcaatgacggaggtggcgctcctccggggcccgaccaacctcgcttccacccggcagccccgagcgcactgcgggatctgctaggagccggcgactccttgaacagcatgggcaagaggccgtggaggaggaagaggagcggtggtcgttcttggcactgctcttcgagctgttgcagaagtcgctgctcgggtgcaggacggtgggcggcggcggtgaaggcgaacacggcggcggcgggatggagattgggctgcccacggacgtgcaacatgtcgcgcacgtcacgtttgacaggttccatggattcctggggctgcccgttgaattcaagcccgaagtgcccctccgtgctcccagcgtgaggtatgactcttagtgtccatcgtcaatttagattaattttaagttcacgcttccagaaatctgactttatttttgcagaatttacttatgcaataacatgaacttttttagctccaatttgaactttaacttgagggtgtttgcagttttcttcttttaattccaagtatgtctggtgctttggtaattgatatgaacagttgataacaataagtattagattatgttcttttagaaagctgtaaaatctagatgatgtttgcttgacacaggttcgttaatagttcatcactctttagcattttgatggcatgctcgtttccgcaatatagttttgatccttgaaaagtagtcccttttgtttgtgttacagcctccatgctcccttgatctgaaatatcattgaaaaagcaaaattttaagtggaatttgagtttcgtttgaattgtgttatgaagtatgaagttggttttcgtgttggcggccttagcaggatctgaactacggttgatgaaatgggcatgtcttctgatagtggatatgctttggaccgcaactgttcatagaaataatttctgtgttttttcccatgttccatcaaacaattggtcaatcatttcgctgatgcaatcttgtagcatccatgattttactgtacttgcttacctcatctaagaattattccgattgtactaggtacataaagttgattgttacatcatctgtcattagtaagattggaaagttgccagggattccatgatttatgtatggcctattttgtattgattagattattcactatttttctctagacttgcaaattactttggtttttacctttttttctatccttcatctattgttcgtacagtagaccttggcttcaaatacttggtatattattttttgtcccatataacagagctagaaatattgccagcagccgagcacatatgactccatatattgtaggaatatttctttatcagaatatgatccaagaccacctgaaggaacaatttccaattctgaacatgaaagatgagtgtaatgctaatgcatgaatctgaaagtgcaggattttcgaaccagtgcaggatggggcacaggttggctcctgtcaagtgccaataacttccgtactaaattctaaatgctggtgaatagaagttcaccaagaagacaatgaaaaaaaactagaccaacaaggaggaactaggcagcttttatatcaagaaaataggcacccaatttgcctggacaagtacttgaatgtgggtggtataggaacaccacaaagcacaaacaactgagcctgttcagctgccttagccaggaacccactgagagaacaataccaatattgggccaaaaaaatgttgtcaaatcatgtctggcaatttggaagttgcgaagttagttaaaaaaactgtgtgaaagatatgtttatggacatgaatgaactcagttacaagaaaattcatcaataaatttgcaaaattgtaataa

SEQ ID NO: 20673 - DNA, 1106 bp, Zea Mays
ctagagacttcacgcaggcagtcttcaccgcgcggcggcctcatacccgcaggcagttttcaccgcgcggtggcctcatccccgccggcgagcctccactctcctccgccggtaagcctccaccgccccatcgatcgctcctcacccgccggtggcctccccctcggcggacatttcttggtgcatttggccccccccccctccaccaccagcgaaatttacccatcccgaatcgccccccaaaatcggtcctacaccgcaccagatcacatctcatgattccagtgagaattcgaaaaggaggaagcaatgacggaggtggcgctcctccggggcccgaccaacctcgcttccaccaagcggcagccccgagcgcactgcgggatctgctaggagccggcgactccttgaacagcatgggcaagaggccgtggaggaggaagaggagcggtggtcgttcttggcactgctcttcgagctgttgcagaagtcgctgctcgggtgcaggacggtgggcggcggcggtgaaggcgaacacggcggcggcgggatggagattgggctgcccacggacgtgcaacatgtcgcgcacgtcacgtttgacaggttccatggattcctggggctgcccgttgaattcaagcccgaagtgcccctccgtgctcccagcgtgaggattttcgaaccagtgcaggatggggcacaggttggctcctgtcaagtgccaataacttccgtactaaattctaaatgctggtgaatagaagttcaccaagaagacaatgaaaaaaaactagaccaacaaggaggaactaggcagcttttatatcaagaaaataggcacccaatttgcctggacaagtacttgaatgtgggtggtataggaacaccacaaagcacaaacaactgagcctgttcagctgccttagccaggaacccactgagagaacaataccaatattgggccaaaaaaatgttgtcaaatcatgtctggcaatttggaagttgcgaagttagttaaaaaaactgtgtgaaagatatgtttatggacatgaatgaactcagttacaagaaaattcatcaataaatttgcaaaattgtaataa

SEQ ID NO: 20674 - DNA, 710 bp, Zea Mays
ctagagacttcacgcaggcagtcttcaccgcgcggcggcctcatacccgcaggcagttttcaccgcgcggtggcctcatccccgccggcgagcctccactctcctccgccggacggtgggcggcggcggtgaaggcgaacacggcggcggcgggatggagattgggctgcccacggacgtgcaacatgtcgcgcacgtcacgtttgacaggttccatggattcctggggctgcccgttgaattcaagcccgaagtgcccctccgtgctcccagcgtgaggattttcgaaccagtgcaggatggggcacaggttggctcctgtcaagtgccaataacttccgtactaaattctaaatgctggtgaatagaagttcaccaagaagacaatgaaaaaaaactagaccaacaaggaggaactaggcagcttttatatcaagaaaataggcacccaatttgcctggacaagtacttgaatgtgggtggtataggaacaccacaaagcacaaacaactgagcctgttcagctgccttagccaggaacccactgagagaacaataccaatattgggccaaaaaaatgttgtcaaatcatgtctggcaatttggaagttgcgaagttagttaaaaaaactgtgtgaaagatatgtttatggacatgaatgaactcagttacaagaaaattcatcaataaatttgcaaaattgtaataa

SEQ ID NO: 20675 - DNA, 2013 bp, Zea Mays
ctagagacttcacgcaggcagtcttcaccgcgcggcggcctcatacccgcaggcagttttcaccgcgcggtggcctcatccccgccggcgagcctccactctcctccgccgtgagaattcgaaaaggaggaagcaatgacggaggtggcgctcctccggggcccgaccaacctcgcttccaccaagcggcagccccgagcgcactgcgggatctgctaggagccggcgactccttgaacagcatgggcaagaggccgtggaggaggaagaggagcggtggtcgttcttggcactgctcttcgagctgttgcagaagtcgctgctcgggtgcaggacggtgggcggcggcggtgaaggcgaacacggcggcggcgggatggagattgggctgcccacggacgtgcaacatgtcgcgcacgtcacgtttgacaggttccatggattcctggggctgcccgttgaattcaagcccgaagtgcccctccgtgctcccagcgtgaggtatgactcttagtgtccatcgtcaatttagattaattttaagttcacgcttccagaaatctgactttatttttgcagaatttacttatgcaataacatgaacttttttagctccaatttgaactttaacttgagggtgtttgcagttttcttcttttaattccaagtatgtctggtgctttggtaattgatatgaacagttgataacaataagtattagattatgttcttttagaaagctgtaaaatctagatgatgtttgcttgacacaggttcgttaatagttcatcactctttagcattttgatggcatgctcgtttccgcaatatagttttgatccttgaaaagtagtcccttttgtttgtgttacagcctccatgctcccttgatctgaaatatcattgaaaaagcaaaattttaagtggaatttgagtttcgtttgaattgtgttatgaagtatgaagttggttttcgtgttggcggccttagcaggatctgaactacggttgatgaaatgggcatgtcttctgatagtggatatgctttggaccgcaactgttcatagaaataatttctgtgttttttcccatgttccatcaaacaattggtcaatcatttcgctgatgcaatcttgtagcatccatgattttactgtacttgcttacctcatctaagaattattccgattgtactaggtacataaagttgattgttacatcatctgtcattagtaagattggaaagttgccagggattccatgatttatgtatggcctattttgtattgattagattattcactatttttctctagacttgcaaattactttggtttttacctttttttctatccttcatctattgttcgtacagtagaccttggcttcaaatacttggtatattattttttgtcccatataacagagctagaaatattgccagcagccgagcacatatgactccatatattgtaggaatatttctttatcagaatatgatccaagaccacctgaaggaacaatttccaattctgaacatgaaagatgagtgtaatgctaatgcatgaatctgaaagtgcaggattttcgaaccagtgcaggatggggcacaggttggctcctgtcaagtgccaataacttccgtactaaattctaaatgctggtgaatagaagttcaccaagaagacaatgaaaaaaaactagaccaacaaggaggaactaggcagcttttatatcaagaaaataggcacccaatttgcctggacaagtacttgaatgtgggtggtataggaacaccacaaagcacaaacaactgagcctgttcagctgccttagccaggaacccactgagagaacaataccaatattgggccaaaaaaatgttgtcaaatcatgtctggcaatttggaagttgcgaagttagttaaaaaaactgtgtgaaagatatgtttatggacatgaatgaactcagttacaagaaaattcatcaataaatttgcaaaattgtaataa

SEQ ID NO: 20676 - DNA, 384 bp, Zea Mays
attctgccctctcaatacttaggacagatgtttttcaattctgtcctctcaattctgcttccaattatatttgtttgttacaaaatactttaaattgtcatttcatttaaactatttattgtaaactagaaagtatacatacatatagacagatttgtacacgtaatcatgtacaaaattcgccacacctcaaattttgtgcgtcctccgccactgctcgcccccacacctcgccctccatccacctccccaaatgacgtgccttcctggaattaaaaaggcagaagggaggccacacacgagaccaccaatcggacacacgcgagtacatccgacgcccaccatcagccagtgtacagagccgttgcgatgtccgtgcctctg

SEQ ID NO: 20677 - DNA, 1119 bp, Zea Mays
ctcaatacttaggacagatgtttttcaattctgtcctctcaattctgcttccaattatatttgtttgttacaaaatactttaaattgtcatttcatttaaactatttattgtaaactagaaagtatacatacatatagacagatttgtacacgtaatcatgtacaaaattcgccacacctcaaattttgtgcgtcctccgccactgctcgcccccacacctcgccctccatccacctccccaaatgacgtgccttcctggaattaaaaaggcagaagggaggccacacacgagaccaccaatcggacacacgcgagtacatccgacgcccaccatcagccagatagtgtacagagccgttgcgatgtccgtgcctctgcccccgcctcctccgccctcgcgacgcaacatcactgcaaacactctagcagtgctagaagccatggctgcacacaatgtgaggactctcatctactccagcacatgtgcgacctatggagagcctgacaagatgccctcgctgaaggaactccccaggtcaattatttccgttgggataagaaggaagaacaatcctctgatttgtacagattctgccgcctcatgaccaaattccgcaaggaatgtgaatcccttggccttgaggacttcccgacttcagaacggttgcgatagcacgatcatcagcccgggaagcctgactggtcagaggcaagccgattcgttgccttcaccatgaaggacgaaaccaaaggcgagatctacgtggccttcaacaccagtcacctgccggtggtcgtcgggcttctagagcgctctgggttccgatgggagccggtggtggacaccggcaaggaggcaccatatgacttcctcaccgatggcctgccagatcgtgctgtcaccgtctaccagttctctcatttcctcaactccaatctctatcctatgctcagctactcctccatcatccttgtattgcgccctgatgtctgaaagaaacggatacaatagagtatattgtagccgtagtatatattttctttgacttttctttgacttccttttgtagatctgccaaacacaaacacaactaagcaatgtagcacatactattggc

SEQ ID NO: 20678 - DNA, 707 bp, Zea Mays
ctctcatctactccagcacatgtgcgacctatggagagcctgacaagatgccctcgctgaaggaactccccagacctttggtattgttgtacacattggattcaataccacttctgttgtcccggtcaattatttccgttgggataagaaggaagaacaatcctctgatttgtacagattctgccgcctcatgaccaaattccgcaaggaatgtgaatcccttggccttgaggacttcccgacttcagaacggttgcgatagcacgatcatcagcccgggaagcctgactggtcagaggcaagccgattcgttgccttcaccatgaaggacgaaaccaaaggcgagatctacgtggccttcaacaccagtcacctgccggtggtcgtcgggcttctagagcgctctgggttccgatgggagccggtggtggacaccggcaaggaggcaccatatgacttcctcaccgatggcctgccagatcgtgctgtcaccgtctaccagttctctcatttcctcaactccaatctctatcctatgctcagctactcctccatcatccttgtattgcgccctgatgtctgaaagaaacggatacaatagagtatattgtagccgtagtatatattttctttgacttttctttgacttccttttgtagatctgccaaacacaaacacaactaagcaatgtagcacatactattggc

SEQ ID NO: 20679 - DNA, 2190 bp, Zea Mays
ggctcctgaagcactcttggccgcacgtgccactgccccaacccgccgccgcgcccgtacccttatttaaccccgccgctgcagcagccgccatcaacctttccctctcctctctgtttcatctcgccagctttgcgggaaaagagacaccagggacaagccccgcctcctctcccgagtcctgacgtgccccttttgctccggccccacttcctcgcaaaaccctaacccctcgatctcccaagatggcgtcgcagccgccgccccctgccgcagccgcggcatctggagctccgccgccggcacaagtggtgggcaacgccttcgtgcatcagtactacaacatcttgcaccagtcgccggagctcgtctaccgcttctaccaggaggccagctgcctcgggcgccccgccggcaccggtgccgacggcatggacacggtcaccaccatggacgcgattaacgacaagatcgtgtccatgggtatcgaccgggcggagatcaaggcggtggacgcgcaggaatcgctctgtggcggcgtcagcgtgctcgtcatgggtcatcttacggggaggaacagcgtcagccgccagttcgtgcagtccttcttcctcgcgccgcaggagaagggctactttgtgctcaacgacatactgcgctacgttggggaggggggaggggacgagggggctgagaagcagccagcacctgaggttgctgcggacgcggagacgaccacctctgcccctatcctgagtgccaggtggccgagcctgcacttaatccaaaggaggaagttctgaacggggaggtttgtaactcgctaagtgatgtggagaagcctgttgctgaggaaacgccggttcctgatgtcataaatgaagtgccaaataatgttgcagtggctccaccaatttcatcccctcctgtaccattgaaggaggcaccaaagaagtcatatgcttcaattgtaaaagtcatgaaagaacatcggccattagcacctgcagttccttccagacctgcacccccaataacagagaagcaagcctctcctgcccccactccagttactgaggctccagctttctcccctaatcctcagagcggcggctttcaagatccagaagttgatgcacatgccatatatgtgcgaagtctgccattaaatgccacaccacaacaattagaggaagagttcaagagatttggaaccattaaacatgaaggcatccaagttagaagcaacaagatccaagggttttgctatggctttgtagaatttgaggatgccagtgcagttcaagctgcaatagaggcttctcctgttactattggtgagcggcaatgctttgtcgaagagaaaaggactactggttctcgcggtggtagcaggggaggaaggtttccaccaggtagaggtggtaatttccgaggtgaaggcattagaggccgtggtacatacaatggaggcagagggtacggaaggggcgagttcagttaccgatccgattatggaggccgaggtggcggcaggggtggctcattacacggaggtgatgttggctatcagcgggtcgactactctggcacatccagtggacgtggtgcccgggcaccatcagcggccgctgctatggcaaagtgagttcttggtagctatgagtcggtagtagtttagttttgtggccaccatcacggttgaccaaaagagtggtgtggtgattcgagttcatgtgaggattatgaacaaaagtcaggtcataaattgatgcttccttgttttgtggcaaggcaaagcagtggtgatatcggttactaattgtagaatatacgtctgttgagatgtcctagtatgtctggcttcggtgagcaggcttacttgttgccaaattatagaggtttttttgagatgccagctatttatagtattttattgactgtcgttgaataagttttagggtctagcgctgcaaatatgagtatgatatttttcctgtttctggaatatgcatgcccactcatgtctgggaaatgtctgttccttttatgctgcctcttgccagcagctacattccgtgccagtagaatattggaatgtttgctgtcggaatgttttccgtttggctgagctctatttgcttgtaaaaatgagatttttaattgaaatcttgcattcaataggaaata

SEQ ID NO: 20680 - DNA, 840 bp, Zea Mays
aaataacaagataagttcaggctgaaaaccatgcggtggtagcaggggaggaaggtttccaccaggtagaggtggtaatttccgaggtgaaggcattagaggccgtggtacatacaatggaggcagagggtacggaaggggcgagttcagttaccgatccgattatggaggccgaggtggcggcaggggtggctcattacacggaggtgatgttggctatcagcgggtcgactactctggcacatccagtggacgtggtgcccgggcaccatcagcggccgctgctatggcaaagtgagttcttggtagctatgagtcggtagtagtttagttttgtggccaccatcacggttgaccaaaagagtggtgtggtgattcgagttcatgtgaggattatgaacaaaagtcaggtcataaattgatgcttccttgttttgtggcaaggcaaagcagtggtgatatcggttactaattgtagaatatacgtctgttgagatgtcctagtatgtctggcttcggtgagcaggcttacttgttgccaaattatagaggtttttttgagatgccagctatttatagtattttattgactgtcgttgaataagttttagggtctagcgctgcaaatatgagtatgatatttttcctgtttctggaatatgcatgcccactcatgtctgggaaatgtctgttccttttatgctgcctcttgccagcagctacattccgtgccagtagaatattggaatgtttgctgtcggaatgttttccgtttggctgagctctatttgcttgtaaaaatgagatttttaattgaaatcttgcattcaataggaaata

SEQ ID NO: 20681 - DNA, 1223 bp, Zea Mays
tgatgattgacttatctcacagactcacacacaagtgcacaactgaagtatgccattgtcgacaaattccatggctctaacaaacttgtgctcatgcccaagcagcagagctcatcagctgcagcttctatgcttctgcttggccctctcactgcatgtcccttatcatgccaattctctctccttcagctacagcttcttcaaccctgatgacttcaggccggaggacgacgcgcaggtcgtcgatggcaggatcgagctgctcggcgacgagttcagagggcgtgccagggggcgggtgtggcacaagcagccggtgcagctatgggacggcaccaccggcgaggctgccagcttcaccgcgaacttcagcttcagcatcgagtcagtggctggcaagggcgcggcaagcgctgggcacggcatgacgttcttcctcgcgccgtacacgccaaacttgccgcaggagtcctacgacggctgcctcggtctgttcgatgagagccaggcgcttaactactccaagttcaacgcgtccggcgactcgagataccagataattcttggattgtcttccgccgtgctgtaccttcaccaagagtgggaccagtgtgtcgtccatggcgacatcaaaccgagcaacatcatgctggacgagtccttcaacgccaagctcggcgacttcgggctggcacggctcatcgaccacggaatgagcctgcagaccatgactgccgtcgctggcacgccagggtacctggacccggagtgcgtcatcaccggcaaggcctcccccgagtccgacgtgtacagcttcggcatcgtgctgcttgaggtcgcctgcgggcgccggccgatggcgccgccagcgagcacgggcgagggcaaggacggccaggtgttccggttggtggagtgggcttgggacatgcgcggccggggcgccgctctagacgccgcggacgagcggcttggtggagccttcgacccgtgggagatggaacgcgtggtctccgtcgggctctggtgcgcgcacccggacccaaagatgcgaccgcggatccgccaggctgccgaggcactgcggtcgagaagcttcaggatgccgctcctgccgcccaagatgccggtcgccgtgtacctgcagccgttcggtccctccaccctgcacttcagcgacaccaccacctccgtcgggtcttctgttaccgtgcccagatgcg

SEQ ID NO: 20682 - DNA, 2574 bp, Zea Mays
ctagagatttccatcgcacacctctctagtctccatctgccgggacgccgcatcttgcttcgtctcgctttgttcctctccacgtcacttgggtttcgtcggcgtcaaggactccgcttccgcccgaagacttcgccttctcttggcttgctcaccggctgcgtctctttggttagatacgtttttctccattgtctttcgtcgtccctttcgattcggtcgatacctggatccagatccgttcgtcgatcatatccagcctcctctacttgagatcctctcgctttttggagatcatgttgcttcggtgcgtggagattgagatctaaacgacaagtatttttcttttggttaactggttcgcaagaagtgtagatggacatctggttccaaatttgttcttcgatcatatctagctgccagcttggtcgtcgacacgtttatttccacagttgtgctcccattcttgcttcgtcgattgtttcgttttggtgcacagctgatcttgtttgtgtcaaatgcataaggttgtctcaggtcggagatttccgattgtgctcattgcaaccaagacgaagaagacgacgacgatccgtccacggcggtcatctcctccacgggcgtattgacgccacagcccgctatgggtaccttgagttggccatcgagcagatggcaaagactgcagacgccagcaacgcactcaaccacgggcttcactaccttcggtcgaccggcaatgcatgtgcggcgagggtgttgttatggtggggatgggagaactccgatgctcacgctgggcgtcatgacaacagctccccaagcgatgcaagccgcctgttcgacgaaatgtggcgtcatgacagcagctccccaagcgatgcaagccgcctgttcgacgaaatatgtgagaatcaaaatgaacatgctcgcgtgttaggtcctttatgtgacccaaataactgaatttcagctaatcaccagagctaatatatcgaatccttcgagcttccatgggtgaggcaattaacacttactccaatttgttcttccttcacggtgctacttaattcaacatgttcttcattgcaatgattatagttacacttggtttatcaccattgctttcagcttgacaaagccttatctttgctacatacttaattaatgcttcaaagcactgacaattccaaatgacaggtacaagctcaacttcattgtcactgatggaacatgtgaagcagagttcttttgttttgatagcatagccagaaaaatagtaggaaaaccttgtcacaaccttgttacagcagttacaacttctcaaggtcctccagcagacctagccgctgttatgtgactgaaacttacccttgcatttgccatcaatatgtcagcctactctgtcacaaacagtcttctctattctgtctattttaacaaatcatgtaagacatgccttcatgccatctaacatgcctaaccattctcaagagttgtatacacaagatgaagtacctagccttccagtcacacaaaactctccaacaacatcttgggtgaaactatctacctgtagcaacgaaagaaacgaggtacgaaacttcttgttttcttgccatgtacaacctattagaaacatcttattttttcatgcatacaacttgataaagtctattcaattggcgctacacgttctaacatatttagatatgctacagtacataaaggtacctttagtactactaaattctaaacttccatacactcacatagttatgtatcttttgcattctaataccgcaaatataaattaatacaaacaaaactcactagcaacaaatttttagtttataaaataaatgaatgaagacaaaatggacttccactttgtcatagcaaactagattcacagatttcatgcatttaaccatagggtgatgaccaacgtacaagtgaactcaacaagcaatagttatcatcaccaccgaaaaggtatttgctttttgtgcacctatcaggatcaccatcacttttggaccatgaatgcttccctttagatatgaaccagtcgttagcctatttgtggatctatacatatggacttaacacctgcaagtctgcaagcacactgttgctaggtcttgatgtacggtggttaaatgctacttactatacattttttattgtagtctaaattaactctacgactgatatcaactattagagaaaaacaatgttatatgcttatatttggttctgtgcctgcgtattctatacttatattctgttcaaatttgttttcatacctgggtacaacaactagatgtggtcacgcgcggctggccgcgcgccatacactagtataaataagaccgtaatggatctttttcgagggaattaaaaaaaagagccggtagtatgggcggatctagaaaaaaaacgtgtagaagatctgaccgagaaaaagaagatgagaagacagcacagcgattcacaaccatacggagcaacaagacaaatgcaccggccctagctaggctcgaacccactcataccaaaaggaagaaaaag

SEQ ID NO: 20683 - DNA, 2346 bp, Zea Mays
ctagagatttccatcgcacacctctctagtctccatctgccgggacgccgcatcttgcttcgtctcgctttgttcctctccacgtcacttgggtttcgtcggcgtcaaggactccgcttccgcccgaagacttcgccttctcttggcttgctcaccggctgcgtctctttgcataaggttgtctcaggtcggagatttccgattgtgctcattgcaaccaagacgaagaagacgacgacgatccgtccacggcggtcatctcctccacgggcgtattgacgccacagcccgctatgggtaccttgagttggccatcgagcagatggcaaagactgcagacgccagcaacgcactcaaccacgggcttcactaccttcggtcgaccggcaatgcatgtgcggcgagggtgttgttatggtggggatgggagaactccgatgctcacgctgggcgtcatgacaacagctccccaagcgatgcaagccgcctgttcgacgaaatgtgtgagaagcaaaatagagacatcaacggtgttttcatgtgtctaatacaaatttattttttaaaacatagccagatagcattttcgacatgaacaaaggattcgtaatgcgctcggctacagggcgtcatgacagcagctccccaagcgatgcaagccgcctgttcgacgaaatatgtgagaatcaaaatgaacatgctcgcgtgttaggtcctttatgtgacccaaataactgaatttcagctaatcaccagagctaatatatcgaatccttcgagcttccatgggtgaggcaattaacacttactccaatttgttcttccttcacggtgctacttaattcaacatgttcttcattgcaatgattatagttacacttggtttatcaccattgctttcagcttgacaaagccttatctttgctacatacttaattaatgcttcaaagcactgacaattccaaatgacaggtacaagctcaacttcattgtcactgatggaacatgtgaagcagagttcttttgttttgatagcatagccagaaaaatagtaggaaaaccttgtcacaaccttgttacagcagttacaacttctcaaggtcctccagcagacctagccgctgttatgtgactgaaacttacccttgcatttgccatcaatatgtcagcctactctgtcacaaacagtcttctctattctgtctattttaacaaatcatgtaagacatgccttcatgccatctaacatgcctaaccattctcaagagttgtatacacaagatgaagtacctagccttccagtcacacaaaactctccaacaacatcttgggtgaaactatctacctgtagcaacgaaagaaacgaggtacgaaacttcttgttttcttgccatgtacaacctattagaaacatcttattttttcatgcatacaacttgataaagtctattcaattggcgctacacgttctaacatatttagatatgctacagtacataaaggtacctttagtactactaaattctaaacttccatacactcacatagttatgtatcttttgcattctaataccgcaaatataaattaatacaaacaaaactcactagcaacaaatttttagtttataaaataaatgaatgaagacaaaatggacttccactttgtcatagcaaactagattcacagatttcatgcatttaaccatagggtgatgaccaacgtacaagtgaactcaacaagcaatagttatcatcaccaccgaaaaggtatttgctttttgtgcacctatcaggatcaccatcacttttggaccatgaatgcttccctttagatatgaaccagtcgttagcctatttgtggatctatacatatggacttaacacctgcaagtctgcaagcacactgttgctaggtcttgatgtacggtggttaaatgctacttactatacattttttattgtagtctaaattaactctacgactgatatcaactattagagaaaaacaatgttatatgcttatatttggttctgtgcctgcgtattctatacttatattctgttcaaatttgttttcatacctgggtacaacaactagatgtggtcacgcgcggctggccgcgcgccatacactagtataaataagaccgtaatggatctttttcgagggaattaaaaaaaagagccggtagtatgggcggatctagaaaaaaaacgtgtagaagatctgaccgagaaaaagaagatgagaagacagcacagcgattcacaaccatacggagcaacaagacaaatgcaccggccctagctaggctcgaacccactcataccaaaaggaagaaaaag

SEQ ID NO: 20684 - DNA, 1822 bp, Zea Mays
ctagagatttccatcgcacacctctctagtctccatctgccgggacgccgcatcttgcttcgtctcgctttgttcctctccacgtcacttgggtttcgtcggcgtcaaggactccgcttccgcccgaagacttcgccttctcttggcttgctcaccggctgcgtctctttgcataaggttgtctcaggtcggagatttccgattgtgctcattgcaaccaagacgaagaagacgacgacgatccgtccacggcggtcatctcctccacgggcgtattgacgccacagcccgctatgggtaccttgagttggccatcgagcagatggcaaagactgcagacgccagcaacgcactcaaccacgggcttcactaccttcggtcgaccggcaatgcatgtgcggcgagggtgttgttatggtggggatgggagaactccgatgctcacgctgggcgtcatgacaacagctccccaagcgatgcaagccgcctgttcgacgaaatgtgtgagaagcaaaatagagacatcaacggtgttttcatgtgtctaatacaaatttattttttaaaacatagccagatagcattttcgacatgaacaaaggattcgtaatgcgctcggctacagggcgtcatgacagcagctccccaagcgatgcaagccgcctgttcgacgaaatatgtgagaatcaaaatgaacatgctcgcgtgttaggtcctttatgtgacccaaataactgaatttcagctaatcaccagagctaatatatcgaatccttcgagcttccatgggtacaagctcaacttcattgtcactgatggaacatgtgaagcagagttcttttgttttgatagcatagccagaaaaatagtaggaaaaccttgtcacaaccttgttacagcagttacaacttctcaaggtcctccagcagacctagccgctgttatgtgactgaaacttacccttgcatttgccatcaatatgtcagcctactctgtcacaaacagtcttctctattctgtctattttaacaaatcatgtaagacatgccttcatgccatctaacatgcctaaccattctcaagagttgtatacacaagatgaagtacctagccttccagtcacacaaaactctccaacaacatcttgggtgaaactatctacctgtagcaacgaaagaaacgagggtgatgaccaacgtacaagtgaactcaacaagcaatagttatcatcaccaccgaaaaggtatttgctttttgtgcacctatcaggatcaccatcacttttggaccatgaatgcttccctttagatatgaaccagtcgttagcctatttgtggatctatacatatggacttaacacctgcaagtctgcaagcacactgttgctaggtcttgatgtacggtggttaaatgctacttactatacattttttattgtagtctaaattaactctacgactgatatcaactattagagaaaaacaatgttatatgcttatatttggttctgtgcctgcgtattctatacttatattctgttcaaatttgttttcatacctgggtacaacaactagatgtggtcacgcgcggctggccgcgcgccatacactagtataaataagaccgtaatggatctttttcgagggaattaaaaaaaagagccggtagtatgggcggatctagaaaaaaaacgtgtagaagatctgaccgagaaaaagaagatgagaagacagcacagcgattcacaaccatacggagcaacaagacaaatgcaccggccctagctaggctcgaacccactcataccaaaaggaagaaaaag

SEQ ID NO: 20685 - DNA, 2233 bp, Zea Mays
ctagagatttccatcgcacacctctctagtctccatctgccgggacgccgcatcttgcttcgtctcgctttgttcctctccacgtcacttgggtttcgtcggcgtcaaggactccgcttccgcccgaagacttcgccttctcttggcttgctcaccggctgcgtctctttggttagatacgtttttctccattgtctttcgtcgtccctttcgattcggtcgatacctggatccagatccgttcgtcgatcatatccagcctcctctacttgagatcctctcgctttttggagatcatgttgcttcggtgcgtggagattgagatctaaacgacaagtatttttcttttggttaactggttcgcaagaagtgtagatggacatctggttccaaatttgttcttcgatcatatctagctgccagcttggtcgtcgacacgtttatttccacagttgtgctcccattcttgcttcgtcgattgtttcgttttggtgcacagctgatcttgtttgtgtcaaatgcataaggttgtctcaggtcggagatttccgattgtgctcattgcaaccaagacgaagaagacgacgacgatccgtccacggcggtcatctcctccacgggcgtattgacgccacagcccgctatgggtaccttgagttggccatcgagcagatggcaaagactgcagacgccagcaacgcactcaaccacgggcttcactaccttcggtcgaccggcaatgcatgtgcggcgagggtgttgttatggtggggatgggagaactccgatgctcacgctgggcgtcatgacaacagctccccaagcgatgcaagccgcctgttcgacgaaatgtggcgtcatgacagcagctccccaagcgatgcaagccgcctgttcgacgaaatatgtgagaatcaaaatgaacatgctcgcgtgttaggtcctttatgtgacccaaataactgaatttcagctaatcaccagagctaatatatcgaatccttcgagcttccatgggtgaggcaattaacacttactccaatttgttcttccttcacggtgctacttaattcaacatgttcttcattgcaatgattatagttacacttggtttatcaccattgctttcagcttgacaaagccttatctttgctacatacttaattaatgcttcaaagcactgacaattccaaatgacaggtacaagctcaacttcattgtcactgatggaacatgtgaagcagagttcttttgttttgatagcatagccagaaaaatagtaggaaaaccttgtcacaaccttgttacagcagttacaacttctcaaggtcctccagcagacctagccgctgttatgtgactgaaacttacccttgcatttgccatcaatatgtcagcctactctgtcacaaacagtcttctctattctgtctattttaacaaatcatgtaagacatgccttcatgccatctaacatgcctaaccattctcaagagttgtatacacaagatgaagtacctagccttccagtcacacaaaactctccaacaacatcttgggtgaaactatctacctgtagcaacgaaagaaacgagggtgatgaccaacgtacaagtgaactcaacaagcaatagttatcatcaccaccgaaaaggtatttgctttttgtgcacctatcaggatcaccatcacttttggaccatgaatgcttccctttagatatgaaccagtcgttagcctatttgtggatctatacatatggacttaacacctgcaagtctgcaagcacactgttgctaggtcttgatgtacggtggttaaatgctacttactatacattttttattgtagtctaaattaactctacgactgatatcaactattagagaaaaacaatgttatatgcttatatttggttctgtgcctgcgtattctatacttatattctgttcaaatttgttttcatacctgggtacaacaactagatgtggtcacgcgcggctggccgcgcgccatacactagtataaataagaccgtaatggatctttttcgagggaattaaaaaaaagagccggtagtatgggcggatctagaaaaaaaacgtgtagaagatctgaccgagaaaaagaagatgagaagacagcacagcgattcacaaccatacggagcaacaagacaaatgcaccggccctagctaggctcgaacccactcataccaaaaggaagaaaaag

SEQ ID NO: 20686 - DNA, 1667 bp, Zea Mays
ggccagccaacgcgacagcacgcccagcacagcgagcagtgcgtggaccagcccgccgcgacgcgctcgcagcggcggcccgcggcttgccctgtgcggtagcatgcgtggccagcctgcgcggcagcctgcccggagcgcaactcggtgcggccttccgtggccctgcgcgccctagcgcagtgcctttgcccaggcgtgctcccctgccggtgtagccagcggcccccacccagtgcgacgtgcgcgtgtgcccgcccgtcgcaccttttcccgtcgggctcgtcctgccggagcatcgccatccccgtcgagcttgtcgtcgcgcttgcctcgtcatcgccgcgcactcgccgtctggagctcgccatcgccgttggctgaatacccgtcctcgttgtgcgacgtcccgagaatgcgatctgttttcgagcttcgaggaatgacgatcaagctttgacgaccaagtgaacgaactctttgagttctacgagatcgaagaccctgagcatctgtttggtgaaggcaagtgtcctctgacccattatatcccatttactttataattcactgtcccgcatactatgaacaacataaggattgactagctttctatttaccttgtccttgattaccttttgggttactatggttagcttcatgctagcgctttactttaatcaatgaacatgatgagatacaatgatgatattatggtttttttctggatatgatgatatacttgtgtcatttaaggggactcgagcggtttctcgagtgcctctccgtaaggacctgttcgttggatgaccgcccaggaaaacagtgcaaccatgagggtggaatgggacgcccttagctgaataattagaggaactggggtgtagttcgcttcgctgtcgtgcctgttgggggccttcgtcttccgaaggtcctcaaaaacatgattaacaatgtttcccaagcataatatatgtataggaaccttcggactcaggatgaagttgtacacaatatggaaagcaggatcggaacgaaggttgaaccagcgccgaagctacgcgcaaggatgcttcggctcagtagcagaaagaggaaccaacttaagaaggaaaaggctatctagtcctcgatagattgttattaagttaatagtgtcaatagtgaatatgaagggcatgaatgtaattttgcgcatgctgcgtcctgtgcctataaatagatgaacagtacccccatactgttcacgctgacttgtactcgctagtgcgtcacgcttgtatctttgccttctgtcaagccgaaggtacaaatgtaactcaatgtttttcttattcattcatgattatataataaaagatatattaacagtgtcatatgattattcatgttatttctcatgtttcatatgcttcatctttcattaatatatgctgtgatgatgaaggtacgtccttcatgaccttcgtccgaagatcgttatatccttagggaaataatgcttcgaaggacgaagggcattaaccattaacctattttgtgttgccttgttctttattcatagcatttgagaacaagtccccaacattggcgcccacctccggtgtactcacttccacaaccttcagcaaagcatcaaccttcatcatgtcgccgaagaagataac

SEQ ID NO: 20687 - DNA, 1445 bp, Zea Mays
atttatttgacagctgttagtgtagcaaattaaccaaaacttaatagcagttataatttaggtttgataatgttatgattaatatttgtttagcgtaaatgcgctaacttctcgaccgtagctccgattatcgcgtttcttttccttgcgtgaccataatagcgagctctattttgttttgtaaattttattatgtttttatttgaatggtgtaatattcttatgcatatacatatgtctattttttgtgcctgttggtattcgctatgtaacgcgaatagaatgcgatctgttttcgagcttcgaggaatgacgatcaagctttgacgaccaagtgaacgaactctttgagttctacgagatcgaagaccctgagcatctgtttggtgaaggcaagtgtcctctgacccattatatcccatttactttataattcactgtcccgcatactatgaacaacataaggattgactagctttctatttaccttgtccttgattaccttttgggttactatggttagcttcatgctagcgctttactttaatcaatgaacatgatgagatacaatgatgatattatggtttttttctggatatgatgatatacttgtgtcatttaaggggactcgagcggtttctcgagtgcctctccgtaaggacctgttcgttggatgaccgcccaggaaaacagtgcaaccatgagggtggaatgggacgcccttagctgaataattagaggaactggggtgtagttcgcttcgctgtcgtgcctgttgggggccttcgtcttccgaaggtcctcaaaaacatgattaacaatgtttcccaagcataatatatgtataggaaccttcggactcaggatgaagttgtacacaatatggaaagcaggatcggaacgaaggttgaaccagcgccgaagctacgcgcaaggatgcttcggctcagtagcagaaagaggaaccaacttaagaaggaaaaggctatctagtcctcgatagattgttattaagttaatagtgtcaatagtgaatatgaagggcatgaatgtaattttgcgcatgctgcgtcctgtgcctataaatagatgaacagtacccccatactgttcacgctgacttgtactcgctagtgcgtcacgcttgtatctttgccttctgtcaagccgaaggtacaaatgtaactcaatgtttttcttattcattcatgattatataataaaagatatattaacagtgtcatatgattattcatgttatttctcatgtttcatatgcttcatctttcattaatatatgctgtgatgatgaaggtacgtccttcatgaccttcgtccgaagatcgttatatccttagggaaataatgcttcgaaggacgaagggcattaaccattaacctattttgtgttgccttgttctttattcatagcatttgagaacaag

SEQ ID NO: 20688 - DNA, 1815 bp, Zea Mays
atgccgcttctcccggcggccgccctagccctgttcgcgcccccggacgtgccgctaccgacgcacaccctcgcgctcctgctccgccgcctgttcaccacccgctccatcgccgccgcgcagggcctcctccacaagctccaccttccttcgtgcagcgcccttccagcccgaaacctccgcgcacaccccgcgcttccttccttcgcgcagcctccgcacgccgccaagctcccccttgccctcatctcttcccatgcttgcctccgcacgccgctagatcccatgccgcttctcccggcggtggccctagccctgttcgcgcccccggacatgccgctaccgacgcacaccctcgcgctcctgctccgccgcctgttcaccacccgctccatcgccgccgtgcagggcctcctccacaagctcctcgacatcggggttgatgccaggccacagttcctagagcaacaactcaagaaggccaaaggcccaaatctgatgttcgggaggggagatgaaacagaaggttctgacaattcaaagtctaagtttaaggatgatgagcaggatggacaggtatctagcaggtcacttaagaaggccattggattcaaaactcatgtacgctactgtgacacattgatggtcctgaagttgtggataatgtcaaaggttccctttagatcaagcactggccaccgggtgctgcacgtcaacggccaacaggggcaccgtgcaggtgggcagaagcagccagcgacaacagtagggcacagctttctatcctatatttgcatgttcttcaaagggatgtatatggaccttccaaatacactagacttttgcaagcaaccaaagatactctcagagaagaaggtagaaaatggccgatgtcgaggatatccagccccttgtctgcgacaatggaactgcatggtcaaggctgggttcgctggcgacgacgccccgagggtcgtcttccccagcatcgtggggcgcccgcgccacactggtgtcatggtcgggatggggcagaaggacgcctacgtcggtgacgaggcgcagtccaagaggggtatcttgacccttaagtaccccatcgagcacgggatcgccagcaactgggacgacatggagaagatctggcatcacaccttctacaacgagctccgcgtggctcccgaggagcaccccgtcctcctcaccgaggcgcccctgaaccccaaggctaagagggagaagatgacccagatcatgtttgagaccttcaacacccccgctatgtacgtcgccatccaggtcgtgctctctctgtatgccagtggtcgtaccacaggtatcgtgctcgactcgggagatggtgtgagccacaccgtccccatctacgagggatacaccctcccccacgccatccttcatcttgacctggccggattgagaacggatgggctgcaatctattgttggtgcctggtatcagagggtgcacctgttcacaatcttgagatcaaaggttttgggaggtgaaggtctcgacaatcatcaagtcgccaactatgagactataactgtggatgagcttttcagaaagtggcgtggtggatctaaggatgaatgcttcaactgcggtgaccctgatcactacatcgctagctgccccaagacgaagagtagggcagaggccgacaagggtgaccatcactctggtcgacgcaagggcaagcaggaatacacctccggtgaacacaagtccaaggggacgtttgacaaggaggctctcaagaaggcataccttcataaggccaagatcaagtag

SEQ ID NO: 20689 - DNA, 1169 bp, Zea Mays
ggggttcatccttgatggctttcctcgaaccatgagacaagcgataagctaattatttgacctgaccataagtagaaaatggccgatgtcgaggatatccagccccttgtctgcgacaatggaactgcatggtcaaggctgggttcgctggcgacgacgccccgagggtcgtcttccccagcatcgtggggcgcccgcgccacactggtgtcatggtcgggatggggcagaaggacgcctacgtcggtgacgaggcgcagtccaagaggggtatcttgacccttaagtaccccatcgagcacgggatcgccagcaactgggacgacatggagaagatctggcatcacaccttctacaacgagctccgcgtggctcccgaggagcaccccgtcctcctcaccgaggcgcccctgaaccccaaggctaagagggagaagatgacccagatcatgtttgagaccttcaacacccccgctatgtacgtcgccatccaggtcgtgctctctctgtatgccagtggtcgtaccacaggtatcgtgctcgactcgggagatggtgtgagccacaccgtccccatctacgagggatacaccctcccccacgccatccttcatcttgacctggccggtcgcgacctcaccgactgctcatttgcgctagactgtgtttgttcaaaagatattattcaaaatttaactgaaagattttatttgttgcacaattattgtattgctttgtttgttgaatattatttgcttggtgatgggctgctgttgctgctagcaggattgagaacggatgggctgcaatctattgttggtgcctggtatcagagggtgcacctgttcacaatcttgagatcaaaggttttgggaggtgaaggtctcgacaatcatcaagtcgccaactatgagactataactgtggatgagcttttcagaaagtggcgtggtggatctaaggatgaatgcttcaactgcggtgaccctgatcactacatcgctagctgccccaagacgaagagtagggcagaggccgacaagggtgaccatcactctggtcgacgcaagggcaagcaggaatacacctccggtgaacacaagtccaaggggacgtttgacaaggaggctctcaagaaggcataccttcataaggccaagatcaagtag

SEQ ID NO: 20690 - DNA, 1577 bp, Zea Mays
ggccaggtgcctgcctccatctccctcctccactcgggtcttcacgatgccgccgccgccacacgacatcgcacatccgctcttctccctcccctcgctctcggcggtcgacgtccgctcccctggtgccatcgcttgtgcctggctcccgccatcgctggctccccgatggacctcacggctagtgtggggccatggatccccgacggatcgagggtcgcgccgcctcatgagaaaattcatctttctggctcgaacagaaaatacctgaagcttcaatttgacgtcgtgtagcaatgaatgcgtgcaaggaatgctcttttacatgttgagaatgaagaaaaattagatgtcgtggaggcatcccaaaacatgtactttccattttgcacattttagtccaaggttcaatacaaactttctcagaaaactatctcaaacactactaatcgttgttggtctgcagggtttcaaattaggacttagctatttttccatcagcctgaaacagcctaataatcttactttgatcccttgggaaaaaatgttcttattattttgagtttttgacctatagtcaggtctagaacatacccctgacatcacactactaatctgggacaaaaatatgtagttctccaaaagaaaattgtttctaatcctgccttgaaaatgtttgctgaaatactatttggtaaagttgctgaaatactgtttatgtatatttctctttcaaattattataatttggatgcgctccttgtttgagtgctccaaatctgaaaaccaagaaggtaagaaaatgtaaaggcattggtccaatcagtaattccaggcatatttagggcacatgcatttaggagtccaagtgtccaacattgctagatcaataagaaataaagattgatgatttgaaaaaaactgaagtagcttaaataaattgtttgattgacaaattcagatagctgtacctttgaacttcctcttacttggaggactttcagtgtttcttctatctgcaggaatgtcctcaggaggcttggagccttcatgctggtcaatcttcccaagaagaaaggtgtattgagacttcaaatgcttgtagtttgtcttcggctgagtgtaatcgtcaatttattcttactgttttctataaacctatgtctgtggtcgtaagaaagaaggtagctacaacagaaatatctgcagccgaaacagtagccagctgaacatgctgacatgttattgcgggtggtcaaggctcaggattcagagcagaagatacacataaatactggtgaatgatgccatcgacgatgatgaactgatcaaacgatggatgatgccatcgatgaaagatggaatggaactcaaatttgggtggtcgcacaagtgtggagacttgaatttatatatacttagtctcaatgttagcacaaacagttgatgagcaagttttcccattgtattttagtttgaatttagagtacacttatgtaagagttatttgacaatgcttatttatgagatattgaatgatatttatatatattaaattaattataatgttattaaat

SEQ ID NO: 20691 - DNA, 1456 bp, Zea Mays
ggccaggtgcctgcctccatctccctcctccactcgggtcttcacgatgccgccgccgccacacgacatcgcacatccgctcttctccctcccctcgctctcggcggtcgacgtccgctcccctggtgccatcgcttgtgcctggctcccgccatcgctggctccccgatggacctcacggctagtgtggggccatggatccccgacggatcgagggtcgcgccgcctcatgaggtcaaaaattcatctttctggctcgaacagaaaatacctgaagcttcaatttgacgtcgtgtagcaatgaatgcgtgcaaggaatgctcttttacatgttgagaatgaagaaaaattagatgtcgtggaggcatcccaaaacatgtactttccattttgcacattttagtccaaggttcaatacaaactttctcagaaaactatctcaaacactactaatcgttgttggtctgcagggtttcaaattaggacttagctatttttccatcagcctgaaacagcctaataatcttactttgatcccttgggaaaaaatgttcttattattttgagtttttgacctatagtcaggtctagaacatacccctgacatcacactactaatctgggacaaaaatatgtagttctccaaaagaaaattgtttctaatcctgccttgaaaatgtttgctgaaatactatttggtaaagttgctgaaatactgtttatgtatatttctctttcaaattattataatttggatgcgctccttgtttgagtgctccaaatctgaaaaccaagaaggtaagaaaatgtaaaggcattggtccaatcagtaattccaggcatatttagggcacatgcatttaggagtccaagtgtccaacattgctagatcaataagaaataaagattgatgatttgaaaaaaactgaagtagcttaaataaattgtttgattgacaaattcagatagctgtacctttgaacttcctcttacttggaggactttcagtgtttcttctatctgcaggaatgtcctcaggaggcttggagccttcatgctggtcaatcttcccaagaagaaagctgcagccgaaacagtagccagctgaacatgctgacatgttattgcgggtggtcaaggctcaggattcagagcagaagatacacataaatactggtgaatgatgccatcgacgatgatgaactgatcaaacgatggatgatgccatcgatgaaagatggaatggaactcaaatttgggtggtcgcacaagtgtggagacttgaatttatatatacttagtctcaatgttagcacaaacagttgatgagcaagttttcccattgtattttagtttgaatttagagtacacttatgtaagagttatttgacaatgcttatttatgagatattgaatgatatttatatatattaaattaattataatgttattaaat

SEQ ID NO: 20692 - DNA, 1558 bp, Zea Mays
ggccaggtgcctgcctccatctccctcctccactcgggtcttcacgatgccgccgccgccacacgacatcgcacatccgctcttctccctcccctcgctctcggcggtcgacgtccgctcccctggtgccatcgcttgtgcctggctcccgccatcgctggctccccgatggacctcacggctagtgtggggccatggatccccgacggatcgagggtcgcgccgcctcatgagaaaattcatctttctggctcgaacagaaaatacctgaagcttcaatttgacgtcgtgtagcaatgaatgcgtgcaaggaatgctcttttacatgttgagaatgaagaaaaattagatgtcgtggaggcatcccaaaacatgtactttccattttgcacattttagtccaaggttcaatacaaactttctcagaaaactatctcaaacactactaatcgttgttggtctgcagggtttcaaattaggacttagctatttttccatcagcctgaaacagcctaataatcttactttgatcccttgggaaaaaatgttcttattattttgagtttttgacctatagtcaggtctagaacatacccctgacatcacactactaatctgggacaaaaatatgtagttctccaaaagaaaattgtttctaatcctgccttgaaaatgtttgctgaaatactatttggtaaagttgctgaaatactgtttatgtatatttctctttcaaattattataatttggatgcgctccttgtttgagtgctccaaatctgaaaaccaagaaggtaagaaaatgtaaaggcattggtccaatcagtaattccaggcatatttagggcacatgcatttaggagtccaagtgtccaacattgctagatcaataagaaataaagattgatgatttgaaaaaaactgaagtagcttaaataaattgtttgattgacaaattcagatagctgtacctttgaacttcctcttacttggaggactttcagtgtttcttctatctgcaggaatgtcctcaggaggcttggagccttcatgctggtcaatcttcccaagaagaaaggtgtattgagacttcaaatgcttgtagtttgtcttcggctgagtgtaatcgtcaatttattcttactgttttctataaacctatgtctgtggtcgtaagaaagaagctgcagccgaaacagtagccagctgaacatgctgacatgttattgcgggtggtcaaggctcaggattcagagcagaagatacacataaatactggtgaatgatgccatcgacgatgatgaactgatcaaacgatggatgatgccatcgatgaaagatggaatggaactcaaatttgggtggtcgcacaagtgtggagacttgaatttatatatacttagtctcaatgttagcacaaacagttgatgagcaagttttcccattgtattttagtttgaatttagagtacacttatgtaagagttatttgacaatgcttatttatgagatattgaatgatatttatatatattaaattaattataatgttattaaat

SEQ ID NO: 20693 - DNA, 1496 bp, Zea Mays
ggccaggtgcctgcctccatctccctcctccactcgggtcttcacgatgccgccgccgccacacgacatcgcacatccgctcttctccctcccctcgctctcggcggtcgacgtccgctcccctggtgccatcgcttgtgcctggctcccgccatcgctggctccccgatggacctcacggctagtgtggggccatggatccccgacggatcgagggtcgcgccgcctcatgagaaaattcatctttctggctcgaacagaaaatacctgaagcttcaatttgacgtcgtgtagcaatgaatgcgtgcaaggaatgctcttttacatgttgagaatgaagaaaaattagatgtcgtggaggcatcccaaaacatgtactttccattttgcacattttagtccaaggttcaatacaaactttctcagaaaactatctcaaacactactaatcgttgttggtctgcagggtttcaaattaggacttagctatttttccatcagcctgaaacagcctaataatcttactttgatcccttgggaaaaaatgttcttattattttgagtttttgacctatagtcaggtctagaacatacccctgacatcacactactaatctgggacaaaaatatgtagttctccaaaagaaaattgtttctaatcctgccttgaaaatgtttgctgaaatactatttggtaaagttgctgaaatactgtttatgtatatttctctttcaaattattataatttggatgcgctccttgtttgagtgctccaaatctgaaaaccaagaaggtaagaaaatgtaaaggcattggtccaatcagtaattccaggcatatttagggcacatgcatttaggagtccaagtgtccaacattgctagatcaataagaaataaagattgatgatttgaaaaaaactgaagtagcttaaataaattgtttgattgacaaattcagatagctgtacctttgaacttcctcttacttggaggactttcagtgtttcttctatctgcaggaatgtcctcaggaggcttggagccttcatgctggtcaatcttcccaagaagaaaggtgtattgagacttcaaatgcttgtagtttgtcttcggctgagtctgcagccgaaacagtagccagctgaacatgctgacatgttattgcgggtggtcaaggctcaggattcagagcagaagatacacataaatactggtgaatgatgccatcgacgatgatgaactgatcaaacgatggatgatgccatcgatgaaagatggaatggaactcaaatttgggtggtcgcacaagtgtggagacttgaatttatatatacttagtctcaatgttagcacaaacagttgatgagcaagttttcccattgtattttagtttgaatttagagtacacttatgtaagagttatttgacaatgcttatttatgagatattgaatgatatttatatatattaaattaattataatgttattaaat

SEQ ID NO: 20694 - DNA, 2185 bp, Zea Mays
ggccaggtgcctgcctccatctccctcctccactcgggtcttcacgatgccgccgccgccacacgacatcgcacatccgctcttctccctcccctcgctctcggcggtcgacgtccgctcccctggtgccatcgcttgtgcctggctcccgccatcgctggctccccgatggacctcacggctagtgtggggccatggatccccgacggatcgagggtcgcgccgcctcatgaggtcagtgagcccgcccacactctactttcttgctccttgttctacgagcttcggctgcgctgaggcggtcatggtcgctgttcatgtggaattagatgtgagagaaggagcgtgcagcgccgccgcagctgtggactcccatcataaaattcgaacatggagaaacttgaaccttttctaatgcaacattcatgtgttggtattctattttggtatattatagattttgcaggacaagttaagatggagttggaagttgaggcatatattaggcaacattatgaaggggaaatttctgacatagaaataattgagaaagaggatttagatctagtttttcacttgctctgcatactaaatctaatattctgtttgacgtccataatgaaatgatgtcatggcgataagtttggctctgtttaattgtttatgtctaagatttttctacaggaattttgatcttcttaggtttgtgtcgttgtacttgtttatccattgatggccatccttgtgttatagccatagtgatgttcatatatctctagaatttagctgaagttgaatgctttatatgttcagacttcaattttgatattaaacatgtagattatcgttatttaaatatgagtaagggagatgccaatgtgctaattgtttgtttcttttttctgccattttgatgtgcctgtgccaggtgtagaatataacttttaacatcccactcttgttgcagaaaattcatctttctggctcgaacagaaaatacctgaagcttcaatttgacgtcgtgtagcaatgaatgcgtgcaaggaatgctcttttacatgttgagaatgaagaaaaattagatgtcgtggaggcatcccaaaacatgtactttccattttgcacattttagtccaaggttcaatacaaactttctcagaaaactatctcaaacactactaatcgttgttggtctgcagggtttcaaattaggacttagctatttttccatcagcctgaaacagcctaataatcttactttgatcccttgggaaaaaatgttcttattattttgagtttttgacctatagtcaggtctagaacatacccctgacatcacactactaatctgggacaaaaatatgtagttctccaaaagaaaattgtttctaatcctgccttgaaaatgtttgctgaaatactatttggtaaagttgctgaaatactgtttatgtatatttctctttcaaattattataatttggatgcgctccttgtttgagtgctccaaatctgaaaaccaagaaggtaagaaaatgtaaaggcattggtccaatcagtaattccaggcatatttagggcacatgcatttaggagtccaagtgtccaacattgctagatcaataagaaataaagattgatgatttgaaaaaaactgaagtagcttaaataaattgtttgattgacaaattcagatagctgtacctttgaacttcctcttacttggaggactttcagtgtttcttctatctgcaggaatgtcctcaggaggcttggagccttcatgctggtcaatcttcccaagaagaaagctgcagccgaaacagtagccagctgaacatgctgacatgttattgcgggtggtcaaggctcaggattcagagcagaagatacacataaatactggtgaatgatgccatcgacgatgatgaactgatcaaacgatggatgatgccatcgatgaaagatggaatggaactcaaatttgggtggtcgcacaagtgtggagacttgaatttatatatacttagtctcaatgttagcacaaacagttgatgagcaagttttcccattgtattttagtttgaatttagagtacacttatgtaagagttatttgacaatgcttatttatgagatattgaatgatatttatatatattaaattaattataatgttattaaat

SEQ ID NO: 20695 - DNA, 1009 bp, Zea Mays
ggccaggtgcctgcctccatctccctcctccactcgggtcttcacgatgccgccgccgccacacgacatcgcacatccgctcttctccctcccctcgctctcggcggtcgacgtccgctcccctggtgccatcgcttgtgcctggctcccgccatcgctggctccccgatggacctcacggctagtgtggggccatggatccccgacggatcgagggtcgcgccgcctcatgagaaaattcatctttctggctcgaacagaaaatacctgaagcttcaatttgacgtcgtgtagcaatgaatgcgtgcaaggaatgctcttttacatgttgagaatgaagaaaaattagatgtcgtggaggcatcccaaaacatgaatgtcctcaggaggcttggagccttcatgctggtcaatcttcccaagaagaaaggtgtattgagacttcaaatgcttgtagtttgtcttcggctgagtgtaatcgtcaatttattcttactgttttctataaacctatgtctgtggtcgtaagaaagaaggtagctacaacagaaatatgtaatagaataatgttcgtacttcgtaacacgctatttcttatatgctgacatgctattgtggctattgtgttgttgcagctgcagccgaaacagtagccagctgaacatgctgacatgttattgcgggtggtcaaggctcaggattcagagcagaagatacacataaatactggtgaatgatgccatcgacgatgatgaactgatcaaacgatggatgatgccatcgatgaaagatggaatggaactcaaatttgggtggtcgcacaagtgtggagacttgaatttatatatacttagtctcaatgttagcacaaacagttgatgagcaagttttcccattgtattttagtttgaatttagagtacacttatgtaagagttatttgacaatgcttatttatgagatattgaatgatatttatatatattaaattaattataatgttattaaat

SEQ ID NO: 20696 - DNA, 2540 bp, Zea Mays
attatagtttactgtaaaccctgaataatgctttaaggagcattagctagtttttattatttgtaagaataatagtaaggatatctaagactttagttatacaacaattagtattagagttattttagtatgtgttgagacaggtcccatttaaataaataggatggtgaattattgcacctgaattacacctaatgggttatataataatgtgaattccttgcttattggatgtcatacatgaaaataactatgtgagcaaagtaagagaaaggaataaataaacataaaatacatatacatcatgctggagtttatctggttgtgcacttacttcgaggaattaattttgaagtctgaacttattagctatttgaattgggaaaatcaaaatctagaaagaaaattttaatctagtcaattatccttccataagtaaacaataagaggtaaaataaacaatattaaggcaaacagtaaagagttatactcacattggtattttattatgtatttgaagtctgaagatcaaacaagaatttaaatttaagtttgaaaatggaaatagaaaagaaaagagaagaaaaggaaacagaacagaaaaaacggatgagctacgcgctgggcctaaaaccccttccctcggcccaacgcctaggcgtccaggcggtggtccaacgccttggctcgccttaccgctttaaaaaatcatgcatgttaatcactgtgacatgctcaggttaatttgatgggacctaataggttaccctagtattgtttatcccacaccttgcaaactaatgaactattgattagacttgctattgctctacctggttttgggattaatgctatattgaattatgatcatgtttcactattattgctggtttattattgttcatgacaaaatcattaagttaattggaacatgaagcgaccatccgtaaaaacagtgctagcacaaggatggtatggaacgcccttggctgactaattagaaaaactagtggaggactaccttacccgaaagagtcaagggcggtaggagagttgcggtatagggaggttctcgagtcgattatgctgcgatggtttttcggacgagggatttctatatcgcccttctcaaaaaccgtagcgggttttctaaagctagtgtaactttgtaacggcgtcgtagtgctaccctgcctcgtctcctcggtagagatgtatgggattcatgactcatggcaaatgggtaacacgacttgtgggtaaagatgtgcaacctctgcagaatgtaaaactggtatatcagccgtgctcacggtcatgagcggctcggaccctcacatgagtaatttataaaattaaacttaatttgtcatatgcattgcattgtgggttttgttattaatactgatctcttatttatttgggttggtatctacttatacttagtaactgctaataaaattttgaccaactttaaaacaatgatcagttttaaccatttcaattgttaagccttacacttcacatgagcattattgtaagtgagatcatgcacattattccccacaacttgttgaacaatgaacgtatgtgagatcacccttgctgtactcacatcccctaaggtcgtaaacaagtattgctggataaggagcataaaagatgtcgcgatgagttcgtgagagatctagaccgtcgtctcccagttaactatggttgctggatcattgtcttcgtacgatgtaattatttaactattttgtacagaactccattatattaaaaatgtgacattcgtttctgtaccatgagtcatcatatgtgtgagacttgatactatcacacatttaaaacgtgcccaggtttggcacttaaatccgggtgtgacatttacatttgcactgttttcaaaaatcaaaaccatgcattttccaaaaaaaaactcttacatggaccaagcatattcacgttcttttagtcaaattatggacccaaagaaatcaaccaagacaaaagtattgatggaaaattatctgatttgtaccagatttactgggctaccactagattttgtgagtggtatatgcagatagacagtagagaaaaaataatgtccttgcgaaaacaatatttgttgtaccgtagaattatgagtttagtcacttatagatacagcaaatcattaaaggaaacaatccaatactctacaaaagacatttgtagtggttgaagtggtaaaattaacattttagaaattgcaatatacaaagtatcggctgggattttgatcattggacaaatatattaaaatggaacagttaaaataaaccacaccaattttcaacttctgggaaaatacagacctgctcctccactttcaagtgtttggcaaagagctttactggtcggcattctttagtaaacatcttcaaacccctacaaccagttgcttcattatctaaaagaatatgcagtgcaaaactgaaaacatgttcttgcactttggaacaacagattctacctcagtaggtctaaagatc

SEQ ID NO: 20697 - DNA, 979 bp, Zea Mays
cctttctcttggacgccaccccccctcttccatcttcttcctcctcaaacctttgcagccctcaccacacaaaaccctagccgcccccccccatttctctttccccccctccaaggtgcagccctcccacgtggttctccatcgtgtggctgcgatctcaattagagtttggagggaggaaaaaggaaggaggaagggaagaacccaaggtgaatttgtgtttaacttttgttgtttttgtgctgcaatcaattggattatgcgtttatctttgcgaatcggtagatgtgctgtccaggaattttgtgagtgggtggacagcagtagttctagggatttctgggaattttcgtgggttaattagtgggactcagtaggataatcatgtagatctttgtcataccttaccaacgagtacttatgcgctcaattcggaattataatttaggagatatcgttgtttgaatccgggtatgttgctgtccaaaaaacagatttttcaggtgggtgaacagcagtagtattagccgtttctgggaatttttgtgggttaattagtgggaatcagtgggataatcatgtagagctttatcatacctttccaacgagtacttatgcgctcgattaggaattataatttaggagatatcgttgtttgaatccgggtatgttgctgtccaaaaaacagatttttcaggtgggtgaacagcagtagtaatagcagtttctgggaatttttcgtgggtaattagtgataaccagtatgataatcatgtagggctttgtcttatctttccaatgagtacttatgcgcttgatttgaaattatattttaaaagatatcgctgtttgaatccgggtatgtcgctgtccaaaagagaaaaaaacagattacagggtttatcttgtggactgttttgggctaattagatgttataatttaattataaattgtatacaaaacttgtggggaatttta

SEQ ID NO: 20698 - DNA, 553 bp, Zea Mays
gaaacctaaacctaatcccctctcgtgtctctctcatgactcacgcagccgctctccggcccccgcctctccctcgtccgctccactttgcttgacggctccgccccccaatccgaggcatacgtcggtgagcctgtgccagccgtcgacggatctgacactctgcctcattggtggatctggtgctctggcatgtagacgacgttggccatcaggttggtgccgcccgccgtgagcagccggagacgtcggcgaggtgatgggttggctggctgacggctagtgtgttgtggccttgttcctggtaccatgtcatccattagagatgtccaggagctggacccaattgccgaggacgaggagaggaggctagaagacgagaacgaggccgaggatgccctccagttcctcatcggtggtgctggtaccgttgaggtggggaccaccactggatccacgccgacgagccccacggtcgaggcgagcagtggctctggatcctgcctcggcccagccacccgttcgaggaggaggtgaccgacgtccaaagtct

SEQ ID NO: 20699 - DNA, 2455 bp, Zea Mays
ccgccccgagctcgcccctatgctcggaccttgcctccctggccatcgtggcgtcactatttcctgctgcgtcgtgacatcgtcgagctccggtgcttagcgtcgaattcactgcgccgttgtcgctctagcttcgtttgtcctcatgcggggtgtggcggtcgtgtccacatccgaggcatcaacgtccgcatcgccagcatcatcgtcgtttcagcagctttgtcgcaccttgcgttcgcaccggaagaccaaagggaagcgacgacgtgcaccacttgtcaggtgttcggtgttatgcatggaccggatagcgtcgtcgatctcgtggctttaagacagatttagttttggtacgttaagtgatcatgtgatgtggaggaccagagctgagtcgaccacaatatgctgttaagcgcgggcttcttcgcaaggtgatgctaatgaataaacttaaggatggatcgcctgaacgagtgccaagacaaaggatggtcgtcaagtgatcgtcgtctaacaaacactaaccaagtgttatgtcaggcaagcccagacaacgagcagtccgaggttcctaagtgtgttgttggagaccttcccgagcaacaacctggtgaaggcaagtgtcctctaacctattatgtcctacataccttatgattcattgtcccgcattacattattgactagcttgtagttaccttatccttgtttacctttttgggttatcatggttagcattttgctattgcctcaactttaaccaatgaacatgatgtgaacatttatgaaacaatattgttatcctgattatgttgatgatcttttgatactctaggaggctcaggcctttttcctgagtacctctccgtaaggtcctgttcgtcgagtgaccacctaggataacagtgcaaccatgagggtggaatgggacacccttagctgattaattagatgaacctgggggtgtagttggctttgccggagggccgtcaatgggggccagggtgtagtgctcgctctgccaaggttggggtgcagaggttcattcgatttagttttgttagtcacccaccttggggaggtgtacagcgtttgtacgactggcaaaacctaacgagcagctatgcaccatgggagtctctgtaaaggctacatagtgtatccctggccattcaccttggtagtgaagatcaggtctgtacaacccaggctagaaagggatcacgactcgtgggtaaagtgtgcaacctctgcagtgttagaaactggtatatcagccgagctcacagttaagagcagccttgggatccactttgattagaagaactttggatacttttatgatgatggttagcaatggtgttacaaatatgatctctggtatttccacttttgagggagtacttttgggtaataactgggtttattactaaaacttggctctactaacaataataaatacttgaccaactaaaagcaactacttaacctcaaccccacatacagctagtccactttagccaaatgggacatttgctgagtacgttgatgtgtactcacccttgctttacacatcacccccaccccaggttgtccccattgtactcagtgcttaggaggtgatgctggcaacatggaggacttcgaggagttccaggaatacgacgagttttagtttatcttagtggcaaacccccagtcagctgcctgtgtaggcttatcatctacgttttgtttctccacactttgatatttatgctaaagacaatggttatgtaatagactctatggatgtctcagacatctggatgtaattaagtaccttttcgttatttaattcgagcattgtgtgatgatgtccaattatgtaatcactgtgtacgtgagttctgatcctggcacgtacatggtttgcattcggtttaccttccaaaaccgggtgtgacagctctacacataacgacaagtgaactgaagagatgataaaggatggctagtataggccaagtgcttgatctcgaatagaaagaaatctagatgcaagtaactacttaacttgacaagtaaaatgaattcttaaggatccactcatagtaagcttttctgcaaaaagagtctttgaatcttgataagctttaacttgattccaaaagccagcatatccttgagagtctttttccttaggcgggtaagactggcaaaagtacacttcgtactcagggttttcgaacccatgttgttgcaggtactatatttgtgctgctgtggatggtgctaagagacggtgggcacgaccttcttataggtttaagtagctcttctatacttcttattaaggatggtcacttaaggtagcatgtatttcaaacttatgaaaggtatacatcattcaaagtgaaatactttggatttactttataatcacttcgatcatgtataatgtaatctgaat

SEQ ID NO: 20700 - DNA, 1355 bp, Zea Mays
tattttaattttattttactcctcacatgttttcatgtcaacaattattcaaacatttctttatcgtaaatatatatatatatacatctatagaagtgattaaaatattttatcatcacacaggcctactcatattctactcggtacactaattccgctaattgaccgaaatagcgaaataactcgctataattgaacctggctcgctaatcgcaagaactgtgattcatcgtgacttacacaatttatcgagcaccttaatgagcatccattactgtgattcacacgcataatcagacacaattatagcatactaagaaacccacaattacctcggtgatgccttggcgtggaggtaaacaagacgtcgtggcacacggaataagctcagggcgacatcagaaacatcggactgttgtcgcaaagtcgaggtgatattgagacgaagtcgatgttggcgagatggacgacggcaagatcgatgacggtcttatgttcgagcttttcatcgagcaccagacgtgcgacacaagccgacttcatacagcggagcaggcgattcgacggcgagttgcagcatagaccaagacgaggtggcgaccatgtccaacgccggggttcagaggcagggaacgactacacatgccgacgtggcccagaggacgaaccccatcgcatgagcagcaacaagggaacagggacgcgctgcaggggagctccacggcggggtcacagcaggggatgacggaacgcgcgcgacgcagtgaaaaccgagcaggggagcaccgagctggagggcgcgcggccaggtcgagctggagggcaagcagggaggagcgaccggcgctggggcacacggccagtgccatggctgagggcgaagaagacctggcgagaagaacgagcaactgcggagggaacacaggcctgggtgagtcctggcaaagttgagcgacgaggagatcgctggaggcaagcaacatgtctgagagctagagcatggcagagagacttgcgtgagatagtgagtgcgtgggggaactcttgaatatatgtgcataggatatattggagaatgagagatgggagggatgacgtgagggaaaagagtccccagagagctcaacgcgtggagatcaggatgagtacattgaagaatatatctagggagatgtacgtgctcaagaaatgaagatggctaaaataattttccaagagttgatcgtactcaggataaggataaaaaaacagaagacgcatacaatatttttttcagggagccgctgagcggtggagatatttttacgaggagccgacgtgcacacgctgggataagaacggtggatgaaaaatca

SEQ ID NO: 20701 - DNA, 2796 bp, Zea Mays
gtgcggatgagagttcggatgcgggtaaaacttagaaatatccttcaaaggcggggcataaaatttcctaaaatttacagatggatctctcaagccttttgaggccaccaatggtgaaaaccgaggcggcggaggagcgggagcccctctcccggacgccagcggcggcagtagcggtcgagggtagcggcagaaggaccgccacggcggtgatcgacctcagcagcagcgactctgattccgacggcgagggtgcggtcggaagcggtaagagggtgaggggcgttggtggagacggctccgcgactaagcgggctagggtttcagcggtcgtcgatctgcccccgggtttcctcgagccaatcccgccgccgccggtgccggtgccattggcagcttgtgcgacgaagcagttctggaaggctggggactacgacggaaagccgctcggtgatggggtggctcagcagtcagtctctggaatggatcatgttcgcgtgcaccctagatttctgcactcaaacgcaacaagtcacaagtgggctctaggtgctttggctgagctgctggacaattctcttgacgaagttataaatggagctacctatgtgaacatagatgtgttagagaatgataaagatatcgataaaaagaagtccagaatgcttcttgttgaagatgatggtggtggaatggaccccgataaaatgcggcaatgcatgtccttgggttattcagctaagagcaaagttgctagtactattggacaatatggtaatggtttcaagacgagtacaatgaggcttggtgctgatgttttggtcttctcccgtagtcctggaaaatcaggcaaaggcctactcaaagcattggcatgctatcttatacatttcttaggagcactggcaaagaggacatcattgttcctatgattgattatgaatataaacaaggctgggaaagaatggtccggactacattggatgattggagcacaagcttccaaaccatcattacatggtctccatattcaactgaagcagaattacttgaacagttctatgaaagatcgagggacacgaattattatttacaatctttgggaggatgaccaaggggacttggagcttgattttgatgctgaaatacatgatattcaactcagaggtggtaatcgtgatgagaaaaatatccagatggcaaatcagttcccaaactccaagcattacctcacatataggcattcattgagaagttatgcatcaattttgtatttgcgacttccgacttacttccaaatgattttgcgcggaaaagagattgaacaccataatattgtgactgacatgatgttgaagaaagaggtcacctacaggcctgtggcacctaatggacatccgaaggattcaaatatggtagctgatgtaacaattgggtttgtaaaagatgcaaaacatcacatcgacgttcaaggatttaatgtataccacatgaaccgtttgataaagcctttctggagagtgtggactgctgctggaagtggaggtcgtggtgtcataggtgttcttgaggcaaacttcattgaacctgctcatgataagcaagactttgagcggacaacacttctagcaagacttgaagcacgattagttcaaatgcagaaggattactggtctgggaatgctcatcgaataggatatgttgcaccacgatttggcaggaatactgaggcaggagatggagaagactctcctgaaaacacagcaagtgcacaaccatcaccttatcattctggtaaagggtacacacatgcaaaagacttgagtaataatatcaaaaagggtggtaaggcaagcacatcatttggtattcagcaaagagctgagaagtccgcaaggactaaacgatctacgaagtcaatactgcacgggctgtctgatagtgataatagtgattctgagtttatgggcaccctgtcgaggtcaagatcgcacaccctgaagacaaaccgaaaattgtttcaaaatggcagtactggtttgataacacctcaatccagtggactgatagaaagagagagggtcagaactaaatcccagccattggacccaaaagcaacaagcaacggagatctacatactatggatgagtatcagtctgttatcatgcagttaagggatgaaaattcatcactaaaggaaagattatcaaagatggaagaatcgatgtcgcaagagctagtggttgagtgtgacaagaacaagtctttgacagagagggtggaggatctgcagagacaacttgagtctgcaaccaaggaacaggaggcgctgatcgacatcttctcagaagaaaggaaccgacgagaccaagaagaggagagcctgaggaagaagctgaaggacgcatcttccaccatacaggatttgctggagcaactgaatgctgccaggaaaggccgcaaagtttgaggaaataaactagtaacgttgctccttgcgggcatcatcttagattagagtttgagggttagctgcatctacattgtgctccaggtcgtttggagcatcccatgtacagccaagcagtagtgaccactgaagaacacgttatgctttatctgcagttagcagttaccctacaagaaataacttgcgtaattatctttttatcctgttacgtcatctcttgattacttgtcggtttctgtgctctggttgctgctgctttgggcttcgggaatacttgtactaccagttggccatggttggtttgaaaggttatgttactgcaagc

SEQ ID NO: 20702 - DNA, 2598 bp, Zea Mays
gtgcggatgagagttcggatgcgggtaaaacttagaaatatccttcaaaggcggggcataaaatttcctaaaatttacagatggatctctcaagccttttgaggccaccaatggtgaaaaccgaggcggcggaggagcgggagcccctctcccggacgccagcggcggcagtagcggtcgagggtagcggcagaaggaccgccacggcggtgatcgacctcagcagcagcgactctgattccgacggcgagggtgcggtcggaagcggtaagagggtgaggggcgttggtggagacggctccgcgactaagcgggctagggtttcagcggtcgtcgatctgcccccgggtttcctcgagccaatcccgccgccgccggtgccggtgccattggcagcttgtgcgacgaagcagttctggaaggctggggactacgacggaaagccgctcggtgatggggtggctcagcagtcagtctctggaatggatcatgttcgcgtgcaccctagatttctgcactcaaacgcaacaagtcacaagtgggctctaggtgctttggctgagctgctggacaattctcttgacgaagttataaatggagctacctatgtgaacatagatgtgttagagaatgataaagatatcgataaaaagaagtccagaatgcttcttgttgaagatgatggtggtggaatggaccccgataaaatgcggcaatgcatgtccttgggttattcagctaagagcaaagttgctagtactattggacaatatggtaatggtttcaagacgagtacaatgaggcttggtgctgatgttttggtcttctcccgtagtcctggaaaatcaggcaaaaggcctactcaaagcattggcatgctatcttatacatttcttaggagcactggcaaagaggacatcattgttcctatgattgattatgaatataaacaaggctgggaaagaatggtccggactacattggatgattggagcacaagcttccaaaccatcattacatggtctccatattcaactgaagcagaattacttgaacagagttatgcatcaattttgtatttgcgacttccgacttacttccaaatgattttgcgcggaaaagagattgaacaccataatattgtgactgacatgatgttgaagaaagaggtcacctacaggcctgtggcacctaatggacatccgaaggattcaaatatggtagctgatgtaacaattgggtttgtaaaagatgcaaaacatcacatcgacgttcaaggatttaatgtataccacatgaaccgtttgataaagcctttctggagagtgtggactgctgctggaagtggaggtcgtggtgtcataggtgttcttgaggcaaacttcattgaacctgctcatgataagcaagactttgagcggacaacacttctagcaagacttgaagcacgattagttcaaatgcagaaggattactggtctgggaatgctcatcgaataggatatgttgcaccacgatttggcaggaatactgaggcaggagatggagactctcctgaaaacacagcaagtgcacaaccatcaccttatcattctggtaaagggtacacacatgcaaaagacttgagtaataatatcaaaaagggtggtaaggcaagcacatcatttggtattcagcaaagagctgagaagtccgcaaggactaaacgatctacgaagtcaatactgcacgggctgtctgatagtgataatagtgattctgagtttatgggcaccctgtcgaggtcaagatcgcacaccctgaagacaaaccgaaaattgtttcaaaatggcagtactggtttgataacacctcaatccagtggactgatagaaagagagagggtcagaactaaatcccagccattggacccaaaagcaacaagcaacggagatctacatactatggatgagtatcagtctgttatcatgcagttaagggatgaaaattcatcactaaaggaaagattatcaaagatggaagaatcgatgtcgcaagagctagtggttgagtgtgacaagaacaagtctttgacagagagggtggaggatctgcagagacaacttgagtctgcaaccaaggaacaggaggcgctgatcgacatcttctcagaagaaaggaaccgacgagaccaagaagaggagagcctgaggaagaagctgaaggacgcatcttccaccatacaggatttgctggagcaactgaatgctgccaggaaaggccgcaaagtttgaggaaataaactagtaacgttgctccttgcgggcatcatcttagattagagtttgagggttagctgcatctacattgtgctccaggtcgtttggagcatcccatgtacagccaagcagtagtgaccactgaagaacacgttatgctttatctgcagttagcagttaccctacaagaaataacttgcgtaattatctttttatcctgttacgtcatctcttgattacttgtcggtttctgtgctctggttgctgctgctttgggcttcgggaatacttgtactaccagttggccatggttggtttgaaaggttatgttactgcaagc

SEQ ID NO: 20703 - DNA, 2799 bp, Zea Mays
gtgcggatgagagttcggatgcgggtaaaacttagaaatatccttcaaaggcggggcataaaatttcctaaaatttacagatggatctctcaagccttttgaggccaccaatggtgaaaaccgaggcggcggaggagcgggagcccctctcccggacgccagcggcggcagtagcggtcgagggtagcggcagaaggaccgccacggcggtgatcgacctcagcagcagcgactctgattccgacggcgagggtgcggtcggaagcggtaagagggtgaggggcgttggtggagacggctccgcgactaagcgggctagggtttcagcggtcgtcgatctgcccccgggtttcctcgagccaatcccgccgccgccggtgccggtgccattggcagcttgtgcgacgaagcagttctggaaggctggggactacgacggaaagccgctcggtgatggggtggctcagcagtcagtctctggaatggatcatgttcgcgtgcaccctagatttctgcactcaaacgcaacaagtcacaagtgggctctaggtgctttggctgagctgctggacaattctcttgacgaagttataaatggagctacctatgtgaacatagatgtgttagagaatgataaagatatcgataaaaagaagtccagaatgcttcttgttgaagatgatggtggtggaatggaccccgataaaatgcggcaatgcatgtccttgggttattcagctaagagcaaagttgctagtactattggacaatatggtaatggtttcaagacgagtacaatgaggcttggtgctgatgttttggtcttctcccgtagtcctggaaaatcaggcaaaaggcctactcaaagcattggcatgctatcttatacatttcttaggagcactggcaaagaggacatcattgttcctatgattgattatgaatataaacaaggctgggaaagaatggtccggactacattggatgattggagcacaagcttccaaaccatcattacatggtctccatattcaactgaagcagaattacttgaacagtttagttctatgaaagatcgagggacacgaattattatttacaatctttgggaggatgaccaaggggacttggagcttgattttgatgctgaaatacatgatattcaactcagaggtggtaatcgtgatgagaaaaatatccagatggcaaatcagttcccaaactccaagcattacctcacatataggcattcattgagaagttatgcatcaattttgtatttgcgacttccgacttacttccaaatgattttgcgcggaaaagagattgaacaccataatattgtgactgacatgatgttgaagaaagaggtcacctacaggcctgtggcacctaatggacatccgaaggattcaaatatggtagctgatgtaacaattgggtttgtaaaagatgcaaaacatcacatcgacgttcaaggatttaatgtataccacatgaaccgtttgataaagcctttctggagagtgtggactgctgctggaagtggaggtcgtggtgtcataggtgttcttgaggcaaacttcattgaacctgctcatgataagcaagactttgagcggacaacacttctagcaagacttgaagcacgattagttcaaatgcagaaggattactggtctgggaatgctcatcgaataggatatgttgcaccacgatttggcaggaatactgaggcaggagatggagactctcctgaaaacacagcaagtgcacaaccatcaccttatcattctggtaaagggtacacacatgcaaaagacttgagtaataatatcaaaaagggtggtaaggcaagcacatcatttggtattcagcaaagagctgagaagtccgcaaggactaaacgatctacgaagtcaatactgcacgggctgtctgatagtgataatagtgattctgagtttatgggcaccctgtcgaggtcaagatcgcacaccctgaagacaaaccgaaaattgtttcaaaatggcagtactggtttgataacacctcaatccagtggactgatagaaagagagagggtcagaactaaatcccagccattggacccaaaagcaacaagcaacggagatctacatactatggatgagtatcagtctgttatcatgcagttaagggatgaaaattcatcactaaaggaaagattatcaaagatggaagaatcgatgtcgcaagagctagtggttgagtgtgacaagaacaagtctttgacagagagggtggaggatctgcagagacaacttgagtctgcaaccaaggaacaggaggcgctgatcgacatcttctcagaagaaaggaaccgacgagaccaagaagaggagagcctgaggaagaagctgaaggacgcatcttccaccatacaggatttgctggagcaactgaatgctgccaggaaaggccgcaaagtttgaggaaataaactagtaacgttgctccttgcgggcatcatcttagattagagtttgagggttagctgcatctacattgtgctccaggtcgtttggagcatcccatgtacagccaagcagtagtgaccactgaagaacacgttatgctttatctgcagttagcagttaccctacaagaaataacttgcgtaattatctttttatcctgttacgtcatctcttgattacttgtcggtttctgtgctctggttgctgctgctttgggcttcgggaatacttgtactaccagttggccatggttggtttgaaaggttatgttactgcaagc

SEQ ID NO: 20704 - DNA, 698 bp, Zea Mays
caattttaaagacgggaaatgtattttactcatatagataatcttatataaaaataggtttatatatcctggtgctcttgccatggctggtgcatcgctcctctccccatcctgcacgctcctccgcctgattcccagcgcgtcgcacttcaagagattcgatcgggttcgccggttcgcgcccgccgccatggcgacttcctcaggaccaaaggaggcgccagcgaataaccctgggctccagaccgaggtcgaccccgccaccaaaggctacttcttgcaacaaacgatgttacgtgtgaaggacccaaaagtgagccttgacttctactcacgtgtgatgggcatgtcgttgctgaaaaggttggattttgaagagatgaaattcagtttgtattttctaggttacgaggatgtgaccttagcccctgatgatcatatcaagcggactgaatggacttttaggcaaaaagctactcttgagctcacccacaactggggcacggaaaatgaccctgaattcaaaggttaccataatgggaactcagaccctcgtggttttggtcatataggagtaactgtggatgatgtccacaaggcatgtgaacgctttgaacgtcttggggttgagtttgtgaagaaacctgatgatgggtaactgagcatattacgactgatgtacactagggattgcccaa

SEQ ID NO: 20705 - DNA, 738 bp, Zea Mays
attttactcatatagataatcttatataaaaataggtttatatatcctggtgctcttgccatggctggtgcatcgctcctctccccatcctgcacgctcctccgcctgattcccagcgcgtcgcacttcaagagattcgatcgggttcgccggttcgcgcccgccgccatggcgacttcctcaggaccaaaggaggcgccagcgaataaccctgggctccagaccgaggtcgaccccgccaccaaaggctacttcttgcaacaaacgatgttacgtgtgaaggacccaaaagtgagccttgacttctactcacgtgtgatgggcatgtcaaatcagcaagctgcgcttccgaaggcacatattgaagatcaatggtcttctgatgacaatgagaccaagtggatgatacatcaacaccaatgtgttctgttgctgaaaaggttggattttgaagagatgaaattcagtttgtattttctaggttacgaggatgtgaccttagcccctgatgatcatatcaagcggactgaatggacttttaggcaaaaagctactcttgagctcacccacaactggggcacggaaaatgaccctgaattcaaaggttaccataatgggaactcagaccctcgtggttttggtcatataggagtaactgtggatgatgtccacaaggcatgtgaacgctttgaacgtcttggggttgagtttgtgaagaaacctgatgatgatttgcag

SEQ ID NO: 20706 - DNA, 775 bp, Zea Mays
attttactcatatagataatcttatataaaaataggtttatatatcctggtgctcttgccatggctggtgcatcgctcctctccccatcctgcacgctcctccgcctgattcccagcgcgtcgcacttcaagagattcgatcgggttcgccggttcgcgcccgccgccatggcgacttcctcaggaccaaaggaggcgccagcgaataaccctgggctccagaccgaggtcgaccccgccaccaaaggctacttcttgcaacaaacgatgttacgtgtgaaggacccaaaagtgagccttgacttctactcacgtgtgatgggcatgtcaaatcagcaagctgcgcttccgaaggcacatattgaagatcaatggtcttctgatgacaatgagaccaagtggatgatacatcaacaccaatgtgttctgttgctgaaaaggttggattttgaagagatgaaattcagtttgtattttctaggttacgaggatgtgaccttagcccctgatgatcatatcaagcggactgaatggacttttaggcaaaaagctactcttgagctcacccacaactggggcacggaaaatgaccctgaattcaaaggttaccataatgggaactcagaccctcgtggttttggtcatataggagtaactgtggatgatgtccacaaggcatgtgaacgctttgaacgtcttggggttgagtttgtgaagaaacctgatgatgggtaactgagcatattacgactgatgtacactagggattgcccaa

SEQ ID NO: 20707 - DNA, 899 bp, Zea Mays
ttttactcatatagataatcttatataaaaataggtttatatatcctggtgctcttgccatggctggtgcatcgctcctctccccatcctgcacgctcctccgcctgattcccagcgcgtcgcacttcaagagattcgatcgggttcgccggttcgcgcccgccgccatggcgacttcctcaggaccaaaggaggcgccagcgaataaccctgggctccagaccgaggtcgaccccgccaccaaaggctacttcttgcaacaaacgatgttacgtgtgaaggacccaaaagtgagccttgacttctactcacgtgtgatgggcatgtcgttgctgaaaaggttggattttgaagagatgaaattcagtttgtattttctaggttacgaggatgtgaccttagcccctgatgatcatatcaagcggactgaatggacttttaggcaaaaagctactcttgagctcacccacaactggggcacggaaaatgaccctgaattcaaaggttaccataatgggaactcagaccctcgtggttttggtcatataggagtaactgtggatgatgtccacaaggcatgtgaacgctttgaacgtcttggggttgagtttgtgaagaaacctgatgatggaaaaatcaaaggcatcgctttcatcaaagatcctgatggttactggatcgaaatatttgaccagacgattgggacggtaacttcttcagcatcatgatgaacagtagtggttccttatatgcacacttgactcgtcgccataggagtgaactatttgaatggttactgttgttgtcaaccattatcaatttcggagcgagagacacttcatcgagaccaatttcatttgatctttatgacaagaacttttcaccaatagattgacatc

SEQ ID NO: 20708 - DNA, 1191 bp, Zea Mays
atagataatcttatataaaaataggtttatatatcctggtgctcttgccatggctggtgcatcgctcctctccccatcctgcacgctcctccgcctgattcccagcgcgtcgcacttcaagagattcgatcgggttcgccggttcgcgcccgccgccatggcgacttcctcaggaccaaaggaggcgccagcgaataaccctgggctccagaccgagatgttacgtgtgaaggacccaaaagtgagccttgacttctactcacgtgtgatgggcatgtcgttgctgaaaaggttggattttgaagagatgaaattcagtttgtattttctaggttacgaggatgtgaccttagcccctgatgatcatatcaagcggactgaatggacttttaggcaaaaagctactcttgagctcacccacaactggggcacggaaaatgaccctgaattcaaaggttaccataatgggaactcagaccctcgtggttttggtcatataggagtaactgtggatgatgtccacaaggcatgtgaacgctttgaacgtcttggggttgagtttgtgaagaaacctgatgatggaaaaatcaaaggcatcgctttcatcaaagatcctgatggttactggatcgaaatatttgaccagacgattgggacggtaacttcttcagcatcatgatgaacagtagtggttccttatatggtgcgcaagatcatacaactctggcataagagcttttcatatgtgtgtctggggtctggactcggattaagggctggaatctgtttacttctagcatcttcttgctttaataatatgcgaactatgttgaggaatgaaataaaataagttcgggtaaaaattcaagtttctgttgtcctgaccggtggtcccgcctgcatgcacactccccagcgcgggcacgtcctgtgccactgccttgtgggcccggccgcatgcaagcgcatgccttggagttacggttggagttggaggttcccccacctggcgacgcgaattagggctgggcaaaaaaaatccgaaatccgaattttgttcgggaattttgggtagtaacttgcaaaacccgaatttattttgggcatcataatcgggtacctgaattacccgaactttcatgtgtcatgtactcacgtcgtgtttaattattaatttgtacatctataatt

SEQ ID NO: 20709 - DNA, 1292 bp, Zea Mays
atagataatcttatataaaaataggtttatatatcctggtgctcttgccatggctggtgcatcgctcctctccccatcctgcacgctcctccgcctgattcccagcgcgtcgcacttcaaggtcccgtgttccgtactggaggatttggattgatgattatggtgactttcgctcaggtttcactcaccattccccgttgggaattttcttgatttcgtagagattcgatcgggttcgccggttcgcgcccgccgccatggcgacttcctcaggaccaaaggaggcgccagcgaataaccctgggctccagaccgaggtcgaccccgccaccaaaggctacttcttgcaacaaacgatgttacgtgtgaaggacccaaaagttgctgaaaaggttggattttgaagagatgaaattcagtttgtattttctaggttacgaggatgtgaccttagcccctgatgatcatatcaagcggactgaatggacttttaggcaaaaagctactcttgagctcacccacaactggggcacggaaaatgaccctgaattcaaaggttaccataatgggaactcagaccctcgtggttttggtcatataggagtaactgtggatgatgtccacaaggcatgtgaacgctttgaacgtcttggggttgagtttgtgaagaaacctgatgatggaaaaatcaaaggcatcgctttcatcaaagatcctgatggttactggatcgaaatatttgaccagacgattgggacggtaacttcttcagcatcatgatgaacagtagtggttccttatatggtgcgcaagatcatacaactctggcataagagcttttcatatgtgtgtctggggtctggactcggattaagggctggaatctgtttacttctagcatcttcttgctttaataatatgcgaactatgttgaggaatgaaataaaataagttcgggtaaaaattcaagtttctgttgtcctgaccggtggtcccgcctgcatgcacactccccagcgcgggcacgtcctgtgccactgccttgtgggcccggccgcatgcaagcgcatgccttggagttacggttggagttggaggttcccccacctggcgacgcgaattagggctgggcaaaaaaaatccgaaatccgaattttgttcgggaattttgggtagtaacttgcaaaacccgaatttattttgggcatcataatcgggtacctgaattacccgaactttcatgtgtcatgtactcacgtcgtgtttaattattaatttgtacatctataatt

SEQ ID NO: 20710 - DNA, 840 bp, Zea Mays
atagataatcttatataaaaataggtttatatatcctggtgctcttgccatggctggtgcatcgctcctctccccatcctgcacgctcctccgcctgattcccagcgcgtcgcacttcaagagattcgatcgggttcgccggttcgcgcccgccgccatggcgacttcctcaggaccaaaggaggcgccagcgaataaccctgggctccagaccgaggtcgaccccgccaccaaaggctacttcttgcaacaaacgatgttacgtgtgaaggacccaaaagtgagccttgacttctactcacgtgtgatgggcatgtcgttgctgaaaaggttggattttgaagagatgaaattcagtttgtattttctaggttacgaggatgtgaccttagcccctgatgatcatatcaagcggactgaatggacttttaggcaaaaagctactcttgagctcacccacaactggggcacggaaaatgaccctgaattcaaaggttaccataatgggaactcagaccctcgtggttttggtcatataggagtaactgtggatgatgtccacaaggcatgtgaacgctttgaacgtcttggggttgagtttgtgaagaaacctgatgatggaaaaatcaaaggcatcgctttcatcaaagatcctgatggttactggatcgaaatatttgaccagacgattgggacggtaacttcttcagcatcatgatgaacagtagtggttccttatatgcacacttgactcgtcgccataggagtgaactatttgaatggttactgttgttgtcaaccattatcaatttcgggtgagcgagggcctccatggcttct

SEQ ID NO: 20711 - DNA, 7901 bp, Zea Mays
ccgccctcctcctggctcgccagtcgcacctccccgcccccgcccctcggtctctccgcctccgccccgccgcctctctccgcctccttctctgctccgccccgccgccgcaaggatccaacacccgcgcgtcgccttctccgctgtctttcttaccgagattttccaggagttttcttccctttttatggcactgtgcgtttgagaaggtcttcaattgtgctgtctgggccacggaacgacaatgtcacagcttggattagccgcagctgcctcaaaggccttgccactactccctaatcgccagagaagttcagctgggactacattctcatcatcttcattatcgaggcccttaaacagaaggaaaagccgtactcgttcactccgtgatggcggagatggggtatcagatgccaaaaagcacagccagtctgttcgtcaaggtcttgctggcattatcgacctcccaagtgaggcaccttccgaagtggatatttcacatggatctgaggatcctagggggccaacagattcttatcaaatgaatgggattatcaatgaaacacataatggaagacatgcctcagtgtccaaggttgttgaattttgtgcggcactaggtggcaaaacaccaattcacagtatattagtggccaacaatggaatggcagcagcaaaatttatgaggagtgtccggacatgggctaatgatacttttggatctgagaaggcaattcaactcatagctatggcaactccggaagacatgaggataaatgcagaacacattagaattgctgaccaattcgtagaggtgcctggtggaacaaacaataataactacgccaatgttcaactcatagtggagatggcacaaaaactaggtgtttctgctgtttggcctggttggggtcatgcttctgagaatcctgaactgccagatgtattgaccgcaaaagggatcgtttttcttggcccacctgcatcatcaatgaatgctttgggagataaggtcggctcagctctcattgctcaagcagccggggtcccaactcttgcttggagtggatcacatgttgaagttccattagagtgctgcttagacgcgatacctgaggagatgtatagaaaagcttgcgttactaccacagaggaagcagttgcaagttgtcaagtggttggttatcctgccatgattaaggcatcctggggaggtggtggtaaaggaataagaaaggttcataatgatgatgaggttagagcgctgtttaagcaagtacaaggtgaagtccctggctccccaatatttgtcatgaggcttgcatcccagagtcggcatcttgaagttcagttgctttgtgatcaatatggtaatgtagcagcacttcacagtcgtgattgcagtgtgcaacggcgacaccagaagattattgaagaaggtccagttactgttgctcctcgtgagacagttaaagcacttgagcaggcagcaaggaggcttgctaaggctgtgggttatgttggtgctgctactgttgagtatctttacagcatggaaactggagactactattttctggaacttaatccccgactacaggttgagcatccagtcaccgagtggatagctgaagtaaatctgcctgcagctcaagttgctgttggaatgggcatacctctttggcagattccagaaatcagacgtttctatggaatggactatggaggagggtatgacatttggaggaaaacagcagctcttgctacaccatttaattttgatgaagtagattctcaatggccaaagggccattgtgtagcagttagaattactagtgaggacccagatgatggtttcaaacctactggtgggaaagtgaaggagataagttttaaaagcaagcctaatgtttgggcctacttctcagtaaagtctggtggaggcattcatgaatttgctgattctcagttcggacatgtttttgcatatgggctctctagatcagcagcaataacaaacatgactcttgcattaaaagagattcaaattcgtggagaaattcattcaaatgttgattacacagttgacctcttaaatgcttcagactttagagaaaacaagattcatactggttggctcgacaccagaatagctatgcgtgttcaagctgagaggcccccatggtatatttcagtggttgggggtgctttatataaaacagtaaccaccaatgcagccactgtttctgaatatgttagttatctcaccaagggccagattccaccaaagcatatatcccttgtcaattctacagttaatttgaatatagaagggagcaaatacacaattgaaactgtaaggactggacatggtagctacaggttgagaatgaatgattcaacagttgaagcgaatgtacaatctttatgtgatggtggcctcttaatgcagttggatggaaacagccatgtaatttatgcagaagaagaagctggtggtacacggcttcagattgatggaaagacatgtttattgcagaatgaccatgatccatcaaagttattagctgagacaccctgcaaacttcttcgtttcttggttgctgatggtgctcatgttgatgcggatgtaccatacgcggaagttgaggttatgaagatgtgcatgcctctcttgtcacctgcttctggtgtcattcattgtatgatgtctgagggccaggcattgcaggctggtgatcttatagcaaggttggatcttgatgacccttctgctgtgaaaagagctgagccatttgatggaatatttccacaaatggagctccctgttgctgtctctagtcaagtacacaaaagatatgctgcaagtttgaatgctgctcgaatggtccttgcaggatatgagcacaatattaatgaagtcgttcaagatttggtatgctgcctggacaaccctgagcttcctttcctacagtgggatgaacttatgtctgttctagcaacgaggcttccaagaaatctcaagagtgagttagaggataaatacaaggaatacaagttgaatttttaccatggaaaaaacgaggactttccatccaagttgctaagagacatcattgaggaaaatctttcttatggttcagagaaggaaaaggctacaaatgagaggcttgttgagcctcttatgaacctactgaagtcatatgagggtgggagagagagccatgcacattttgttgtcaagtctcttttcgaggagtatcttacagtggaagaactttttagtgatggcattcagtctgacgtgattgaaacattgcggcatcagcacagtaaagacctgcagaaggttgtagacattgtgttgtctcaccagggtgtgaggaacaaagctaagcttgtaacggcacttatggaaaagctggtttatccaaatcctggtggttacagggatctgttagttcgcttttcttccctcaatcataaaagatattataagttggcccttaaagcaagtgaacttcttgaacaaaccaaactaagtgaactccgtgcaagcgttgcaagaagcctttcggatctggggatgcataagggagaaatgagtattaaggataacatggaagatttagtctctgccccattacctgttgaagatgctctgatttctttgtttgattacagtgatcgaactgttcagcagaaagtgattgagacatacatatcacgattgtaccagcctcatcttgtaaaggatagcatccaaatgaaattcaaggaatctggtgctattactttttgggaattttatgaagggcatgttgatactagaaatggacatggggctattattggtgggaagcgatggggtgccatggtcgttctcaaatcacttgaatctgcgtcaacagccattgtggctgcattaaaggattcggcacagttcaacagctctgagggcaacatgatgcacattgcattattgagtgctgaaaatgaaagtaatataagtggaataagtgatgatcaagctcaacataagatggaaaagcttagcaagatactgaaggatactagcgttgcaagtgatctccaagctgctggtttgaaggttataagttgcattgttcaaagagatgaagctcgcatgccaatgcgccacacattcctctggttggatgacaagagttgttatgaagaagagcagattctccggcatgtggagcctcccctctctacacttcttgaattggataagttgaaggtgaaaggatacaatgaaatgaagtatactccttcgcgtgaccgccaatggcatatctacacactaagaaatactgaaaaccccaaaatgttgcatagggtgtttttccgaactattgtcaggcaacccaatgcaggcaacaagtttacatcggctcagatcagcgacgctgaagtaggatgtcccgaagaatctctttcatttacatcaaatagcatcttaagatcattgatgactgctattgaagaattagagcttcatgcaattaggacaggtcattctcacatgtatttgtgcatactgaaagagcaaaagcttcttgacctcattccattttcagggagtacaattgttgatgttggccaagatgaagctaccgcttgttcacttttaaaatcaatggctttgaagatacatgagcttgttggtgcaaggatgcatcatctgtctgtatgccagtgggaggtgaaactcaagttggactgtgatggccctgcaagtggtacctggagagttgtaactacaaatgttactggtcacacctgcaccattgatatataccgagaagtggaggaaatagaatcgcagaagttagtgtaccattcagccacttcgtcagctggaccattgcatggtgttgcactgaataatccatatcaacctttgagtgtgattgatctaaagcgctgctctgctaggaacaacagaacaacatattgctatgattttccgctggcctttgaaactgcactgcagaagtcatggcagtccaatggctctactgtttctgaaggcaatgaaaatagtaaatcctacgtgaaggcaactgagctagtgtttgctgaaaaacatgggtcctggggcactcctataattccgatggaacgccctgctgggctcaacgacattggtatggtcgcttggatcatggagatgtcaacacctgaatttcccaatggcaggcagattattgttgtagcaaatgatatcactttcagagctggatcatttggcccaagggaagatgcattttttgaaactgtcactaacctggcttgcgaaaggaaacttcctcttatatacttggcagcaaactctggtgctaggattggcatagctgatgaagtaaaatcttgcttccgtgttggatggtctgacgaaggcagtcctgaacgagggtttcagtacatctatctgactgaagaagactatgctcgcattagctcttctgttatagcacataagctggagctagatagtggtgaaattaggtggattattgactctgttgtgggcaaggaggatgggcttggtgtcgagaacatacatggaagtgctgctattgccagtgcttattctagggcatatgaggagacatttacacttacatttgtgactgggcggactgtaggaataggagcttatcttgctcgacttggtatacggtgcatacagcgtcttgaccagcctattattttaacagggttttctgccctgaacaagctccttgggcgggaagtgtacagctcccacatgcagcttggtggtcctaagatcatggcgaccaatggtgttgtccacctcactgttccagatgaccttgaaggtgtttccaatatattgaggtggctcagctatgttcctgcaaacattggtggacctcttcctattaccaaacctctggaccctccagacagacctgttgcttacatccctgagaacacatgcgatccacgtgcagctatctgtggtgtagatgacagccaagggaaatggttgggtggtatgtttgacaaagacagctttgtggagacatttgaaggatgggcaaaaacagtggttactggcagagcaaagcttggaggaattcctgtgggcgtcatagctgtggagacacagaccatgatgcagatcatccctgctgatccaggtcagcttgattcccatgagcgatctgtccctcgtgctggacaagtgtggttcccagattctgcaaccaagaccgctcaggcattattagacttcaaccgtgaaggattgcctctgttcatcctggctaattggagaggcttctctggtggacaaagagatctctttgaaggaattcttcaggctgggtcaacaattgtcgagaaccttaggacatataatcagcctgcttttgtgtacattcctatggctggagagcttcgtggaggagcttgggttgtggtcgatagcaaaataaatccagaccgcattgagtgttatgctgaaaggactgccaaaggtaatgttctcgaacctcaagggttaattgaaatcaagttcaggtcagaggaactccaagactgtatgggtaggcttgacccagagttgataaatctgaaagcaaaactccaagatgtaaatcatggaaatggaagtctaccagacatagaagggattcggaagagtatagaagcacgtacgaaacagttgctgcctttatatacccagattgcaatacggtttgctgaattgcatgatacttccctaagaatggcagctaaaggtgtgattaagaaagttgtagactgggaagaatcacgctcgttcttctataaaaggctacggaggaggatcgcagaagatgttcttgcaaaagaaataaggcagatagtcggtgataaatttacgcaccaattagcaatggagctcatcaaggaatggtaccttgcttctcaggccacaacaggaagcactggatgggatgacgatgatgcttttgttgcctggaaggacagtcctgaaaactacaaggggcatatccaaaagcttagggctcaaaaagtgtctcattcgctctctgatcttgctgactccagttcagatctgcaagcattctcgcagggtctttctacgctattagataagatggatccctctcagagagcgaagtttgttcaggaagtcaagaaggtccttgattgatgataccaacacatccaacacaatgtgtgcatgtcacatctttttgttctagtacatacatagaaggatattgcttggtcttgattgatcatgtctgatttaagtcgactattatttcttggaattttcttttggacctggtgctatggttgatggatgtatattggatatgtgcgttctgccaggtgtaagcacaaaggtttagacagaccgagagcaagagcgagtgaacctgttctggttttgcagtggttcagtaaggcagaaagttgttaaaccgtagttctgagatgtattaccagtggcgccatgctgtacttttagggtgtataatgcggatacaaataaacaatttagcggttcattaaagtttgaactcaaataacatgttctttgtaagcatatgtaccgtacctctacgtgaaataaagttgttgaattagcattcgacatcagaatttgttaggactaggttttgtatggtttagggaggtgtaatagtgtcacacccggatttcggggcatcaagacccgggcgcgaacataatcatcaggtataatcatcaggtgtgctgggaccaagtctcacacatatgatgaatcatggcacatgatcgaatgtcacatctttactatataatcggggttttgtacaaaataaataaataaatacattatatgg

SEQ ID NO: 20712 - DNA, 7793 bp, Zea Mays
cctcctggctcgccagtcgcacctccccgcccccgcccctcggtctctccgcctccgccccgccgcctctctccgcctccttctctgctccgccccgccgccgcaaggatccaacacccgcgcgtcgccttctccgctgtctttcttaccgagattttccaggagttttcttccctttttatggcactgtgcgtttgagaaggtcttcaattgtgctgtctgggccacggaacgacaatgtcacagcttggattagccgcagctgcctcaaaggccttgccactactccctaatcgccagagaagttcagctgggactacattctcatcatcttcattatcgaggcccttaaacagaaggaaaagccgtactcgttcactccgtgatggcggagatggggtatcagatgccaaaaagcacagccagtctgttcgtcaaggtcttgctggcattatcgacctcccaagtgaggcaccttccgaagtggatatttcacatggatctgaggatcctagggggccaacagattcttatcaaatgaatgggattatcaatgaaacacataatggaagacatgcctcagtgtccaaggttgttgaattttgtgcggcactaggtggcaaaacaccaattcacagtatattagtggccaacaatggaatggcagcagcaaaatttatgaggagtgtccggacatgggctaatgatacttttggatctgagaaggcaattcaactcatagctatggcaactccggaagacatgaggataaatgcagaacacattagaattgctgaccaattcgtagaggtgcctggtggaacaaacaataataactacgccaatgttcaactcatagtggagatggcacaaaaactaggtgtttctgctgtttggcctggttggggtcatgcttctgagaatcctgaactgccagatgtattgaccgcaaaagggatcgtttttcttggcccacctgcatcatcaatgaatgctttgggagataaggtcggctcagctctcattgctcaagcagccggggtcccaactcttgcttggagtggatcacatgttgaagttccattagagtgctgcttagacgcgatacctgaggagatgtatagaaaagcttgcgttactaccacagaggaagcagttgcaagttgtcaagtggttggttatcctgccatgattaaggcatcctggggaggtggtggtaaaggaataagaaaggttcataatgatgatgaggttagagcgctgtttaagcaagtacaaggtgaagtccctggctccccaatatttgtcatgaggcttgcatcccagagtcggcatcttgaagttcagttgctttgtgatcaatatggtaatgtagcagcacttcacagtcgtgattgcagtgtgcaacggcgacaccagaagattattgaagaaggtccagttactgttgctcctcgtgagacagttaaagcacttgagcaggcagcaaggaggcttgctaaggctgtgggttatgttggtgctgctactgttgagtatctttacagcatggaaactggagactactattttctggaacttaatccccgactacaggttgagcatccagtcaccgagtggatagctgaagtaaatctgcctgcagctcaagttgctgttggaatgggcatacctctttggcagattccaggagataagttttaaaagcaagcctaatgtttgggcctacttctcagtaaagtctggtggaggcattcatgaatttgctgattctcagttcggacatgtttttgcatatgggctctctagatcagcagcaataacaaacatgactcttgcattaaaagagattcaaattcgtggagaaattcattcaaatgttgattacacagttgacctcttaaatgcttcagactttagagaaaacaagattcatactggttggctcgacaccagaatagctatgcgtgttcaagctgagaggcccccatggtatatttcagtggttgggggtgctttatataaaacagtaaccaccaatgcagccactgtttctgaatatgttagttatctcaccaagggccagattccaccaaagcatatatcccttgtcaattctacagttaatttgaatatagaagggagcaaatacacaattgaaactgtaaggactggacatggtagctacaggttgagaatgaatgattcaacagttgaagcgaatgtacaatctttatgtgatggtggcctcttaatgcagttggatggaaacagccatgtaatttatgcagaagaagaagctggtggtacacggcttcagattgatggaaagacatgtttattgcagaatgaccatgatccatcaaagttattagctgagacaccctgcaaacttcttcgtttcttggttgctgatggtgctcatgttgatgcggatgtaccatacgcggaagttgaggttatgaagatgtgcatgcctctcttgtcacctgcttctggtgtcattcattgtatgatgtctgagggccaggcattgcaggctggtgatcttatagcaaggttggatcttgatgacccttctgctgtgaaaagagctgagccatttgatggaatatttccacaaatggagctccctgttgctgtctctagtcaagtacacaaaagatatgctgcaagtttgaatgctgctcgaatggtccttgcaggatatgagcacaatattaatgaagtcgttcaagatttggtatgctgcctggacaaccctgagcttcctttcctacagtgggatgaacttatgtctgttctagcaacgaggcttccaagaaatctcaagagtgagttagaggataaatacaaggaatacaagttgaatttttaccatggaaaaaacgaggactttccatccaagttgctaagagacatcattgaggaaaatctttcttatggttcagagaaggaaaaggctacaaatgagaggcttgttgagcctcttatgaacctactgaagtcatatgagggtgggagagagagccatgcacattttgttgtcaagtctcttttcgaggagtatcttacagtggaagaactttttagtgatggcattcagtctgacgtgattgaaacattgcggcatcagcacagtaaagacctgcagaaggttgtagacattgtgttgtctcaccagggtgtgaggaacaaagctaagcttgtaacggcacttatggaaaagctggtttatccaaatcctggtggttacagggatctgttagttcgcttttcttccctcaatcataaaagatattataagttggcccttaaagcaagtgaacttcttgaacaaaccaaactaagtgaactccgtgcaagcgttgcaagaagcctttcggatctggggatgcataagggagaaatgagtattaaggataacatggaagatttagtctctgccccattacctgttgaagatgctctgatttctttgtttgattacagtgatcgaactgttcagcagaaagtgattgagacatacatatcacgattgtaccagcctcatcttgtaaaggatagcatccaaatgaaattcaaggaatctggtgctattactttttgggaattttatgaagggcatgttgatactagaaatggacatggggctattattggtgggaagcgatggggtgccatggtcgttctcaaatcacttgaatctgcgtcaacagccattgtggctgcattaaaggattcggcacagttcaacagctctgagggcaacatgatgcacattgcattattgagtgctgaaaatgaaagtaatataagtggaataaggtttgttctaatgcaatattaggtccaaaggagtttttgtctatgttgagctactctttttttaactgagttcatttctttcagcagtgatgatcaagctcaacataagatggaaaagcttagcaagatactgaaggatactagcgttgcaagtgatctccaagctgctggtttgaaggttataagttgcattgttcaaagagatgaagctcgcatgccaatgcgccacacattcctctggttggatgacaagagttgttatgaagaagagcagattctccggcatgtggagcctcccctctctacacttcttgaattggataagttgaaggtgaaaggatacaatgaaatgaagtatactccttcgcgtgaccgccaatggcatatctacacactaagaaatactgaaaaccccaaaatgttgcatagggtgtttttccgaactattgtcaggcaacccaatgcaggcaacaagtttacatcggctcagatcagcgacgctgaagtaggatgtcccgaagaatctctttcatttacatcaaatagcatcttaagatcattgatgactgctattgaagaattagagcttcatgcaattaggacaggtcattctcacatgtatttgtgcatactgaaagagcaaaagcttcttgacctcattccattttcagggagtacaattgttgatgttggccaagatgaagctaccgcttgttcacttttaaaatcaatggctttgaagatacatgagcttgttggtgcaaggatgcatcatctgtctgtatgccagtgggaggtgaaactcaagttggactgtgatggccctgcaagtggtacctggagagttgtaactacaaatgttactggtcacacctgcaccattgatatataccgagaagtggaggaaatagaatcgcagaagttagtgtaccattcagccacttcgtcagctggaccattgcatggtgttgcactgaataatccatatcaacctttgagtgtgattgatctaaagcgctgctctgctaggaacaacagaacaacatattgctatgattttccgctggcctttgaaactgcactgcagaagtcatggcagtccaatggctctactgtttctgaaggcaatgaaaatagtaaatcctacgtgaaggcaactgagctagtgtttgctgaaaaacatgggtcctggggcactcctataattccgatggaacgccctgctgggctcaacgacattggtatggtcgcttggatcatggagatgtcaacacctgaatttcccaatggcaggcagattattgttgtagcaaatgatatcactttcagagctggatcatttggcccaagggaagatgcattttttgaaactgtcactaacctggcttgcgaaaggaaacttcctcttatatacttggcagcaaactctggtgctaggattggcatagctgatgaagtaaaatcttgcttccgtgttggatggtctgacgaaggcagtcctgaacgagggtttcagtacatctatctgactgaagaagactatgctcgcattagctcttctgttatagcacataagctggagctagatagtggtgaaattaggtggattattgactctgttgtgggcaaggaggatgggcttggtgtcgagaacatacatggaagtgctgctattgccagtgcttattctagggcatatgaggagacatttacacttacatttgtgactgggcggactgtaggaataggagcttatcttgctcgacttggtatacggtgcatacagcgtcttgaccagcctattattttaacagggttttctgccctgaacaagctccttgggcgggaagtgtacagctcccacatgcagcttggtggtcctaagatcatggcgaccaatggtgttgtccacctcactgttccagatgaccttgaaggtgtttccaatatattgaggtggctcagctatgttcctgcaaacattggtggacctcttcctattaccaaacctctggaccctccagacagacctgttgcttacatccctgagaacacatgcgatccacgtgcagctatctgtggtgtagatgacagccaagggaaatggttgggtggtatgtttgacaaagacagctttgtggagacatttgaaggatgggcaaaaacagtggttactggcagagcaaagcttggaggaattcctgtgggcgtcatagctgtggagacacagaccatgatgcagatcatccctgctgatccaggtcagcttgattcccatgagcgatctgtccctcgtgctggacaagtgtggttcccagattctgcaaccaagaccgctcaggcattattagacttcaaccgtgaaggattgcctctgttcatcctggctaattggagaggcttctctggtggacaaagagatctctttgaaggaattcttcaggctgggtcaacaattgtcgagaaccttaggacatataatcagcctgcttttgtgtacattcctatggctggagagcttcgtggaggagcttgggttgtggtcgatagcaaaataaatccagaccgcattgagtgttatgctgaaaggactgccaaaggtaatgttctcgaacctcaagggttaattgaaatcaagttcaggtcagaggaactccaagactgtatgggtaggcttgacccagagttgataaatctgaaagcaaaactccaagatgtaaatcatggaaatggaagtctaccagacatagaagggattcggaagagtatagaagcacgtacgaaacagttgctgcctttatatacccagattgcaatacggtttgctgaattgcatgatacttccctaagaatggcagctaaaggtgtgattaagaaagttgtagactgggaagaatcacgctcgttcttctataaaaggctacggaggaggatcgcagaagatgttcttgcaaaagaaataaggcagatagtcggtgataaatttacgcaccaattagcaatggagctcatcaaggaatggtaccttgcttctcaggccacaacaggaagcactggatgggatgacgatgatgcttttgttgcctggaaggacagtcctgaaaactacaaggggcatatccaaaagcttagggctcaaaaagtgtctcattcgctctctgatcttgctgactccagttcagatctgcaagcattctcgcagggtctttctacgctattagataagatggatccctctcagagagcgaagtttgttcaggaagtcaagaaggtccttgattgatgataccaacacatccaacacaatgtgtgcatgtcacatctttttgttctagtacatacatagaaggatattgcttggtcttgattgatcatgtctgatttaagtcgactattatttcttggaattttcttttggacctggtgctatggttgatggatgtatattggatatgtgcgttctgccaggtgtaagcacaaaggtttagacagaccgagagcaagagcgagtgaacctgttctggttttgcagtggttcagtaaggcagaaagttgttaaaccgtagttctgagatgtattaccagtggcgccatgctgtacttttagggtgtataatgcggatacaaataaacaatttagcggttcattaaagtttgaactcaaataacatgttctttgtaagcatatgtaccgtacctctacgtgaaataaagttgttgaattagcattcgacatcagaatttgttaggactaggttttgtatggtttagggaggtgtaatagtgtcacacccggatttcggggcatcaagacccgggcgcgaacataatcatcaggtataatcatcaggtgtgctgggaccaagtctcacacatatgatgaatcatggcacatgatcgaatgtcacatctttactatataatcggggttttgtacaaaataaataaataaatacattatatgg

SEQ ID NO: 20713 - DNA, 7885 bp, Zea Mays
ccagtcgcacctccccgcccccgcccctcggtctctccgcctccgccccgccgcctctctccgcctccttctctgctccgccccgccgccgcaaggatccaacacccgcgcgtcgccttctccgctgtctttcttaccgagattttccaggagttttcttccctttttatggcactgtgcgtttgagaaggtcttcaattgtgctgtctgggccacggaacgacaatgtcacagcttggattagccgcagctgcctcaaaggccttgccactactccctaatcgccagagaagttcagctgggactacattctcatcatcttcattatcgaggcccttaaacagaaggaaaagccgtactcgttcactccgtgatggcggagatggggtatcagatgccaaaaagcacagccagtctgttcgtcaaggtcttgctggcattatcgacctcccaagtgaggcaccttccgaagtggatatttcacatggatctgaggatcctagggggccaacagattcttatcaaatgaatgggattatcaatgaaacacataatggaagacatgcctcagtgtccaaggttgttgaattttgtgcggcactaggtggcaaaacaccaattcacagtatattagtggccaacaatggaatggcagcagcaaaatttatgaggagtgtccggacatgggctaatgatacttttggatctgagaaggcaattcaactcatagctatggcaactccggaagacatgaggataaatgcagaacacattagaattgctgaccaattcgtagaggtgcctggtggaacaaacaataataactacgccaatgttcaactcatagtggagatggcacaaaaactaggtgtttctgctgtttggcctggttggggtcatgcttctgagaatcctgaactgccagatgtattgaccgcaaaagggatcgtttttcttggcccacctgcatcatcaatgaatgctttgggagataaggtcggctcagctctcattgctcaagcagccggggtcccaactcttgcttggagtggatcacatgttgaagttccattagagtgctgcttagacgcgatacctgaggagatgtatagaaaagcttgcgttactaccacagaggaagcagttgcaagttgtcaagtggttggttatcctgccatgattaaggcatcctggggaggtggtggtaaaggaataagaaaggttcataatgatgatgaggttagagcgctgtttaagcaagtacaaggtgaagtccctggctccccaatatttgtcatgaggcttgcatcccagagtcggcatcttgaagttcagttgctttgtgatcaatatggtaatgtagcagcacttcacagtcgtgattgcagtgtgcaacggcgacaccagaagattattgaagaaggtccagttactgttgctcctcgtgagacagttaaagcacttgagcaggcagcaaggaggcttgctaaggctgtgggttatgttggtgctgctactgttgagtatctttacagcatggaaactggagactactattttctggaacttaatccccgactacaggttgagcatccagtcaccgagtggatagctgaagtaaatctgcctgcagctcaagttgctgttggaatgggcatacctctttggcagattccagaaatcagacgtttctatggaatggactatggaggagggtatgacatttggaggaaaacagcagctcttgctacaccatttaattttgatgaagtagattctcaatggccaaagggccattgtgtagcagttagaattactagtgaggacccagatgatggtttcaaacctactggtgggaaagtgaaggagataagttttaaaagcaagcctaatgtttgggcctacttctcagtaaagtctggtggaggcattcatgaatttgctgattctcagttcggacatgtttttgcatatgggctctctagatcagcagcaataacaaacatgactcttgcattaaaagagattcaaattcgtggagaaattcattcaaatgttgattacacagttgacctcttaaatgcttcagactttagagaaaacaagattcatactggttggctcgacaccagaatagctatgcgtgttcaagctgagaggcccccatggtatatttcagtggttgggggtgctttatataaaacagtaaccaccaatgcagccactgtttctgaatatgttagttatctcaccaagggccagattccaccaaagcatatatcccttgtcaattctacagttaatttgaatatagaagggagcaaatacacaattgaaactgtaaggactggacatggtagctacaggttgagaatgaatgattcaacagttgaagcgaatgtacaatctttatgtgatggtggcctcttaatgcagttggatggaaacagccatgtaatttatgcagaagaagaagctggtggtacacggcttcagattgatggaaagacatgtttattgcagaatgaccatgatccatcaaagttattagctgagacaccctgcaaacttcttcgtttcttggttgctgatggtgctcatgttgatgcggatgtaccatacgcggaagttgaggttatgaagatgtgcatgcctctcttgtcacctgcttctggtgtcattcattgtatgatgtctgagggccaggcattgcaggctggtgatcttatagcaaggttggatcttgatgacccttctgctgtgaaaagagctgagccatttgatggaatatttccacaaatggagctccctgttgctgtctctagtcaagtacacaaaagatatgctgcaagtttgaatgctgctcgaatggtccttgcaggatatgagcacaatattaatgaagtcgttcaagatttggtatgctgcctggacaaccctgagcttcctttcctacagtgggatgaacttatgtctgttctagcaacgaggcttccaagaaatctcaagagtgagttagaggataaatacaaggaatacaagttgaatttttaccatggaaaaaacgaggactttccatccaagttgctaagagacatcattgaggaaaatctttcttatggttcagagaaggaaaaggctacaaatgagaggcttgttgagcctcttatgaacctactgaagtcatatgagggtgggagagagagccatgcacattttgttgtcaagtctcttttcgaggagtatcttacagtggaagaactttttagtgatggcattcagtctgacgtgattgaaacattgcggcatcagcacagtaaagacctgcagaaggttgtagacattgtgttgtctcaccagggtgtgaggaacaaagctaagcttgtaacggcacttatggaaaagctggtttatccaaatcctggtggttacagggatctgttagttcgcttttcttccctcaatcataaaagatattataagttggcccttaaagcaagtgaacttcttgaacaaaccaaactaagtgaactccgtgcaagcgttgcaagaagcctttcggatctggggatgcataagggagaaatgagtattaaggataacatggaagatttagtctctgccccattacctgttgaagatgctctgatttctttgtttgattacagtgatcgaactgttcagcagaaagtgattgagacatacatatcacgattgtaccagcctcatcttgtaaaggatagcatccaaatgaaattcaaggaatctggtgctattactttttgggaattttatgaagggcatgttgatactagaaatggacatggggctattattggtgggaagcgatggggtgccatggtcgttctcaaatcacttgaatctgcgtcaacagccattgtggctgcattaaaggattcggcacagttcaacagctctgagggcaacatgatgcacattgcattattgagtgctgaaaatgaaagtaatataagtggaataagcagtgatgatcaagctcaacataagatggaaaagcttagcaagatactgaaggatactagcgttgcaagtgatctccaagctgctggtttgaaggttataagttgcattgttcaaagagatgaagctcgcatgccaatgcgccacacattcctctggttggatgacaagagttgttatgaagaagagcagattctccggcatgtggagcctcccctctctacacttcttgaattggataagttgaaggtgaaaggatacaatgaaatgaagtatactccttcgcgtgaccgccaatggcatatctacacactaagaaatactgaaaaccccaaaatgttgcatagggtgtttttccgaactattgtcaggcaacccaatgcaggcaacaagtttacatcggctcagatcagcgacgctgaagtaggatgtcccgaagaatctctttcatttacatcaaatagcatcttaagatcattgatgactgctattgaagaattagagcttcatgcaattaggacaggtcattctcacatgtatttgtgcatactgaaagagcaaaagcttcttgacctcattccattttcagggagtacaattgttgatgttggccaagatgaagctaccgcttgttcacttttaaaatcaatggctttgaagatacatgagcttgttggtgcaaggatgcatcatctgtctgtatgccagtgggaggtgaaactcaagttggactgtgatggccctgcaagtggtacctggagagttgtaactacaaatgttactggtcacacctgcaccattgatatataccgagaagtggaggaaatagaatcgcagaagttagtgtaccattcagccacttcgtcagctggaccattgcatggtgttgcactgaataatccatatcaacctttgagtgtgattgatctaaagcgctgctctgctaggaacaacagaacaacatattgctatgattttccgctggcctttgaaactgcactgcagaagtcatggcagtccaatggctctactgtttctgaaggcaatgaaaatagtaaatcctacgtgaaggcaactgagctagtgtttgctgaaaaacatgggtcctggggcactcctataattccgatggaacgccctgctgggctcaacgacattggtatggtcgcttggatcatggagatgtcaacacctgaatttcccaatggcaggcagattattgttgtagcaaatgatatcactttcagagctggatcatttggcccaagggaagatgcattttttgaaactgtcactaacctggcttgcgaaaggaaacttcctcttatatacttggcagcaaactctggtgctaggattggcatagctgatgaagtaaaatcttgcttccgtgttggatggtctgacgaaggcagtcctgaacgagggtttcagtacatctatctgactgaagaagactatgctcgcattagctcttctgttatagcacataagctggagctagatagtggtgaaattaggtggattattgactctgttgtgggcaaggaggatgggcttggtgtcgagaacatacatggaagtgctgctattgccagtgcttattctagggcatatgaggagacatttacacttacatttgtgactgggcggactgtaggaataggagcttatcttgctcgacttggtatacggtgcatacagcgtcttgaccagcctattattttaacagggttttctgccctgaacaagctccttgggcgggaagtgtacagctcccacatgcagcttggtggtcctaagatcatggcgaccaatggtgttgtccacctcactgttccagatgaccttgaaggtgtttccaatatattgaggtggctcagctatgttcctgcaaacattggtggacctcttcctattaccaaacctctggaccctccagacagacctgttgcttacatccctgagaacacatgcgatccacgtgcagctatctgtggtgtagatgacagccaagggaaatggttgggtggtatgtttgacaaagacagctttgtggagacatttgaaggatgggcaaaaacagtggttactggcagagcaaagcttggaggaattcctgtgggcgtcatagctgtggagacacagaccatgatgcagatcatccctgctgatccaggtcagcttgattcccatgagcgatctgtccctcgtgctggacaagtgtggttcccagattctgcaaccaagaccgctcaggcattattagacttcaaccgtgaaggattgcctctgttcatcctggctaattggagaggcttctctggtggacaaagagatctctttgaaggaattcttcaggctgggtcaacaattgtcgagaaccttaggacatataatcagcctgcttttgtgtacattcctatggctggagagcttcgtggaggagcttgggttgtggtcgatagcaaaataaatccagaccgcattgagtgttatgctgaaaggactgccaaaggtaatgttctcgaacctcaagggttaattgaaatcaagttcaggtcagaggaactccaagactgtatgggtaggcttgacccagagttgataaatctgaaagcaaaactccaagatgtaaatcatggaaatggaagtctaccagacatagaagggattcggaagagtatagaagcacgtacgaaacagttgctgcctttatatacccagattgcaatacggtttgctgaattgcatgatacttccctaagaatggcagctaaaggtgtgattaagaaagttgtagactgggaagaatcacgctcgttcttctataaaaggctacggaggaggatcgcagaagatgttcttgcaaaagaaataaggcagatagtcggtgataaatttacgcaccaattagcaatggagctcatcaaggaatggtaccttgcttctcaggccacaacaggaagcactggatgggatgacgatgatgcttttgttgcctggaaggacagtcctgaaaactacaaggggcatatccaaaagcttagggctcaaaaagtgtctcattcgctctctgatcttgctgactccagttcagatctgcaagcattctcgcagggtctttctacgctattagataagatggatccctctcagagagcgaagtttgttcaggaagtcaagaaggtccttgattgatgataccaacacatccaacacaatgtgtgcatgtcacatctttttgttctagtacatacatagaaggatattgcttggtcttgattgatcatgtctgatttaagtcgactattatttcttggaattttcttttggacctggtgctatggttgatggatgtatattggatatgtgcgttctgccaggtgtaagcacaaaggtttagacagaccgagagcaagagcgagtgaacctgttctggttttgcagtggttcagtaaggcagaaagttgttaaaccgtagttctgagatgtattaccagtggcgccatgctgtacttttagggtgtataatgcggatacaaataaacaatttagcggttcattaaagtttgaactcaaataacatgttctttgtaagcatatgtaccgtacctctacgtgaaataaagttgttgaattagcattcgacatcagaatttgttaggactaggttttgtatggtttagggaggtgtaatagtgtcacacccggatttcggggcatcaagacccgggcgcgaacataatcatcaggtataatcatcaggtgtgctgggaccaagtctcacacatatgatgaatcatggcacatgatcgaatgtcacatctttactatataatcggggttttgtacaaaataaataaataaatacattatatgg

SEQ ID NO: 20714 - DNA, 7842 bp, Zea Mays
ccccgcccctcggtctctccgcctccgccccgccgcctctctccgcctccttctctgctccgccccgccgccgcaaggatccaacacccgcgcgtcgccttctccgctgtctttcttaccgagattttccaggagttttcttccctttttatggcactgtgcgtttgagaaggtcttcaattgtgctgtctgggccacggaacgacaatgtcacagcttggattagccgcagctgcctcaaaggccttgccactactccctaatcgccagagaagttcagctgggactacattctcatcatcttcattatcgaggcccttaaacagaaggaaaagccgtactcgttcactccgtgatggcggagatggggtatcagatgccaaaaagcacagccagtctgttcgtcaaggtcttgctggcattatcgacctcccaagtgaggcaccttccgaagtggatatttcacatggatctgaggatcctagggggccaacagattcttatcaaatgaatgggattatcaatgaaacacataatggaagacatgcctcagtgtccaaggttgttgaattttgtgcggcactaggtggcaaaacaccaattcacagtatattagtggccaacaatggaatggcagcagcaaaatttatgaggagtgtccggacatgggctaatgatacttttggatctgagaaggcaattcaactcatagctatggcaactccggaagacatgaggataaatgcagaacacattagaattgctgaccaattcgtagaggtgcctggtggaacaaacaataataactacgccaatgttcaactcatagtggagatggcacaaaaactaggtgtttctgctgtttggcctggttggggtcatgcttctgagaatcctgaactgccagatgtattgaccgcaaaagggatcgtttttcttggcccacctgcatcatcaatgaatgctttgggagataaggtcggctcagctctcattgctcaagcagccggggtcccaactcttgcttggagtggatcacatgttgaagttccattagagtgctgcttagacgcgatacctgaggagatgtatagaaaagcttgcgttactaccacagaggaagcagttgcaagttgtcaagtggttggttatcctgccatgattaaggcatcctggggaggtggtggtaaaggaataagaaaggttcataatgatgatgaggttagagcgctgtttaagcaagtacaaggtgaagtccctggctccccaatatttgtcatgaggcttgcatcccagagtcggcatcttgaagttcagttgctttgtgatcaatatggtaatgtagcagcacttcacagtcgtgattgcagtgtgcaacggcgacaccagaagattattgaagaaggtccagttactgttgctcctcgtgagacagttaaagcacttgagcaggcagcaaggaggcttgctaaggctgtgggttatgttggtgctgctactgttgagtatctttacagcatggaaactggagactactattttctggaacttaatccccgactacaggttgagcatccagtcaccgagtggatagctgaagtaaatctgcctgcagctcaagttgctgttggaatgggcatacctctttggcagattccagaaatcagacgtttctatggaatggactatggaggagggtatgacatttggaggaaaacagcagctcttgctacaccatttaattttgatgaagtagattctcaatggccaaagggccattgtgtagcagttagaattactagtgaggacccagatgatggtttcaaacctactggtgggaaagtgaaggagataagttttaaaagcaagcctaatgtttgggcctacttctcagtaaagtctggtggaggcattcatgaatttgctgattctcagttcggacatgtttttgcatatgggctctctagatcagcagcaataacaaacatgactcttgcattaaaagagattcaaattcgtggagaaattcattcaaatgttgattacacagttgacctcttaaatgcttcagactttagagaaaacaagattcatactggttggctcgacaccagaatagctatgcgtgttcaagctgagaggcccccatggtatatttcagtggttgggggtgctttatataaaacagtaaccaccaatgcagccactgtttctgaatatgttagttatctcaccaagggccagattccaccaaagttaatttgaatatagaagggagcaaatacacaattgaaactgtaaggactggacatggtagctacaggttgagaatgaatgattcaacagttgaagcgaatgtacaatctttatgtgatggtggcctcttaatgcagttggatggaaacagccatgtaatttatgcagaagaagaagctggtggtacacggcttcagattgatggaaagacatgtttattgcagaatgaccatgatccatcaaagttattagctgagacaccctgcaaacttcttcgtttcttggttgctgatggtgctcatgttgatgcggatgtaccatacgcggaagttgaggttatgaagatgtgcatgcctctcttgtcacctgcttctggtgtcattcattgtatgatgtctgagggccaggcattgcaggctggtgatcttatagcaaggttggatcttgatgacccttctgctgtgaaaagagctgagccatttgatggaatatttccacaaatggagctccctgttgctgtctctagtcaagtacacaaaagatatgctgcaagtttgaatgctgctcgaatggtccttgcaggatatgagcacaatattaatgaagtcgttcaagatttggtatgctgcctggacaaccctgagcttcctttcctacagtgggatgaacttatgtctgttctagcaacgaggcttccaagaaatctcaagagtgagttagaggataaatacaaggaatacaagttgaatttttaccatggaaaaaacgaggactttccatccaagttgctaagagacatcattgaggaaaatctttcttatggttcagagaaggaaaaggctacaaatgagaggcttgttgagcctcttatgaacctactgaagtcatatgagggtgggagagagagccatgcacattttgttgtcaagtctcttttcgaggagtatcttacagtggaagaactttttagtgatggcattcagtctgacgtgattgaaacattgcggcatcagcacagtaaagacctgcagaaggttgtagacattgtgttgtctcaccagggtgtgaggaacaaagctaagcttgtaacggcacttatggaaaagctggtttatccaaatcctggtggttacagggatctgttagttcgcttttcttccctcaatcataaaagatattataagttggcccttaaagcaagtgaacttcttgaacaaaccaaactaagtgaactccgtgcaagcgttgcaagaagcctttcggatctggggatgcataagggagaaatgagtattaaggataacatggaagatttagtctctgccccattacctgttgaagatgctctgatttctttgtttgattacagtgatcgaactgttcagcagaaagtgattgagacatacatatcacgattgtaccagcctcatcttgtaaaggatagcatccaaatgaaattcaaggaatctggtgctattactttttgggaattttatgaagggcatgttgatactagaaatggacatggggctattattggtgggaagcgatggggtgccatggtcgttctcaaatcacttgaatctgcgtcaacagccattgtggctgcattaaaggattcggcacagttcaacagctctgagggcaacatgatgcacattgcattattgagtgctgaaaatgaaagtaatataagtggaataagcagtgatgatcaagctcaacataagatggaaaagcttagcaagatactgaaggatactagcgttgcaagtgatctccaagctgctggtttgaaggttataagttgcattgttcaaagagatgaagctcgcatgccaatgcgccacacattcctctggttggatgacaagagttgttatgaagaagagcagattctccggcatgtggagcctcccctctctacacttcttgaattggataagttgaaggtgaaaggatacaatgaaatgaagtatactccttcgcgtgaccgccaatggcatatctacacactaagaaatactgaaaaccccaaaatgttgcatagggtgtttttccgaactattgtcaggcaacccaatgcaggcaacaagtttacatcggctcagatcagcgacgctgaagtaggatgtcccgaagaatctctttcatttacatcaaatagcatcttaagatcattgatgactgctattgaagaattagagcttcatgcaattaggacaggtcattctcacatgtatttgtgcatactgaaagagcaaaagcttcttgacctcattccattttcagggagtacaattgttgatgttggccaagatgaagctaccgcttgttcacttttaaaatcaatggctttgaagatacatgagcttgttggtgcaaggatgcatcatctgtctgtatgccagtgggaggtgaaactcaagttggactgtgatggccctgcaagtggtacctggagagttgtaactacaaatgttactggtcacacctgcaccattgatatataccgagaagtggaggaaatagaatcgcagaagttagtgtaccattcagccacttcgtcagctggaccattgcatggtgttgcactgaataatccatatcaacctttgagtgtgattgatctaaagcgctgctctgctaggaacaacagaacaacatattgctatgattttccgctggcctttgaaactgcactgcagaagtcatggcagtccaatggctctactgtttctgaaggcaatgaaaatagtaaatcctacgtgaaggcaactgagctagtgtttgctgaaaaacatgggtcctggggcactcctataattccgatggaacgccctgctgggctcaacgacattggtatggtcgcttggatcatggagatgtcaacacctgaatttcccaatggcaggcagattattgttgtagcaaatgatatcactttcagagctggatcatttggcccaagggaagatgcattttttgaaactgtcactaacctggcttgcgaaaggaaacttcctcttatatacttggcagcaaactctggtgctaggattggcatagctgatgaagtaaaatcttgcttccgtgttggatggtctgacgaaggcagtcctgaacgagggtttcagtacatctatctgactgaagaagactatgctcgcattagctcttctgttatagcacataagctggagctagatagtggtgaaattaggtggattattgactctgttgtgggcaaggaggatgggcttggtgtcgagaacatacatggaagtgctgctattgccagtgcttattctagggcatatgaggagacatttacacttacatttgtgactgggcggactgtaggaataggagcttatcttgctcgacttggtatacggtgcatacagcgtcttgaccagcctattattttaacagggttttctgccctgaacaagctccttgggcgggaagtgtacagctcccacatgcagcttggtggtcctaagatcatggcgaccaatggtgttgtccacctcactgttccagatgaccttgaaggtgtttccaatatattgaggtggctcagctatgttcctgcaaacattggtggacctcttcctattaccaaacctctggaccctccagacagacctgttgcttacatccctgagaacacatgcgatccacgtgcagctatctgtggtgtagatgacagccaagggaaatggttgggtggtatgtttgacaaagacagctttgtggagacatttgaaggatgggcaaaaacagtggttactggcagagcaaagcttggaggaattcctgtgggcgtcatagctgtggagacacagaccatgatgcagatcatccctgctgatccaggtcagcttgattcccatgagcgatctgtccctcgtgctggacaagtgtggttcccagattctgcaaccaagaccgctcaggcattattagacttcaaccgtgaaggattgcctctgttcatcctggctaattggagaggcttctctggtggacaaagagatctctttgaaggaattcttcaggctgggtcaacaattgtcgagaaccttaggacatataatcagcctgcttttgtgtacattcctatggctggagagcttcgtggaggagcttgggttgtggtcgatagcaaaataaatccagaccgcattgagtgttatgctgaaaggactgccaaaggtaatgttctcgaacctcaagggttaattgaaatcaagttcaggtcagaggaactccaagactgtatgggtaggcttgacccagagttgataaatctgaaagcaaaactccaagatgtaaatcatggaaatggaagtctaccagacatagaagggattcggaagagtatagaagcacgtacgaaacagttgctgcctttatatacccagattgcaatacggtttgctgaattgcatgatacttccctaagaatggcagctaaaggtgtgattaagaaagttgtagactgggaagaatcacgctcgttcttctataaaaggctacggaggaggatcgcagaagatgttcttgcaaaagaaataaggcagatagtcggtgataaatttacgcaccaattagcaatggagctcatcaaggaatggtaccttgcttctcaggccacaacaggaagcactggatgggatgacgatgatgcttttgttgcctggaaggacagtcctgaaaactacaaggggcatatccaaaagcttagggctcaaaaagtgtctcattcgctctctgatcttgctgactccagttcagatctgcaagcattctcgcagggtctttctacgctattagataagatggatccctctcagagagcgaagtttgttcaggaagtcaagaaggtccttgattgatgataccaacacatccaacacaatgtgtgcatgtcacatctttttgttctagtacatacatagaaggatattgcttggtcttgattgatcatgtctgatttaagtcgactattatttcttggaattttcttttggacctggtgctatggttgatggatgtatattggatatgtgcgttctgccaggtgtaagcacaaaggtttagacagaccgagagcaagagcgagtgaacctgttctggttttgcagtggttcagtaaggcagaaagttgttaaaccgtagttctgagatgtattaccagtggcgccatgctgtacttttagggtgtataatgcggatacaaataaacaatttagcggttcattaaagtttgaactcaaataacatgttctttgtaagcatatgtaccgtacctctacgtgaaataaagttgttgaattagcattcgacatcagaatttgttaggactaggttttgtatggtttagggaggtgtaatagtgtcacacccggatttcggggcatcaagacccgggcgcgaacataatcatcaggtataatcatcaggtgtgctgggaccaagtctcacacatatgatgaatcatggcacatgatcgaatgtcacatctttactatataatcggggttttgtacaaaataaataaataaatacattatatgg

SEQ ID NO: 20715 - DNA, 436 bp, Zea Mays
cccttgccccttgtccaccgccaacggcccaccagtccaccacgacactagctagctcgttcgtccaaacgtccaccagcgagaaggcagcagccgccagcaaccagttcgtcactgcctaaacctaacctaatccattagcagttcggcactgcgggtctacggcggccggcggcagcagtactacggagcccccagccagccccaggttgcggcagcggcagcaggtggccaggttgcggcagcggcgccctgggacctggtcggccgaccctgctcgagtgctcggcgtcacagcttctcctttctacgtgcagcggttcacaggttcaggcattcagcgccacgccgccgtcgcccccaagccagcgctcagggtgccttggaagtacgctagcttgttgtcatgaagaagtcattcaagttccttccagtg

SEQ ID NO: 20716 - DNA, 440 bp, Zea Mays
caccacgacactagctagctcgttcgtccaaacgtccaccagcgagaaggcagcagccgccagcaaccagttcgtcactgcctaaacctaacctaatccattagcagttcggcactgcgggtctacggcggccggcggcagcagtactacggagcccccagccagccccaggttgcggcagcggcagcaggtggccaggttgcggcagcggcgccctgggacctggtcggccgaccctgctcgagtgctcggcgtcacagcttctcctttctacgtgcagcggttcacaggttcaggcattcagcgccacgccgccgtcgcccccaagccagtgttcagcgctcagggtgccttggaagtacgctagcttgttgtcatgaagaagtcattcaagttccttccagtgagttattagttcatatctgaagttggtgcataag

SEQ ID NO: 20717 - DNA, 3410 bp, Zea Mays
caatcttgtctgcgcacctctggttgtcgcaacagaaattctcaactgatggatggattagattaatgattgcgctgttgctgttcttgcttggtcttctacggaggaagtcatcatggtggtcatgcgggcgatcttagctacgaatattgaggaagccaaaaaggatatattgcaatatcatatgataagtcgacagaaaaaaaatatatattttgatggatgggatggttttggggcgtccgcagtcctcaattccatagcaaatgaactttcatcacagaaaatggatgctccccatgaactacgctttgacaaagtattgtacattgactgctctgaatggaaaagtagaagggaaatgcagagagcaattgcagaggaactgaaacttgaccatggaacaatggccatgtttgacaaccaggatgaggaggatgactacgatggaaaagataaagaatctagggatgtgatacgaagtattgcaatggatatttatcgaagactggcggactgtaaatttatgatgatttttcttaatggaagtgataacgagatcgatgtcactagatttggcatccctcatataacggaattcggtaaaaacacaatcatttggacattcaagagaaagttgttgacgattaatagccgtcatgatgagatagcagaaaagttaagatacagccaccttttcctctatggatcaattgtcgcaggacctaatctggtaagtgagcaggatttttgtgcattggtgcatggagaggctactaccatagttgctcgccaccaatgcatgctggatatggatgcaacaatggtgacagaatgttgcctctttgagctatccctacattacaatttccacaacatcactagattgggttgggatgctcattcttctaactattggatatgtgctggaattatagcaggcaataaaaaaatggagatcgcaaatgcattgcatggagagataagatgggagtgtgatgctcctctacttcaacgtttgcttgaagaattgagtcctaccttttcagtaaagaagattacaaagcctctagttgtttctatgaggtgtctagttaaagatcgtcattggatttcaatcacctcccaggaacatggattagatggtgtccaagatataccagcaggagcatcggcggtgttcttggcatttcaaagaacaggtcagctagaaccatatgcaagatcaggtcatccaacatcacttgaaggacaatattccccacccatactgccacctggcatattcaaatattctaggagcattgctgtgctggttctctcttattgtgccttcagttttgcatcacctcctttcctcatgtgcaatagcctaaggttccttggtttggacaagtgtaagcacaagccaagtgaacaatattgtgatacagatgcagagtggaccttcttgctcagtctatgggttctcgagatacgatacacagaatgggatgagattctgtccaaagaaaagatagatctcatgagtaacctgaaggagttaaatatagagggagtttggagctggcagtgcatcaatcaactaaggaaattaataccccacctttacaggttaaggattaccaatgctaggatttatcaagcagaaacagtagatgtagatgactcatttatggacaagggaaagctacagttactcgatctgtctggcaatagggagatgaaagttgtaccaggtagcctatcaaaggcaagtagccttgaggtgcttctccttgatggctgccttgggcttgaatatgttggtgcgcttccaccatctctcaattcctttagtctcgatggctatggagtagcatcccattggacaccatctattaataatctactacctcctgaaaatctgcgtccagcttctatagatgtgagggatgccaagatctccaggatatgcctagagggctgcacaggattggagaatttgttcctacgtgggctacctaatcttgtggagctggacctatcaggaactggaatcaagatacttgactttacaactatggtgattcaagtcccatgtctcaaacgattatttctgctgggctgtgagcgccttgttgccataatattggaagagaagtggccatacgatatagatacacaactagagctcctatgcattgacacacgagctgagacgggatattctcggccatgtattgaccataccaaaaagtccttcaagctacagatacatgccattctttcggactcaaggcttgctcggtccttgttctcaatcatagactaccacatttgcaacaacattgtggatatttactttaatatccttgtcaccgatgtgcccactgtgtatagtggggaggatgtacaacctgaagctgcccacagggtggttgcacttgcacagtatggtgatgtccctgccacggctggcgatgttcccatgcaggatttcccaccagctccaactagagatttggatcgccacgtaggaattgccaaggcaatgccgtgtggagaggtgccccaagttggatactgtctttccaagaacagatgacttcagggctctcgagacgatttgggcatcggatctcctgatggcccgctgcatctggggcaaaggtcgtccgtcttacatgtctaacttgtttgacgcactacggcacctcaacttgcgtgcctgcccaagactccagtttgtgcttccagtctgggtctcctccttccccagattggagatgctccacatcgccgactgcacagacctgaggcatgtattcgtgctggatgaagagcaccgagaggaacgcatagcgttccccaatctgaaggccatgcacctgcacaacctcccatcgttgtggcagatatgtgaggcctcgatgctgatgctggcgcccgcgctcatgaccatcaagatcaggggctgctggtccctccgccgactgccatccatggaaggccgtggcgtacacatggagaagccgacggtcgagatcgagaagtatgtatgggatgcgctggagtgggacggggtggaggctggccaccatccctccctcttccagcagccacgacactcacgctactacaggaagaaatcgctccggggatctgtcctcagcttcgaagaacgcgttggttcttcagctacggccgggtcatcgcgcattgcatggatgcgttgtgctcctccactcactgtgttcttgttttgttggccatcgattgtttgggccaagatggtttgatatttaaggtgtgataaacttttttactgtcgtgtgataaacttacaggtgtgaatcaactgttagatatgatatgtccagcatatgcatgtatcgtttctgtttttcttttcatgggtttcttcggac

SEQ ID NO: 20718 - DNA, 2238 bp, Zea Mays
tcatcagccgctcaagcactgggataaaatcctgcacgccgcgcgctcctcgtcttccacctctgctcctcccgcgcttagctcttggtgcggatctcctggccggttcacaacttctagctcgtcaagctcgtccccatggcgcgccagttcggatttccctccctgccactcggccttgccccctgctcacccctgcaaccctgccgagccctaaccccagccagccgagctcaggcgcccaatccatggcgcacccagccgcgcccttgtccatctgctcggccgcgagcttccctgctcccgtggttatcgaagctccaggtgcgcacgtacgcactgaagcctttggggtccatgacgatatcgtggagagccgcagcgttgtcgctcgcgtgcctcgtcgccgtgacaacggcgctggtggacggcgcgctgctccccgaactcgctctgcgctcggcttcttctccgtggagctcgcctctgcgcctgactcctgctcgtcgaatctccagccgcgccgtcgccttgctgctcgccagcgtcttctctgcccctgcgcatccatggcgatttcccctgcggcagcttcctcggcgcgcagcctccctcccagctcagccgcctgcttctctccactgctcgtcgcgcccagctacagctcgccgtgccctcgccgctcccttctcctcctctgtttgcccatctccatggctgccgtcgaaggctcgaagcttcctggcacgctcgttgtgctctggtcggaggaggatttgctgcgcgcccaaatcttcttcctcccattcccagctccctctgctcgcgacgtgcgcccagcgatggagtctcgcggtgctcctgttccctgtctatcgcgccatcgatcccgcctgagccccttcgcgttcgtggaagctccctgccgtcgctcagctcaccggcgtgcgtcctgctccttatgcgcccagcgccgtgcgccggaaagtccctgcgcgcaagctatatgttggccgcgcgcgaagctatctgttcgtcgtcatcgctcggtcgcgcgacaggtggactgtgtgttgtgtgtcgcacatcctaggtccttgtagtcgtgtcgtacgtgcaacagtcgcggatctgtgccgccttggtcttgttgtcgacatcgttcgccgtggcatagtcgtggaacttcctcggcgccgcgcacgtcagatcgttgggtcgcgtcttgctcggctctcatgccattgattttggctccggtgcgggctcttctctggtgcttgtcggcctcgccgtcgttgtcgtgaccgtgagtcctgttgtctccctgcgtcggtctctacctgtgctcaagtcatgccactagtaccctcgccgtggaactgttcgtcaccatgctcgacaagctctagtcgcacgcgtgaattttcttcgctcggctttaattcccaatcgcgtcgtcgatttcgccggttagcgtcgttcgtcgtcgcatcgcgtgtgtagctctatatatgtcaccctcctatgtcgtcgtcgatccgtgcgtcagcaagaaatctcaagagtcgggtgaagacggaattagcagcgtggtgttcaccaagtgcgcgacaaaaagctcgaacatcctgcacgactcaggttcgattcatcaaaattattcagtcgaagaaaagatcttcaacaattgattaccgaagaaaagaaagcccctggatgaggtcaaccggaaccgtcgtcgtacttgcgactattgtgtcgaattagtctgggtaagttgattcgtattccagtcaactaagcctataaatagattaaatagaattgttggtcgcaataaatcttattaatttagcatgtgtatattgtgatgatcgatttagataaaccggtaaatcaagtaattaggatacatagtttaaagagttcataaaaagctaggaataaaaatagattttctagtgtatttgggtcaatttggttaatggatgtagtcgatgctctgctgtgatatccatgatgcttaatgcttgattttaaagtgtttcatccttttagtgtagattatctatattatactcgttatacatgtactcatacatgtgcatcgtgcatctcatgaggtacgataaattaatcacgtgaggcggaagccaagccaagtcgacctcaggcgcggactaatttgcaagatgatgctgatggacgaaccggaagatggataatctgaacaag

SEQ ID NO: 20719 - DNA, 630 bp, Zea Mays
ggaaatggcaggagctaagggtctctcctttcttgccgcaaccatcagaggcacctagctgcctggttttttcactgatgggctggtttttgtcttttaggatctgtcttgctcttgtttttgttttttctcttattttctctttggttttcttatcccctctggggaggtcttttgtactatggtctattttggaccctcttttcctctacttaatataatgatgcgcagctctcctgcgctttcgagaaaaaaaaaggcttcgtcgaacaagaaaacatagaggggaacacactaatcgaactaaaaatgggaaggaggacgattcttgcacattctcagaattggaggaggacgatggtggggcagacgaccgaatcgaaggtggacaaacctggcgatgtcgctggctggttgctgcttcgcgtatggaaaccagccgatgcaagcagccctcccttggaccagcccgactctggtagcctagtgcctagcttcgcgtctagcaccgacaaagcttgtcacgagcgtttcggcggcgctgggggaaatggttgccatgcgaatggagagggaaacctccgcgtcagcgcgggattcaccagcgaccgatgtgtagcggacgcatag

SEQ ID NO: 20720 - DNA, 3573 bp, Zea Mays
ctctcccccactagtatctccacacctgcagtgacacaacaacaccctgccggcacattttgctgtgtgttgctctcatcagtcgtcgtcgcagcctacctagctagcccagctagctagctggcttttggatctgatctgctgccaaattccccagagtgcctgctgcgcagatcggtcgaattccaagcaggaaggggttgtcgtcacggactgctaggctcaatcccttcaagccagcgaccatctcagcttcttgcccaagtgcagcctgcagttccagttgttcttcctccagagaacaaggactcgtcccgtacgtacgtgtgagtgcgatgactcctcccgtgtcagagccaactaatccaccgcaattgaaggatcccgttgtcgtcgacgtgagtgtgactgcttctaagagcaacgatgatgcccaagatgatgtgtcgttagtagggttgggtggcactggcagcagcacatccgccactgacaagaataggttgctgcaagtagcagacccaccagcacccatgaaaacctctggcggtgtcgatgtgagcatgtctcgcatgaatgatgaccagggcgatgtgctaggattgaatgccttcatggcaaagaagaggctgctttcaacacatgctgcctctttggccgcagatgccgatgctgaagaagaggcaaaggccgccgcgaggaagaagacacggcttggttggggtcagggccttgcaaagtatgagaatcggtacaataagaaggattatgagaacacacataaatttttagctcatgatggagccactcgtgaagctgcttcttctcacggatcatgtacgccgccaccaggacgaagcaaaggtcgccatggcaaaaataaaagcttggacatggcagaaatgagggtttcccgagctactactgcgtctgcattctccaaatggtctagtccactaacaggagatctcaacgattctgggaagaatggaagcataggcagcttgactggaaaagttgtttttccttctgaagtgtctggttcctgtggcaagcatagccccacacctgcagctgtaggcagcagcagtcctggcggtagcagcttggtcattactgaaaaggtactttgctcagcagctgttgtgccttcttcacctcagggacgcagtactgctagtctgccaccaggagatcgtggaagtatcgacagcaagaatttgactgacaaagctgcagtggacaacagtgatccttgcattagcagttcaagcatgatgacagtaatggcggtggtgcctgatcagcttacatcctctcagcgatgtgatccaccaacagaggacaccagtgatccttatattagcagttcaagcatgacggcaattgtggtgtctaagcttggttcctctacgggatgtgatgcaccactgggtgaaagtagcactgaattgacaaatgctcaagatattccacagaaagtcatttcagaaggtaagcacaataatgaggcagtttgcatcacaaagtcttggtctaagatgaaggaaaatgtaccacaaagtgttctcattgcaaaccttggcgaccaaggaaattgtgtggttagtggatcatgtggacaggataccttgaaactaataacttcacttgatgagagttgtgctaaggtagcaaatggtacaattaatggtgccgagatccgaagtggagctaaaactcctgaactcggttcttcaatgaagggatgcaatgatggtggtaagaatcattcatggaaagcaccagaaaagaaggtggccaactcaaatattgatgatggtagaaaggccccatcagatatgaaaacccttaatagcaaaggcaaaccttgcattgattttcatgctgcatttgtacaacatatgatgcagttagatgaagaaacggatacagactcagaaaaaactgaagacatgttcataggcagggagggaaataatcacttgagctgcgaagtgaattcaaagaagcggatagaaggaaatgatctcaatgcatacatggaaaatcctacaaagggtagcagtttctgcattgccactaataatggtgctgtagtaagacataatcttatgcagcgaccaagggcttcaggagctctgtatacatactcaagagctaaggagtgcaatggtattaatttgtgtcgcaatgtgacttgtcagaagggtaaaggtgttatccaaaggcctgaagtagtgaatgatctcaatgcagctcctatgcagatctcagatggagcacccaagactaaccagcatctgccatcaagttctggtggtgctgccttggacatagtttatggaaactcttcttacactgcaatggatatagatctcaatgtacctcttgatgtgacaccccaagaccttgagaacagtcatgctgaagcttcttccatgggtcccagtgatcctcaccaggcaacacataacgtaccacaaactactcagccgcagactgctaatcaaccagcagcctccattatgctttttggtcgtgtcatctatgaagccctgtccactggtacagcaaaccgtactcccaatctgcagggaaaccaggctgttgtcccttcgaggaacatgccgtccactactactaacatttggagaggtggccaagcatatgcttcatgggctactaccactagcctttggagaggcaatagtgtctcaaacaaccagcaaggccggcagcagcaagcagtgttgtcaaattacagaatgccgccttacggtggttcgacggcggctaatggtgcagcagcagcggcggtggcggcggcggcgctactccagcctggtagcagtgcggcacttgtcaacctgttgaaccagcatagacagcagggtctagtaaacactacttctccatacagcataatgagaggtggtgtacccgtgccctctcatctgatagcaggaagcagtagcaataatggctccaattcggtccaacagcagcagtggccaataatccctatcctggatacaagtagactggtgttcggctaccctttctactaccctgcagccactgcaaaccaagctcctcccgctacagctactgccatgccaactactggaacaaataatggagaaggcgcatcaacaagcagcaatagggctccatcaacggcggcagaaagagggagaggatggaattcatggctctcacttcgccgcaattagtcaaaacatgtagtgcaaggaagcactactcatgtcgccgcccaataatgttcttatcggtggctgcaacggcgatgtgttatcagctctatgttattgtcattgattatggctagcgctatcgtactttggttgtttaaattagttgctttgctctcggtgggagctgaaacccatagccttcatttatctctttgctgaaactgaaactaaattccgatgtataacttggttttaaatttcctgtctcctagtcaaaaataataataataattattgctcgttgcttggtgatgaaatagtgagaccggtttacagtgagttaattggagcatgg

SEQ ID NO: 20721 - DNA, 1062 bp, Zea Mays
cacacctgcagtgacacaacaacaccctgccggcacattttgctgtgtgttgctctcatcagtcgtcgtcgcagcctacctagctagcccagctagctagctggcttttggatctgatctgctgccaaattccccagagtgcctgctgcgcagatcggtcgaattccaagcaggaaggggttgtcgtcacggactgctaggctcaatcccttcaagccagcgaccatctcagcttcttgcccaagtgcagcctgcagttccagttgttcttcctccagagaacaaggactcgtcccgtacgtacgtgtgagtgcgatgactcctcccgtgtcagagccaactaatccaccgcaattgaaggatcccgttgtcgtcgacgtgagtgtgactgcttctaagagcaacgatgatgcccaagatgatgtgtcgttagtagggttgggtggcactggcagcagcacatccgccactgacaagaataggttgctgcaagtagcagacccaccagcacccatgaaaacctctggcggtgtcgatgtgagcatgtctcgcatgaatgatgaccagggcgatgtgctaggattgaatgccttcatggcaaagaagaggctgctttcaacacatgctgcctctttggccgcagatgccgatgctgaagaagaggcaaaggccgccgcgaggaagaagacacggcttggttggggtcagggccttgcaaagtatgagaatcggtacaataagaaggattatgagaacacacataaatttttagctcatgatggagccactcgtgaagctgcttcttctcacggatcatgtacgccgccaccaggacgaagcaaaggtcgccatggcaaaaataaaagcttggacatggcagaaatgagggtttcccgagctactactgcgtctgcattctccaaatggtctagtccactaacaggagatctcaacgattctgggaagaatggaagcataggcagcttgactggaaaagttgtttttccttctgaagtgtctggttcctgtggcaagcatagccccacacctgcagatagctag

SEQ ID NO: 20722 - DNA, 2392 bp, Zea Mays
atggtctcagctatacaccacaacaattataacactgaatttgcttgctcttatgttggttttcaaaacaatgatgcaagaggcattgatgatcgcccaaatatgaacaacttgactgaaaccattattgtccctaaaatgtctgtcgtcccacgcaaagaggacaccagtgatccttatattagcagttcaagcatgacggcaattgtggtgtctaagcttggttcctctacgggatgtgatgcaccactgggtgaaagtagcactgaattgacaaatgctcaagatattccacagaaagtcatttcagaaggtaagcacaataatgaggcagtttgcatcacaaagtcttggtctaagatgaaggaaaatgtaccacaaagtgttctcattgcaaaccttggcgaccaaggaaattgtgtggttagtggatcatgtggacaggataccttgaaactaataacttcacttgatgagagttgtgctaaggtagcaaatggtacaattaatggtgccgagatccgaagtggagctaaaactcctgaactcggttcttcaatgaagggatgcaatgatggtggtaagaatcattcatggaaagcaccagaaaagaaggtggccaactcaaatattgatgatggtagaaaggccccatcagatatgaaaacccttaatagcaaaggcaaaccttgcattgattttcatgctgcatttgtacaacatatgatgcagttagatgaagaaacggatacagactcagaaaaaactgaagacatgttcataggcagggagggaaataatcacttgagctgcgaagtgaattcaaagaagcggatagaaggaaatgatctcaatgcatacatggaaaatcctacaaagggtagcagtttctgcattgccactaataatggtgctgtagtaagacataatcttatgcagcgaccaagggcttcaggagctctgtatacatactcaagagctaaggagtgcaatggtattaatttgtgtcgcaatgtgacttgtcagaagggtaaaggtgttatccaaaggcctgaagtagtgaatgatctcaatgcagctcctatgcagatctcagatggagcacccaagactaaccagcatctgccatcaagttctggtggtgctgccttggacatagtttatggaaactcttcttacactgcaatggatatagatctcaatgtacctcttgatgtgacaccccaagaccttgagaacagtcatgctgaagcttcttccatgggtcccagtgatcctcaccaggcaacacataacgtaccacaaactactcagccgcagactgctaatcaaccagcagcctccattatgctttttggtcgtgtcatctatgaagccctgtccactggtacagcaaaccgtactcccaatctgcagggaaaccaggctgttgtcccttcgaggaacatgccgtccactactactaacatttggagaggtggccaagcatatgcttcatgggctactaccactagcctttggagaggcaatagtgtctcaaacaaccagcaaggccggcagcagcaagcagtgttgtcaaattacagaatgccgccttacggtggttcgacggcggctaatggtgcagcagcagcggcggtggcggcggcggcgctactccagcctggtagcagtgcggcacttgtcaacctgttgaaccagcatagacagcagggtctagtaaacactacttctccatacagcataatgagaggtggtgtacccgtgccctctcatctgatagcaggaagcagtagcaataatggctccaattcggtccaacagcagcagtggccaataatccctatcctggatacaagtagactggtgttcggctaccctttctactaccctgcagccactgcaaaccaagctcctcccgctacagctactgccatgccaactactggaacaaataatggagaaggcgcatcaacaagcagcaatagggctccatcaacggcggcagaaagagggagaggatggaattcatggctctcacttcgccgcaattagtcaaaacatgtagtgcaaggaagcactactcatgtcgccgcccaataatgttcttatcggtggctgcaacggcgatgtgttatcagctctatgttattgtcattgattatggctagcgctatcgtactttggttgtttaaattagttgctttgctctcggtgggagctgaaacccatagccttcatttatctctttgctgaaactgaaactaaattccgatgtataacttggttttaaatttcctgtctcctagtcaaaaataataataataattattgctcgttgcttggtgatgaaatagtgagaccggtttacagtgagttaattggagcatgg

SEQ ID NO: 20723 - DNA, 1916 bp, Zea Mays
gtctttaacaacccacgatctgaaagcaaagcagcaaagcagaccaacccagcgcagcgcgcaacacctcgccaattgcgacgccgccgccgtcactgtcgccgcaggagtgcgaaccacgctgccgcccgctcccgccgcccaaacagctttatccgagccccgattcgccggatcacatgctgcggccacctctcaaatgacctctcaactccagagcactttgctcctgctcccgctcttcgccgccgctgctttgggccgcggcggcgacgcctcgactgcgccgtcgctggagttccaccatcggttctccgcaccgctgcggcggtgggtggaggcccgagggcgcgcgctccctggcgggtggccggctcccggcagcgccgcgtacgtcgccgcccttgccgggcacgatcgccaccgggcggtgtcggcagcagggggtagtagcagcgacgcaccaccgctcactttcgccgagggaaatgccaccctcaagtttgcactatgctcttgtgaccgttggcacaccgggccagacgttcatggtggcgctggacacaggcagcgatctcttctggctgccttgccagtgtgacggctgcacgcctccagccactgctgcctctggatcagctacattttacatccctggtatgtcgtcaactagtaaagcagttccgtgcaacagcaacttctgtgatcttcaaaaagaatgctccacagcattgcaatgtccatacaagatggtgtatgtctctgcgggcacatcttcttctggatttttagttgaagatgtgctttatctctcaacggagaatgcccatcctcaaattctcaaggcacaaataatgcttggttgtggacagactcaaacagggtcatttctggatgctgctgctcctaatggtctttttggacttggaatagatgaggtttcagttccaagtattttagctcagaaaggtttgacatctaattccttctcgatgtgctttggtcgtgatggtattgggcgaatcagctttggagaccaagagagctcagaccaagaagagacacctcttgacatcaaccgacaacatcccacatacgccatcactataagcgggattactgttggaaataaaccaacagacatggacttcattactatttttgacactggtacttctttcacatacttggcagacccagcgtatacttatataacccagagttttcatgcgcaagttcaagcaaatcgtcatgctgctgactccaggattccttttgaatattgttatgatttgagtgaagcaagatttccaattcctgatataatcctaagaacagttactggaagtatgtttcctgttattgatccagggcaagtaatctccattcaggaacatgagtatgtttattgcctggcaatcgtcaagagcatgaagctcaacattattggacaaaatttcatgactggtcttcgtgttgtgttcgatcgggaaaggaaaattcttggatggaagaaatttaattgttatgatactgatagttccaatcctctctccatcaactcccggaattcatcaggtttctcaccttcaacatctgagaactactctccgcaggaagcaaggaacccagctggtgtttcccagttgagaccactgaacaattcagcaccagcagcgttatatgatagcttgctcctgatgcttatcttggtccacctggctgtaaattagtttggttcttaaaatagatactgtagagcttgactagaggtacaccatagagaacaatattgtttagtggttacacgtcctgtaatagagatacttgtgatgccgattttttatggctcattgtacaaccattcccccgtcttgttttcactcaaaagggtatctcagattttatctgtaacc

SEQ ID NO: 20724 - DNA, 1862 bp, Zea Mays
gtctttaacaacccacgatctgaaagcaaagcagcaaagcagaccaacccagcgcagcgcgcaacacctcgccaattgcgacgccgccgccgtcactgtcgccgcaggagtgcgaaccacgctgccgcccgctcccgccgcccaaacagctttatccgagccccgattcgccggatcacatgctgcggccacctctcaaatgacctctcaactccagagcactttgctcctgctcccgctcttcgccgccgctgctttgggccgcggcggcgacgcctcgactgcgccgtcgctggagttccaccatcggttctccgcaccgctgcggcggtgggtggaggcccgagggcgcgcgctccctggcgggtggccggctcccggcagcgccgcgtacgtcgccgcccttgccgggcacgatcgccaccgggcggtgtcggcagcagggggtagtagcagcgacgcaccaccgctcactttcgccgagggaaatgccaccctcaagtttgcactatgctcttgtgaccgttggcacaccgggccagacgttcatggtggcgctggacacaggcagcgatctcttctggctgccttgccagtgtgacggctgcacgcctccagccactgctgcctctggatcagctacattttacatccctggtatgtcgtcaactagtaaagcagttccgtgcaacagcaacttctgtgatcttcaaaaagaatgctccacagcattgcaatgtccatacaagatggtgtatgtctctgcgggcacatcttcttctggatttttagttgaagatgtgctttatctctcaacggagaatgcccatcctcaaattctcaaggcacaaataatgcttggttgtggacagactcaaacagggtcatttctggatgctgctgctcctaatggtctttttggacttggaatagatgaggtttcagttccaagtattttagctcagaaaggtttgacatctaattccttctcgatgtgctttggtcgtgatggtattgggcgaatcagctttggagaccaagagagctcagaccaagaagagacacctcttgacatcaaccgacaacatcccacatacgccatcactataagcgggattactgttggaaataaaccaacagacatggacttcattactatttttgacactggtacttctttcacatacttggcagacccagcgtatacttatataacccagagttttcatgcgcaagttcaagcaaatcgtcatgctgctgactccaggattccttttgaatattgttatgatttgagtgaagcaagatttccaattcctgatataatcctaagaacagttactggaagtatgtttcctgttattgatccagggcaagtaatctccattcaggaacatgagtatgtttattgcctggcaatcgtcaagagcatgaagctcaacattattggacaaaatttcatgactggtcttcgtgttgtgttcgatcgggaaaggaaaattcttggatggaagaaatttaattgtttctcaccttcaacatctgagaactactctccgcaggaagcaaggaacccagctggtgtttcccagttgagaccactgaacaattcagcaccagcagcgttatatgatagcttgctcctgatgcttatcttggtccacctggctgtaaattagtttggttcttaaaatagatactgtagagcttgactagaggtacaccatagagaacaatattgtttagtggttacacgtcctgtaatagagatacttgtgatgccgattttttatggctcattgtacaaccattcccccgtcttgttttcactcaaaagggtatctcagattttatctgtaacc

SEQ ID NO: 20725 - DNA, 1565 bp, Zea Mays
gtctttggttcgccagaaagctcttgcttatgggtccatctttccacggttgattctggtcgcccggcggccagaagcccagaacctttgctggcaggccgcgaaccaaccaaacagctgaagtctgacgacgagccttggttcagagaaacagggcactgggtttagagcccttcggatctagtattgtcgttcaccggcggcgaccaggccaaaccctagaaccttgccaagatgaggtcgttgcgagcggcgcagaccctagtctcccgttcccttttctcagcgcgccatctaagcggcgcagcctcccccgccacggccgccgccgcgggcgcgcggtggtgtgcagcgccggcgccaccgccccgttcgccgcttccatcctcgagggtgatgcctgccggggttgccggcgcagtatccttctcccttaccttcgctactgtagcggcggcggaggccaaggccaaggagcgaccgcaaccggatctgttgccgcagaacgtggtgctgtaccagtaccaggcgtgccccttctgcaacaaggtcagagattatcatgatataccatataaagttgtggaagttaatccattgagcaaaaaggaactcaagtggtctgattacaagaaagttccaatattgacagtagatggtgaacagcttgttgattcatcagatataatcaatatactacagagcaggatcaaccccaatgaagaactcactagtgacgaggaagcaaaatggcgaaggtgggttgatgagcaccttgtgcatgtcttatctcctaacatatatcggacaacttcagaagctctagaatcttttgactacattgcaaaacatggtaatttcagttttacagagaggtttgccgtgaagtatgctggtgctgcggccatgtacatggtatctaagaaactaaagaagaaatacaacataactgacgagcgtgcttcattgtatgatgctgccaatacatggatcgacgcactgaacggaagagatttcctgggtggctccaagcctaacttggcagatcttgccgtcttcggtgttctgagacctatccgatacttgagagcaggaaaagatatggttgagaacactgaaatcggcgattggtaccgacgcatggaagacgcagttggagaaccatcaagaatacaggatgcagaaggaaactagaattttgacaacattcttttaaatactttagcggtatccgtgcctatgcatggaggctattcaaattttttgccagaatcaagtgtatgcaataatgctctgccagattattaagtatactagcacctgaggaacagtgtttgacttgggaacttggttgtgttactgtgtaaggttttgctcccctagctgttcacgtctgtattgtctgcgatgtggttttgaagattcagcatcagcgattctgctgtgccttgcatacagtttaaagaatttcggaatgctggatctgccgaagcgatagattcatggttgtttaattaattaatgacaatctcatgtggcttattgactgggacatgttccagtaa

SEQ ID NO: 20726 - DNA, 1564 bp, Zea Mays
gtctttggttcgccagaaagctcttgcttatgggtccatctttccacggttgattctggtcgcccggcggccagaagcccagaacctttgctggcaggccgcgaaccaaccaaacagctgaagtctgacgacgagccttggttcagagaaacagggcactgggtttagagcccttcggatctagtattgtcgttcaccggcggcgaccaggccaaaccctagaaccttgccaagatgaggtcgttgcgagcggcgcagaccctagtctcccgttcccttttctcagcgcgccatctaagcggcgcagcctcccccgccacggccgccgccgcgggcgcgcggtggtgtgcagcgccggcgccaccgccccgttcgccgcttccatcctcgagggtgatgcctgccggggttgccggcgcagtatccttctcccttaccttcgctactgtagcggcggcggaggccaaggccaaggagcgaccgcaaccggatctgttgccgcagaacgtggtgctgtaccagtaccaggcgtgccccttctgcaacaaggtcagagcctttttagattatcatgatataccatataaagttgtggaagttaatccattgagcaaaaaggaactcaagtggtctgattacaagaaagttccaatattgacagtagatggtgaacagcttgttgattcatcagatataatcaatatactacagagcaggatcaaccccaatgaagaactcactagtgacgaggaagcaaaatggcgaaggtgggttgatgagcaccttgtgcatgtcttatctcctaacatatatcggacaacttcagaagctctagaatcttttgactacattgcaaaacatgttttacagagaggtttgccgtgaagtatgctggtgctgcggccatgtacatggtatctaagaaactaaagaagaaatacaacataactgacgagcgtgcttcattgtatgatgctgccaatacatggatcgacgcactgaacggaagagatttcctgggtggctccaagcctaacttggcagatcttgccgtcttcggtgttctgagacctatccgatacttgagagcaggaaaagatatggttgagaacactgaaatcggcgattggtaccgacgcatggaagacgcagttggagaaccatcaagaatacaggatgcagaaggaaactagaattttgacaacattcttttaaatactttagcggtatccgtgcctatgcatggaggctattcaaattttttgccagaatcaagtgtatgcaataatgctctgccagattattaagtatactagcacctgaggaacagtgtttgacttgggaacttggttgtgttactgtgtaaggttttgctcccctagctgttcacgtctgtattgtctgcgatgtggttttgaagattcagcatcagcgattctgctgtgccttgcatacagtttaaagaatttcggaatgctggatctgccgaagcgatagattcatggttgtttaattaattaatgacaatctcatgtggcttattgactgggacatgttccagtaa

SEQ ID NO: 20727 - DNA, 1567 bp, Zea Mays
gtctttggttcgccagaaagctcttgcttatgggtccatctttccacggttgattctggtcgcccggcggccagaagcccagaacctttgctggcaggccgcgaaccaaccaaacagctgaagtctgacgacgagccttggttcagagaaacagggcactgggtttagagcccttcggatctagtattgtcgttcaccggcggcgaccaggccaaaccctagaaccttgccaagatgaggtcgttgcgagcggcgcagaccctagtctcccgttcccttttctcagcgcgccatctaagcggcgcagcctcccccgccacggccgccgccgcgggcgcgcggtggtgtgcagcgccggcgccaccgccccgttcgccgcttccatcctcgagggtgatgcctgccggggttgccggcgcagtatccttctcccttaccttcgctactgtagcggcggcggaggccaaggccaaggagcgaccgcaaccggatctgttgccgcagaacgtggtgctgtaccagtaccaggcgtgccccttctgcaacaagcctttttagattatcatgatataccatataaagttgtggaagttaatccattgagcaaaaaggaactcaagtggtctgattacaagaaagttccaatattgacagtagatggtgaacagcttgttgattcatcagatataatcaatatactacagagcaggatcaaccccaatgaagaactcactagtgacgaggaagcaaaatggcgaaggtgggttgatgagcaccttgtgcatgtcttatctcctaacatatatcggacaacttcagaagctctagaatcttttgactacattgcaaaacatggtaatttcagttttacagagaggtttgccgtgaagtatgctggtgctgcggccatgtacatggtatctaagaaactaaagaagaaatacaacataactgacgagcgtgcttcattgtatgatgctgccaatacatggatcgacgcactgaacggaagagatttcctgggtggctccaagcctaacttggcagatcttgccgtcttcggtgttctgagacctatccgatacttgagagcaggaaaagatatggttgagaacactgaaatcggcgattggtaccgacgcatggaagacgcagttggagaaccatcaagaatacaggatgcagaaggaaactagaattttgacaacattcttttaaatactttagcggtatccgtgcctatgcatggaggctattcaaattttttgccagaatcaagtgtatgcaataatgctctgccagattattaagtatactagcacctgaggaacagtgtttgacttgggaacttggttgtgttactgtgtaaggttttgctcccctagctgttcacgtctgtattgtctgcgatgtggttttgaagattcagcatcagcgattctgctgtgccttgcatacagtttaaagaatttcggaatgctggatctgccgaagcgatagattcatggttgtttaattaattaatgacaatctcatgtggcttattgactgggacatgttccagtaa

SEQ ID NO: 20728 - DNA, 1200 bp, Zea Mays
aaatacatttcgaaataaataaaaaagaaaactattcctaaccctaaggcccactaggggcccatctacctaaacctaacagccgcgcgctgcgctccctggcttctctcccagccgccgcctctattctcctttccctcttctctctcccctcgcctatctcctcccccgacgcgcctgcaccaacagtggaagagctcgctagcgaagcaggcctgggttgcggcgcacagcgtgaacgcgttcggcaagagaccctcctcgagcgtctcaccgaaaaggcggagcgcctccgcctcagcgccattttgcgagaggcaggacaccatggccgtccaggagatgaggtcccgcaggccgacgggcattccgtcgaacacgctgcgcgcggcggccacgacgctacacatgcagtagagcgtgaggagcgagttggcgacgacggaatcagtctcgacctataggaatcgttgaatgcccggtacaaccgatcaagtttcgacaacccctggttcgtcatcggggtctcctactccggcgctctcagcgcctggttcaggctcaagttcccccatttgacatgtgggagcctcgcgagctcaggggtggttcttgcagtgtacaactacaccgactttgacaagcaggttgatagtccgggaataggttggagagtcagctggtcctgagtgcaaagctgtccttcaggaaataactgaactcgttgacgaacagctccggctggagagtcactcggtgaaggctctatttggagcacagatgctgaaaaacgatgtcgactttctcttcttcctggcggatgccgcagcgataacaacatcaagtaagtggcgacatcacaacccctacaagtttgtgcctcaaaacaagaggatacaagaagttggagtgcttttgtgaaggcttttgcgaatcacttgaaacgttggtacttttgtgaatgattttgtaaagtgtttgcaaatatgtgcaaaacataataacatgtgtaggttttgtgaatgattttgttgtggtgcttgttgatggtttatgtgatgtggatctatcattgtgcaatactaattaaatttgtatatctatgtgattatgtgtataaaaattggtgatttgtgatgcttttgtatatataacagttgttgaatgctaattaatggtatattatcattattaacgact

SEQ ID NO: 20729 - DNA, 1777 bp, Zea Mays
aaatacatttcgaaataaataaaaaagaaaactattcctaaccctaaggcccactaggggcccatctacctaaacctaacagccgcgcgctgcgctccctggcttctctcccagccgccgcctctattctcctttccctcttctctctcccctcgcctatctcctcccccgacgcgcctgcaccaacagtggaagagctcgctagcgaagcaggcctgggttgcggcgcacagcgtgaacgcgttcggcaagagaccctcctcgagcgtctcaccgaaaaggcggagcgcctccgcctcagcgccattttgcgagaggcaggacaccatggccgtccaggagatgaggtcccgcaggccgacgggcattccgtcgaacacgctgcgcgcggcggccacgacgctacacatgcagtagagcgtgaggagcgagttggcgacgacggaatcagtctcgacctataggaatcgttgaatgcccggtacaaccgatcaagtttcgacaacccctggttcgtcatcggggtctcctactccggcgctctcagcgcctggttcaggctcaagttcccccatttgacatgtgggagcctcgcgagctcaggggtggttcttgcagtgtacaactacaccgactttgacaagcaggttggagagtcagctggtcctgagtgcaaagctgtccttcaggaaataactgaactcgttgacgaacagctccggctggagagtcactcggtgaaggctctatttggagcacagatgctgaaaaacgatgtcgactttctcttcttcctggcggatgccgcagcgataacattccaatacgggaacctagatgccttgtgccctccattaatacaggcaaagaagaacaggaaaaacttggtggtacatgtcccttctataattgtacatgagatctgtaaaatcttactggaagacagaaggagccagcaaagaaataactatccttgtattaacattttaatgtaaattgttttaccaattaaactcccctgccaatagcaaataagaggaataagcatagtagtttaatctataaagatggaaaatagttacactgttgagtgaaaattctgcaggcaacctgtcgatggatgaccaaacacattatacaattttactattatatcttcctcttttagagcatcctttttgatcttccatttactggttttgcaggaagcatatgctcaatttgtgtttttagatccatgatatgttgtcggtctgttgtttgtagtcctagatatcttcgtttttgtcactactaaaaacaccgatcggttctgatgtactgctatttattgctctgatatttttgtcatgtatgtgattggtgacttgggctttactagaggaacattcgtggtatagttttgaagagagaaacatcaagtaagtggcgacatcacaacccctacaagtttgtgcctcaaaacaagaggatacaagaagttggagtgcttttgtgaaggcttttgcgaatcacttgaaacgttggtacttttgtgaatgattttgtaaagtgtttgcaaatatgtgcaaaacataataacatgtgtaggttttgtgaatgattttgttgtggtgcttgttgatggtttatgtgatgtggatctatcattgtgcaatactaattaaatttgtatatctatgtgattatgtgtataaaaattggtgatttgtgatgcttttgtatatataacagttgttgaatgctaattaatggtatattatcattattaacgact

SEQ ID NO: 20730 - DNA, 1796 bp, Zea Mays
aaatacatttcgaaataaataaaaaagaaaactattcctaaccctaaggcccactaggggcccatctacctaaacctaacagccgcgcgctgcgctccctggcttctctcccagccgccgcctctattctcctttccctcttctctctcccctcgcctatctcctcccccgacgcgcctgcaccaacagtggaagagctcgctagcgaagcaggcctgggttgcggcgcacagcgtgaacgcgttcggcaagagaccctcctcgagcgtctcaccgaaaaggcggagcgcctccgcctcagcgccattttgcgagaggcaggacaccatggccgtccaggagatgaggtcccgcaggccgacgggcattccgtcgaacacgctgcgcgcggcggccacgacgctacacatgcagtagagcgtgaggagcgagttggcgacgacggaatcagtctcgacctataggaatcgttgaatgcccggtacaaccgatcaagtttcgacaacccctggttcgtcatcggggtctcctactccggcgctctcagcgcctggttcaggctcaagttcccccatttgacatgtgggagcctcgcgagctcaggggtggttcttgcagtgtacaactacaccgactttgacaagcaggttgatagtccgggaataggttggagagtcagctggtcctgagtgcaaagctgtccttcaggaaataactgaactcgttgacgaacagctccggctggagagtcactcggtgaaggctctatttggagcacagatgctgaaaaacgatgtcgactttctcttcttcctggcggatgccgcagcgataacattccaatacgggaacctagatgccttgtgccctccattaatacaggcaaagaagaacaggaaaaacttggtggtacatgtcccttctataattgtacatgagatctgtaaaatcttactggaagacagaaggagccagcaaagaaataactatccttgtattaacattttaatgtaaattgttttaccaattaaactcccctgccaatagcaaataagaggaataagcatagtagtttaatctataaagatggaaaatagttacactgttgagtgaaaattctgcaggcaacctgtcgatggatgaccaaacacattatacaattttactattatatcttcctcttttagagcatcctttttgatcttccatttactggttttgcaggaagcatatgctcaatttgtgtttttagatccatgatatgttgtcggtctgttgtttgtagtcctagatatcttcgtttttgtcactactaaaaacaccgatcggttctgatgtactgctatttattgctctgatatttttgtcatgtatgtgattggtgacttgggctttactagaggaacattcgtggtatagttttgaagagagaaacatcaagtaagtggcgacatcacaacccctacaagtttgtgcctcaaaacaagaggatacaagaagttggagtgcttttgtgaaggcttttgcgaatcacttgaaacgttggtacttttgtgaatgattttgtaaagtgtttgcaaatatgtgcaaaacataataacatgtgtaggttttgtgaatgattttgttgtggtgcttgttgatggtttatgtgatgtggatctatcattgtgcaatactaattaaatttgtatatctatgtgattatgtgtataaaaattggtgatttgtgatgcttttgtatatataacagttgttgaatgctaattaatggtatattatcattattaacgact

SEQ ID NO: 20731 - DNA, 7321 bp, Zea Mays
ctccagccgccgccgctccattgcttcaggcttcagcttttggaaagtgcccagtgctccagtgccccactgtgcccagtgctccagccgccgctacccagtgtggctgcccattgataatatgccattctattgtgtgtgttgcaggaagccaggaagcacactgtttttggcaagcttgttgttggaagtgatgttctgaagagaatcgagcaagtagatgtgcaatccgcagcacctattgctccatttgatataaagattttgggggcatttagctaaagtgtggcagtgaatttcaatggcaacaaatagcgaggcattgtctgccggtgaaagtaatgactcctatgacccactcaaagatcagtcacgaaggccaaagtcaaatgatccaggatggaaatatgcatactatgttgaggcaagaaagcgagagttgattcaatgtgctttgtgccccaaacaaataaaaggaggtatcaagaggttgaaacaacatctagctggtggctatggagattggagacattgtcaagtgtcctaacactactagagagattgctaaagagatgaatgaagctttgaataatgggaagcgggctaggccgttgtacctagatgacgatgtaatggaagatgaagcaggacaagatgatgtccaagttatgggaagcaggtcaatgtcagcatcatccaaggcttcctcgtgtactgtgccaagttctggaatagctgccaaaagaaacaaagcaattttccaattgaagccccacccaattgcagctccaaagaagtccattgcatctatgattcgacaaacacctcaagaggttgtagcagagagacatgcaaaggggcctgctcaaactaccataagtgctaccatgaagcctaaggaagaaagaaattatgtttgtttggagataaccaagtttttctacgagtgtggtataccattcaatgctgcgaactcaaggcaatttgaggtagctgtggaggctatttctcaatatggatttgggttcaagcctcctactttccatgagctaagtgtgcctttacttgctagggctgtcaaagacatagatgatgagaggatgaagcatgaggaagcatggagccaatatggttgcacactcatgtctgatggttggacagacaaaagaggtctccatttgatcaatttccttgttaacagccctcaaggaacattcttcttggagtccgttgatgcatcaaatgagtcacacagtgcagtgacgcatgcagacttgttacaaaagagaattgaggggattggtaaagaaaatgttactcagattgtcactgataatggtgctaattataaggcagcaggtaagattttaatggagaggattcctaccttgttctggactccttgtgcggcacattgcttggaccttatgttggaggacataggaaagctgaaggattttaagaagcctattgctcgtactcatcatgtcaccacttttatttatagacatgggaggatacttagtgaaatgagggtgcatacaaatgggatggatcttgtgagacctgctgctactagatttgctactgccttccttaccatgaagagtttgcacaagtacaagaactcattgaaaggcctattttcaggtgatgttttcactcaatccaaggattgtcttagagcttctttaccgcttcttgtcgtgctgagattggttgatggtgatgagaagccagccttggctgaggttgctgcagccatgactatagcaaagaataagattagctcctcattttctactcaaaacaagaaagcatgtctgaaacatatcatgagcattgtggatcgacgttgggcgaaccaaatggataccccattatatggagcagcactatatttgaaccctggaaaattctacaacatcaaagcaggtgatgatgaaggctatgttggagagctaaggggttgctttaatgatgtgcttgtcaaaatggtggtagatgaggatcttagagagaagattgatgcccaagctgttctttatgagaaccaaagagaggcatttgcaaatccaatggctataaaaaatgcacaaacaaggaatccacttgattggtggcttgcatatggtggtcgtactattgaattatataagtttgcaagatggattgttagcctttgtgcttcatcatctagttgtgagcggaattggagtacatttgaatttatgcataccaaaaagaggaataggttagagcacaaaaggttgaatgacttggtatatgtttcatacaacagaaatatggcggataggtttcaaaaaatacgtgaggaaggaaaaaactttgatcctttgattttagaagacttcgattgggacaatgaattggttgatccattagctaattcttctcatgttagcaatgctcttggagatgatttcaatttatcatgggaccaagttgatgaagctattggtgcatttgcacatctcagaggtcgtaattttcctaggagagctggtggtgggtgtgtgagaaggaatgaagaccttgaggaagaggagactaatttagcaaatgaagatgacgaggatggggaatatattcttgatgatcttgatgtggaagatgaaattgaaggaagcaatagtggaaacgatggtgatggtcaaggcgtggatgctcatggtcttaatattgatgagttcgatgatggttactaatcatgcatgaaagttgtaacttgtgttgtgtggctgaacttgtgttgttgaacttgatatgtttttatgctaatgctatttggtttgtgaactcaacttatgtatgaacttattctatatttgaaattatatgtcaagtctgaaaagacgtttcaacgctcgtttaaacgtttaaacgttgaaaagttggttcataacgttttaacgttttaccgctttaataaccatgcaattaacacaatgatcttatcatgaacaataataaaccaacaataatagtggaacatgatcataattcagtatagcactaatcccaaaatcaggtagagcaatagcaaatctacccaatagttcatttgtttgcaaggtgtgggataaacagtactagagaaacctattaggtcccatcaaattaacatgagcttgtcacagtgattaacaggaacattattaggtaaagaagagtaatcaaggcacaacttgcctttttggtgcaactccaggtacttctctaatttggtcttcaggttcctcgtgacctcgctactactcgtagtaatacatacaatcaagcaaataatgggtctggtaacattacaccaaagcataagaacaaaaaagcgtaaggatattctacgcatccatatgaaatcgtatgatcaagaaccattaaaatcgatattaaaacgaagaatttatggataaaacgatattttaggcataataaatttaatagatatgatctaacagatattacatttaaattaagtatgtattaaattaaaatatttgagatgatattaatcattaacaattatttgtaaagtgcttaggttagaattataaattagatattacctatgaaatatttgggagttccaatcgacaataaaaagcttaacaagtgtctttgggcttctactgaagagaaggttgaaaaaaaactgagtctttggaaaggtaggttcctaagtctgggaggcagactgaccttaatgcacagatgtttaactaatgttcccttgtacatgctttccatctactctgctcctaaatctgttattaggagaattgatattcacaggaaaaatctcctgtggcaggtcgtgattataaaaaaaaatcatttagcaaagtgggagatggtttgtactccaaaaaagcagggcggtttaggtgttctggaccttaattgcatgaatgttgctctgttatctaagtggttttggaacattgagaactcaaatggtttatggcaggaaattatcaaggctaaatacatcaaagatgttcctcttatttctgtcaaagttagacaaaatgattcacatttttggagggccattctgggcctgagagatgaattttataaatgttgcaaaaaggttgtgggtaatggcaagtctaccagcttttggaaaaacatttggtgcggagatgtctctcttgcagacaaatttccaaggttatacaacatagctcgtgataaagacattacagtggaaaaagtgttgaactctgatttccaggctctttctttcagaaggagaattattggtgatctttccatgaagtttggtgatttagtggcttgctgcaatacctttcaaattaacaatcagaaagacaaagtgagttggtctttagacaaaaaagggtattcagtgaagtccttttattcaaaaaaatgtgatcaggtacgtgtgccgtattattttctatggaaaacgaatgtgcctcaaaaaatcaaagtttttctttggttggtcctgagaaacaggattctcacgaaagacaaccttaaaaaaaggaattggcaagggccagttgagtgtgttttctgtggcattgctgaatctattgaccaccttttctttatgtgccctgtagccagatatgtttggagggtgattcaaatttccttgggcatttcttgtatccctagtagcattgaagagctctttggtgtgtggattcgaaatttcaataagaatacaaagcttatcctctttggttgtggagctgttttgtggtctatctggagggctcggaatgactggtgttttggaaataaaactctttgtgatccgtctaatgtggttttcatgtgctgcttttggctggactcttgggcaatttgacagaaaaagaaggaaaaaaggaaggtggggcaaggaagcagactcatccgaaggatggcaagtgaagtgatgtgtcgtgcctttggttggtgtccgatggatcgtcgaatttctggatgataatcccctgtctcagaatgttgttggcgctttgttgattgtgtgtgcttttagtcttttgtttcaataagaatacaaagcttatcttgtaataagtggttcctagactcagtcgtttacgtatgtctacgctttaggtcgtttctttctctatcgagcgcgctcggtattgtttaggatgtaagcaacgggactcttactctcatcgagagaatgacactatgagttgcgacgattttctgtttattttctcaaacactacacaatgtcataaccatctaagggttggggacacatttatagccctaggggctgcactacacactactctgcaatattagagatgttgttgtccctgctgttctctagatgctaaaggaggacagtcaaaaagcttctgctatctagatactaaaggagagcgaaagggcctctagcctagcggttaaggacttccgagtagcacctccaagtcctgggttcgattcctatagggagcgaattttcaggcttggttaaaaaaaatcccctcgttgtgccccatccgctctcgggttgcaatgtcatgtgcaccaccctccggttgggccgttgcagagtggacagttgacgccggcccgttagtgatggggggccagggttcggggattttctcggccgggaccattgtttcggtctcttcttatatgtaatacctggagggcggtctttccctccccggtcgagtttttttagatactaaaggagatgatgctgtcctgcagcatgctgtccttcacaagaccatgcgttgtcttctaatctaaagaactgcagcaaagcactgttgtcctctacagtctacccaacctgctgtccttaaagcaatcaaaaactgcattaaagaccaacagcaacagcagatgctgctgtcctttgctgtccttaaagcagtcaaaaactgtagtaaagaccaacagcaacagcaaatgttgttgtccttcgcacagatcacgagacttattccaacataggacgtctagcgtatcatcttttgtcctgccagtggttcttgtaatgagacttatgtttcctatttcctaatgaaatagggggttatagtgttataccccatagtcaaaaaaagttcaattgtggatccaagtgtttgcttgtttataacacccacttgaggttttattgcaatgtttcttagcagtgctgctcttttgcatttagccatctgttataggtacaatgggaagtatatataagctccataagcttcaatcaacatgcatattattgatattctcaatcatttaaatttcagtggagtactggggtaccttgagatgcttccatcataaacctatatgtattggagccatacagtaaacactccacactcgttcatatatttcatgcagtgagtaataatgcacagaaaaattatttgatataatgcacgggcacatgactagtagtgtgagagaaaaacaatatgctcaagttatgtcaggataactaactattttagaatctacactagtgaacagtgttgtatggcaatcactgtttaaaattgcaggctgaatcattcagtggacacatacctcataaggtaagaatcgctatagtgcgctttagtgacaactaatctaatgagcgtattaattaagagaaaatgttaatgactgcgtacttccagctgataagtctgggcccaaaggaaaacataaaaggaccataatcctcccctgacatataagacgtccaggtccatgtgaactgcatcacatccccttcccttgtcctctactcatcaggcccttctgccctgcgcctctccctctcctgccactcacgctctaccccaatgccaccagtggccatgcgatctcggagttgactccccgtcacctgtctagccctccttcccatggggaagaccagtgctgccatagagcatgaagtggtgggcggcggggaagggcaaagttgtggtttccatggtgaactgactgccgaggagaaagggcaaagaagaggacaacactctgacagatacccagcaaggaaaagtgagatgatcctgatcccgccagaatcaagaaaaagcggcactaaatttcctcgtcgcgaagcctgcttagcatagttagcaccgctaaagcactcatagccgaagcagtggagaaatgtgccattgtgtagcgcagactccaaccacacactatagcctgttatttgttacgttgattgcgatttaaacagtttgtgagtttgatctttgaagtagtgtactaccagaccttctgagagctgacttgcaaaaaactgcaaactccg

SEQ ID NO: 20732 - DNA, 869 bp, Zea Mays
cgattctctcggctgggaagtcgccagggtcgttcccttgctccccgagggccataaatgcacagacctggtccaccacttcgccgtgtgccgcatcctccccttgccactccttgctgccgagccgtgcgcagggaataggctaccgcatcccggacccaacctcccacgccgctccttcctgaagccatcaccaagaaatccaatgccacagccagcgtccttccctcccgtcgccgaatcggtggtccgctgtggtgagacggcttccacggggtctggttcttggacgcgctcgcggcgcccttcgtgtcggtccacgtccgctcgtggccaccgccctggttgatccccgtctgaacctcctgcttggcctccgtgactggttcgggtgaagatggacactgcggatgacgttcggtgaaagctttaggcacagatctcgttggccctcgatgtcgtggcagcaccaattactcgcctggagctatggggctgggagatccgccgcgggagttccacgcgccgtggtcacctctcaccgtcgtttggcgcttccggtaagtcatcttctagaagttcgcaaccatgcccacgtcgtgtatcaccggttaggctcgggtatagggcattagaacaccagacttcggatcaccggcatggccgctgccagtggcggaggacgccagaaaatttaggtgttgccaacgcaacgaagaataaaatttatgacacagtttaaaaggacttgtagctacaaaataagtaatagatgttgaaaataccttatttaatagtcattttgattacaatccatttacaaccaaatgccatatagcgaataaaatctggaaaaaagaaaaaatgag

SEQ ID NO: 20733 - DNA, 592 bp, Zea Mays
cgattctctcggctgggaagtcgccagggtcgttcccttgctccccgagggccataaatgcacagacctggtccaccacttcgccgtgtgccgcatcctccccttgccactccttgctgccgagccgtgcgcagggaataggctaccgcatcccggacccaacctcccacgccgctccttcctgaagccatcaccaagaaatccaatgccacagccagcgtccttccctcccgtcgccgaatcggtggtccgctgtggtgagacggcttccacggggtctggttcttggacgcgctcgcggcgcccttcgtgtcggtccacgtccgctcgtggccaccgccctggttgatccccgtctgaacctcctgcttggcctccgtgactggttcgggtgaagatggacactgcggatgacgttcggtgaaagctttaggcacagatctcgttggccctcgatgtcgtggcagcaccaattactcgcctggagctatggggctgggagatccgccgcgggagttccacgcgccgtggtcacctctcaccgtcgtttggcgcttccgtagcgaggttgcgagtcacctgaagattgttc

SEQ ID NO: 20734 - DNA, 931 bp, Zea Mays
gaaccatatcgtcagggtctcgaaaacacctcttgggctattactaaagaacatggtgttgttggtgatatgagagatgcttggccaaatgctcgagtgcgaaaaaatgtttcactaatacacacatatcatggatttaaaggggagaaacaaggtgccctggaatttcttaaattgatatttagagctctttgcctctgctgggatcgacagacacaggacttgcatatcgactggatcttgtttagaggacgcccattggttcctgcactttgtgaggtcattaatgacaatatagatggtgtttatccgtcgtcgcacttccctatctttgccgagtttttgcttccacgctcagtccgcctagctgagacaccttcatagctattgtgtcaattttctgttctatttttcccaatcttattttgattacggctgattgtttctttcgaccacttcaccatgatcttgcggtaacccccctttacaaccattgttgggtttctttctgttatcccattccgcaaaacaagacaatgcacatgtgcatccttgtatgtttcctgtcactagtccctattatgtgttcgccttagctttgttatcttcttaaagttcactttttccttatgtcattgatttttagactgtcatatataccgtgtatatatatggtatgaatatgttgtcatgtatagtcggccgatccttgtatatgttataccgttatatatgaagtgtgtatagagatattgggagatttcatttggttctgtttccataaaccatgagatctctcctctctttatatatatatctttatatatatagggcagatttatatcaccctgaccaaccagggtgctcacttgttcgctcgacgcgctccgcccgcagtgcggctcccccgcgctcgttcaacaaagctgac

SEQ ID NO: 20735 - DNA, 71 bp, Zea Mays
gtgtgatcttaggaccagaaagctatcagtagatgaccttgaatagcggcacagcagatacagcacctttg

SEQ ID NO: 20736 - DNA, 787 bp, Zea Mays
cacaaaatttgatagaataaacatactcaagtatctgttccatgtcataaacaatacatgtaagaaatatatttgtagggggtgtcaaatttgtttttccctatacaaagtctaaaatactcttagactattcccttacatttattcattcatactagggtagtttaatctttttatccaaatatatgctctgggtttcacattggcatgtcctatttgccagaggggcttcacatttatcgagggaatcgttctgccttcattcaattttgactttatctcgaggcaaagtgtgccttgtgccttcatttgatcatcgatgaagagagtcttcttcagaggggcttcgtgtcctcaaagcgaattcgatctggcttcatacaattctggcttcacttcttagttgtggttttgctcaactgccggtgtagaggaaatgcagtatgaacgacttcaattctgcgggtggggttgctcacagtcatagggtaacgcagcatgaatgccttcaattctgcgggtggggctgctcataatcatagtcatagtcatagggtatgaagttgaaaaaagctgcttcactgatgaaactgagctgtaccaaatgaagtcttaatttaatttaagatggagggataaggacctctctaactaaattgtctttgcatttggcgtgcctaaaaaaattcaaaatctcaacatccgtgaagtgccgttagcggtgacatcatctccgtacgcggccaatagaacgcctccaacggcacagacttgggcatggtcagcc

SEQ ID NO: 20737 - DNA, 1495 bp, Zea Mays
ctcaacatcaaatttgtcattgtttggattaattttatagagaatagagtggttttaaaaatgaaaaattatacttaaatgttgaatcatttagcacctctaaaatctttagactgagccgctccaagaacggagccatttaatcctagctcgcttcggaaccaaatgctatctaaataattgactaaaataaggatcatatctccacctcagagatttggtcatgattctaaagtcttcagcacatgcctacctccatcacaatgatctggccatgatactactaccaaaacaagtaaaaaaaaacagcctacgcgcacccagtaattctgtaaatcccacgaccagtaaaatccactacagttcgttactacgttcagcaagtagttgagattactctgtttcttctctctaatttcttcaagttgcaatacgatatgcagaacagaatgaaactcaccaagcagagcgctctgatgaccttgtcgctgtacgtctcggggtcagatgcctgcttctccagcaaatcgccgaccatcgtcttcccctgctccctcccggccgcggcggccgcccggtgctcgtcgataagccgctgcgcccactcgttgcgcgccttggacagccttattgcgcgcttgttcacgccgccgatgtccaccagtgcaagtacgggcacgaagtcctgcaggttcgatgccccgtgcatcgctaagtactcgcggaccatggcacggaaccgctcggcctcctccgacgccaccgagccgtcgccgtagtaccgcttcccggcgattaccctcgccacggtgttcagcgcgatctcgaacgcgcgtgccttcacgtcgcagcgcgcgggcctggaggcgtcggccccggcggcggccttgaagagctggcgcgccatgttacggacctcgctggcgcggacatccgcggagcagaggacgcgatgcgaggagaagacgtcgacggtggcgatgcggcggaggttgcgccagttgggcccgtagcttgaggagcccaacgtggtgtagtcgttggagaggtagcgggcggagggaagccgcgggcggttggcgaaggtgacgtcgtgggtgctcaaacactccgcggcgacggcagggtcggcgacgtggacaacgcggcgggagccgaatcggaagaggagaacagggccgtgctgcgccgcaagagcagacagcgttcggtggagcggcttcttcaaaaggtgcaggtggccgatgacgggcagggacgacggcgggctcggtgggaggcgacagtggcgcttcttgttgttgatgaggctgcgcaggaggagaaggaagagtgtcgttgctagtgacagaaaggagaaggagagtgccgtcgcggccaccatggttgggatcttggactcttggagctgggtggacgggacggaaatctctggaggaaaaagaggaacccaggggccaggagttttagctgtcggtgaccgtcctgctcaaac

SEQ ID NO: 20738 - DNA, 1295 bp, Zea Mays
gtagaacgcgtcaccgaagcaaatctagaagcaaggaacaaggacgcggcgaggtccacctccagctctacctgcccggctggcggctgccccccttgctatgcttttatggagttatttttctgtggtgctcactgaccctggttctgttccaccaaattggaatcttgattttgatgcggagaggggagaaactgctcctctcactagctcagagttcagtagccagatgaattcacagcaatctgtggctcttggcaatacggcaaatccaagggctaggtactgtaggaaatgcaaccagttgaagccacctcggtgccaccattgctctgtttgtggaagatgtgttcttaagatggatcatcattgtgtgtgggtggttaattgtgttggggcactgaactacaaatactttcttctgttcctgttttacaccttcctcgagacaactcttgtcacactctctttattgcctcacttcatagccttcttcagtgatatcgagatcccaggaagtcctgcagcacttgcaaccacatttctcacctttgtgttgaatctggccttttccttgagcgtttttggttttatgattatgcatatttcacttgtttcggctaatacgacgacaattgaggcatatgagaagaagacaactccacattggatatatgatcttggccggaagaggaattttgctcaggtttttggaaatgacagaaaatattggttcatccctgcatattcagaagaggatctgagaagaattccagctctacagggtcttgattatcctgtcagtgagaccagattttgatggccaggaattgtaatggggcaattctaacagtgtcctcgtcagatacctcagtgttggacatctactcatacaactgtcagcattgctgattgccctatgcaaggcatctagtgaaatgtgcacaagatgattgtagtaatagtaaccatgagttattcatctgttgcacttcatgtatgtgacgaaggggaagtcctcctacctttgccagaggaagtttgttgtgatgtaaattagttttagcgcctggttagatggaccaaatcttggcgatgcgccaggattttggacttaattctttatccatccacgtgaattgggcaggatttcatccatgcaaactgggcattagtgtggtttgaaacagtcttgtacttcagtttagttatatcatgccatgcaatacatttaccatttgagatatttgtgccgctgttatacactatcaatagtaaatggataagcgctgcgt

SEQ ID NO: 20739 - DNA, 1254 bp, Zea Mays
gtagaacgcgtcaccgaagcaaatctagaagcaaggaacaaggacgcggcgagcttgctatgcttttatggagttatttttctgtggtgctcactgaccctggttctgttccaccaaattggaatcttgattttgatgcggagaggggagaaactgctcctctcactagctcagagttcagtagccagatgaattcacagcaatctgtggctcttggcaatacggcaaatccaagggctaggtactgtaggaaatgcaaccagttgaagccacctcggtgccaccattgctctgtttgtggaagatgtgttcttaagatggatcatcattgtgtgtgggtggttaattgtgttggggcactgaactacaaatactttcttctgttcctgttttacaccttcctcgagacaactcttgtcacactctctttattgcctcacttcatagccttcttcagtgatatcgagatcccaggaagtcctgcagcacttgcaaccacatttctcacctttgtgttgaatctggccttttccttgagcgtttttggttttatgattatgcatatttcacttgtttcggctaatacgacgacaattgaggcatatgagaagaagacaactccacattggatatatgatcttggccggaagaggaattttgctcaggtttttggaaatgacagaaaatattggttcatccctgcatattcagaagaggatctgagaagaattccagctctacagggtcttgattatcctgtcagtgagaccagattttgatggccaggaattgtaatggggcaattctaacagtgtcctcgtcagatacctcagtgttggacatctactcatacaactgtcagcattgctgattgccctatgcaaggcatctagtgaaatgtgcacaagatgattgtagtaatagtaaccatgagttattcatctgttgcacttcatgtatgtgacgaaggggaagtcctcctacctttgccagaggaagtttgttgtgatgtaaattagttttagcgcctggttagatggaccaaatcttggcgatgcgccaggattttggacttaattctttatccatccacgtgaattgggcaggatttcatccatgcaaactgggcattagtgtggtttgaaacagtcttgtacttcagtttagttatatcatgccatgcaatacatttaccatttgagatatttgtgccgctgttatacactatcaatagtaaatggataagcgctgcgt

SEQ ID NO: 20740 - DNA, 1288 bp, Zea Mays
gtttgtttaatagaggatacgtcaaatgttaaaatggagccaactatgctgaaagaagtttaataagaaaaataaactttcctagatgatctaatccaatacatttgagcgctactgattatagaaccataagcttgctatgcttttatggagttatttttctgtggtgctcactgaccctggttctgttccaccaaattggaatcttgattttgatgcggagaggggagaaactgctcctctcactagctcagagttcagtagccagatgaattcacagcaatctgtggctcttggcaatacggcaaatccaagggctaggtactgtaggaaatgcaaccagttgaagccacctcggtgccaccattgctctgtttgtggaagatgtgttcttaagatggatcatcattgtgtgtgggtggttaattgtgttggggcactgaactacaaatactttcttctgttcctgttttacaccttcctcgagacaactcttgtcacactctctttattgcctcacttcatagccttcttcagtgatatcgagatcccaggaagtcctgcagcacttgcaaccacatttctcacctttgtgttgaatctggccttttccttgagcgtttttggttttatgattatgcatatttcacttgtttcggctaatacgacgacaattgaggcatatgagaagaagacaactccacattggatatatgatcttggccggaagaggaattttgctcagaagaggatctgagaagaattccagctctacagggtcttgattatcctgtcagtgagaccagattttgatggccaggaattgtaatggggcaattctaacagtgtcctcgtcagatacctcagtgttggacatctactcatacaactgtcagcattgctgattgccctatgcaaggcatctagtgaaatgtgcacaagatgattgtagtaatagtaaccatgagttattcatctgttgcacttcatgtatgtgacgaaggggaagtcctcctacctttgccagaggaagtttgttgtgatgtaaattagttttagcgcctggttagatggaccaaatcttggcgatgcgccaggattttggacttaattctttatccatccacgtgaattgggcaggatttcatccatgcaaactgggcattagtgtggtttgaaacagtcttgtacttcagtttagttatatcatgccatgcaatacatttaccatttgagatatttgtgccgctgttatacactatcaatagtaaatggataagcgctgcgt

SEQ ID NO: 20741 - DNA, 590 bp, Zea Mays
cctgaatccagggtcgtcgctgcgcccggacctcaccttggggctacttaaggttgtgatccgcagagccctcccctcctttatccagctcaacgaacctccatgcccagcagagagagagagatgatggagtgagcgccgccgtgcgggatcggtcgccaccgtcgtacccattctccgcgggtgtagcagagtgaagctcgaggatagccggagaacgttgtggtgctcccgtgagtgaagtagatgcttccccggtgcggattggcgctcgagaccgacgggaatccctcaccgtcgctgcggatccgcagaacagcgcggcctgatcccctcggcacaggatttgggcggtgaggtcgaggatctgaagtatcaccctggtaactggaacctcaagtgccaggcaaagttgtgctcttgatccacttttgttacccaataatattctttattatcactattcaatgcataggtttaattttgatgggacccaataggtcaccctagtctgtttatccttttaccttgttagccctgaatcacttgggtagtttgctattgctttattggttttgggttaatatttc

SEQ ID NO: 20742 - DNA, 3782 bp, Zea Mays
aacgtgatcgcgacgcgcgtccgagaagcatccgccttccgtccgcagaccgcaaccatggtgacaccagcctccaccgcccctgcgtccaccgcttccgccgccgcggcgaccggctccggccgcggcgtactccgcctcctccgctatcccgcccgctgcctccttcctttggctgcggcgcccaggacaggcacgcggctgaccaccgtgctccgcgcaagaacccagccggcggagcccgagctggtggagcagtaggtgaacactatccggttcctggccgtcgacgccgtggagaaggcgcattctggccatccaggcctccccatgggctgcgcgccgctgggacacgttctattcgacgagttcctccggttcaacccgaagaaccccgcctggttcgaccgcgaccgcttcgtgctctccgccggccacgggtgcatgatccagtacgctctcctccacctcgctgggtacaatggcgtcaagatggacgatctgaaaactttccgacaatggagaagcagaactcctggtcacccagaaaattttgaaacacctggcgttgaagtcaccacaggtcctcttgggcagggttttgcaaatgctgttggactagcacttgctgagaaacatctagcttcacgtttcaacaagactgacatgaaagtcgtggaccattacacgtatgttatacttggggatggttgccaaatggaaggtgtttcgaatgaagcggcctctcttgctggtcactggggccttggaaaattgatagctttttatgatgacaaccacatatcaattgatggtaatacagatattgcattcactgaagatgtgcttgcacgatatgaggcactagggtggcatacaatctgggtgaagaatggcaacactgggtatgatgacatacgtactgcaataaacgaagccaagggagttaaagacaagccaactcttatcaaggtgactaccactattggttttggatctccgaacaaggccaacacatatagtgttcatggtaacgctttaggttcaaaagaggtagaggcaactagaagcaaccttggctggtttcatgagcctttccatgttccagatgaggtgaagaggcactggagtcgccatatcgatgagggtgcttcacttgaagctgaatggaatgccaggtttgtagaatatgaaaagaaatacaaccaggaggctgctgagttaaagagcataatttcaggggaactggcttctgggtgggaaaatgctcttcgaaactacactcctgaaatgtctcctgatgctactaggaacttatctcagcagtgcttgaatgcacttgccaaagtaatacctggatttcttggaggtagttcggatctcgcaacgtcaaacatgacactgcttaagaagtttggtgacttccagagggatactcctgaagagagaaacattcgcttcggtgtgcgagagcatgctatgggtgccatttcgaatggcatcgctgttcacagccctggtctgataccttattgtgcaacgttctttgtcttcaccgactatatgagagcttccatccgcctttcagccttaagcgaatctggggtgatcttcgtgatgactcacgactccgttggcctcggggaagatgggccaacccatcagcctgttgagcatttattcagcctccgagcaatgcctaacatcttaatgcttcgtccagctgatggaaacgagacatcgggggcctataagattgcagttcttaacaggaaaaggccctcagtcattgccctctcacggcagaagctcccgcagctgagaggaacatcggtcgatgctgtttctaaaggagggtatattgtctccgatgactcatcaggcaacaaacctgatttcattctcattggcactggttcagagcttgagatcgcagaaaatgcagcaggcgagctgcggaagaaggggaggaccgtacgagtggtttcactagtttgctgggagctatttgaggagcagcctgaggagtacaaggaaagtgttctcccgagtgaggttacttctaggattagcattgaggcaggggtcacatttggatgggagaagtatattggacagaaaggcaaagctattggtatcgaccgttttggtgcaagtgctcctgcggggaaaatatacaaggaacttggtttgacagtggaacacgtcattgcagcagccgaggccctgtaaatggtcgtcacattactgaaacacatagtttgataggtatatggtgccactgggttgaaggcttgaagcactatttatggtcatatgtaagtatctgaacttctaaggatctttacgagctgcaagttgcatgttcacctaatgatgtgtagcttgtcaggcaaatttgcgctttgctccgatgctcctatacattcagactctaagaacctgaagccaggtcctggtcaccaaattagtcgtaataataaaaattatccttcttagggctgatttggtgattagggatccatgggaggaatccccttgcaattcaattttgaatagcaagagaatttcttcccctcgggatccccggtcaccaaatcagcctttaatgagaacgtccagttgcacgttcttgaataaataaaatgctggtgatattatcatatctatactatacttaaagcaccagtttcaacggtcgtcatgcatcattttttataaataacccctcacagctatttcaaattaatccgttgcacgtctataaatgtcaaacgacgcctaacacgggctagatgcacgcgggccacaactatggcacaggcacgtcatgtcggcctgtaactgtgtcgggccaaaccgttagcccgttgatccatttaattaaatcagcgtaacgacgcccgatacgggctagatgcacgtgggccacaactatggcacaggcacgtcataccggcctgctaactgtgtcgagccatctcgttagcccgttaatctatttaattaaatcaacgtaaaatgttaaaaaacggagcaggaggtggggttcgaacctatgccctgatggaagaagggcgggagacacgggatgaaactatctaaccagtagaacatcacgctaagatgtttttaatattgaatataaattgtatataggtatatatgtttttttctaaaataaaaaataattgtgtcgggctgggccagcactacgggctgaggctataacccaagcacggcacgacgttctttgctcttgcaagcattaggtcgtttctgagaccacattgacgctgttgggggccttcggcttccgaaggtcctcaaaaacgtggtttgacaatgttttctaagtatacgagcaggtatcttcggaatcgggaatcaggttgcgggtatacagaagcacggtcaagacgaagcttgactgggacggcgatcatgacgaaggttaagatgatcacgaagctatatgcaaaagagcttcggtatcacggcgggaaggggaaaccgacttaaagatgaaaagccaaactagacctcgaagaattactatagggttattgataaatgtaaagggcattattgtaattttgcatgggctgcgacccgtgcctataaataggtgaacagtatctctgtactgttcacgctgacttggcattcacttttgcgtcacgcctgtattattttccttcaagacgaaggtacatttataatttatctttgttcaagcaagtaataagaatagaaatagattaataataatgtctatagaa

SEQ ID NO: 20743 - DNA, 3695 bp, Zea Mays
accatggtgacaccagcctccaccgcccctgcgtccaccgcttccgccgccgcggcgaccggctccggccgcggcgtactccgcctcctccgctatcccgcccgctgcctccttcctttggctgcggcgcccaggacaggcacgcggctgaccaccgtgctccgcgcaagaacccagccggcggagcccgagctggtggagcagtaggtgaacactatccggttcctggccgtcgacgccgtggagaaggcgcattctggccatccaggcctccccatgggctgcgcgccgctgggacacgttctattcgacgagttcctccggttcaacccgaagaaccccgcctggttcgaccgcgaccgcttcgtgctctccgccggccacgggtgcatgatccagtacgctctcctccacctcgctgggtacaatggcgtcaagatggacgatctgaaaactttccgacaatggagaagcagaactcctggtcacccagaaaattttgaaacacctggcgttgaagtcaccacagggttttgcaaatgctgttggactagcacttgctgagaaacatctagcttcacgtttcaacaagactgacatgaaagtcgtggaccattacacgtatgttatacttggggatggttgccaaatggaaggtgtttcgaatgaagcggcctctcttgctggtcactggggccttggaaaattgatagctttttatgatgacaaccacatatcaattgatggtaatacagatattgcattcactgaagatgtgcttgcacgatatgaggcactagggtggcatacaatctgggtgaagaatggcaacactgggtatgatgacatacgtactgcaataaacgaagccaagggagttaaagacaagccaactcttatcaaggtgactaccactattggttttggatctccgaacaaggccaacacatatagtgttcatggtaacgctttaggttcaaaagaggtagaggcaactagaagcaaccttggctggtttcatgagcctttccatgttccagatgaggtgaagaggcactggagtcgccatatcgatgagggtgcttcacttgaagctgaatggaatgccaggtttgtagaatatgaaaagaaatacaaccaggaggctgctgagttaaagagcataatttcaggggaactggcttctggaactacactcctgaaatgtctcctgatgctactaggaacttatctcagcagtgcttgaatgcacttgccaaagtaatacctggatttcttggaggtagttcggatctcgcaacgtcaaacatgacactgcttaagaagtttggtgacttccagagggatactcctgaagagagaaacattcgcttcggtgtgcgagagcatgctatgggtgccatttcgaatggcatcgctgttcacagccctggtctgataccttattgtgcaacgttctttgtcttcaccgactatatgagagcttccatccgcctttcagccttaagcgaatctggggtgatcttcgtgatgactcacgactccgttggcctcggggaagatgggccaacccatcagcctgttgagcatttattcagcctccgagcaatgcctaacatcttaatgcttcgtccagctgatggaaacgagacatcgggggcctataagattgcagttcttaacaggaaaaggccctcagtcattgccctctcacggcagaagctcccgcagctgagaggaacatcggtcgatgctgtttctaaaggagggtatattgtctccgatgactcatcaggcaacaaacctgatttcattctcattggcactggttcagagcttgagatcgcagaaaatgcagcaggcgagctgcggaagaaggggaggaccgtacgagtggtttcactagtttgctgggagctatttgaggagcagcctgaggagtacaaggaaagtgttctcccgagtgaggttacttctaggattagcattgaggcaggggtcacatttggatgggagaagtatattggacagaaaggcaaagctattggtatcgaccgttttggtgcaagtgctcctgcggggaaaatatacaaggaacttggtttgacagtggaacacgtcattgcagcagccgaggccctgtaaatggtcgtcacattactgaaacacatagtttgataggtatatggtgccactgggttgaaggcttgaagcactatttatggtcatatgtaagtatctgaacttctaaggatctttacgagctgcaagttgcatgttcacctaatgatgtgtagcttgtcaggcaaatttgcgctttgctccgatgctcctatacattcagactctaagaacctgaagccaggtcctggtcaccaaattagtcgtaataataaaaattatccttcttagggctgatttggtgattagggatccatgggaggaatccccttgcaattcaattttgaatagcaagagaatttcttcccctcgggatccccggtcaccaaatcagcctttaatgagaacgtccagttgcacgttcttgaataaataaaatgctggtgatattatcatatctatactatacttaaagcaccagtttcaacggtcgtcatgcatcattttttataaataacccctcacagctatttcaaattaatccgttgcacgtctataaatgtcaaacgacgcctaacacgggctagatgcacgcgggccacaactatggcacaggcacgtcatgtcggcctgtaactgtgtcgggccaaaccgttagcccgttgatccatttaattaaatcagcgtaacgacgcccgatacgggctagatgcacgtgggccacaactatggcacaggcacgtcataccggcctgctaactgtgtcgagccatctcgttagcccgttaatctatttaattaaatcaacgtaaaatgttaaaaaacggagcaggaggtggggttcgaacctatgccctgatggaagaagggcgggagacacgggatgaaactatctaaccagtagaacatcacgctaagatgtttttaatattgaatataaattgtatataggtatatatgtttttttctaaaataaaaaataattgtgtcgggctgggccagcactacgggctgaggctataacccaagcacggcacgacgttctttgctcttgcaagcattaggtcgtttctgagaccacattgacgctgttgggggccttcggcttccgaaggtcctcaaaaacgtggtttgacaatgttttctaagtatacgagcaggtatcttcggaatcgggaatcaggttgcgggtatacagaagcacggtcaagacgaagcttgactgggacggcgatcatgacgaaggttaagatgatcacgaagctatatgcaaaagagcttcggtatcacggcgggaaggggaaaccgacttaaagatgaaaagccaaactagacctcgaagaattactatagggttattgataaatgtaaagggcattattgtaattttgcatgggctgcgacccgtgcctataaataggtgaacagtatctctgtactgttcacgctgacttggcattcacttttgcgtcacgcctgtattattttccttcaagacgaaggtacatttataatttatctttgttcaagcaagtaataagaatagaaatagattaataataatgtctatagaa

SEQ ID NO: 20744 - DNA, 2086 bp, Zea Mays
atcaggtatcagccaccgcccaccccaactcgccgaaacacaatcgccgaacacacacaaaaaaaaccctagaccgccgagcccagtccagcagtgtctctccaccgctgccgcgccacctcgagctccacttgcacttgcatcgcgggatggagcacgatgcgcacgccgaggccccaccacacgccgtcccgccaccggaggtcgccaccgtcgatgattgggctcgcgacgacgcggagcccatgtccgttgaatctggcgttgccgctgcggagctaactgcggcagattcgggcgctgatgccccgctcgcgcccgcgccctcggccgcggtcgcggcagaaggtgtcaaggaaattcaatcatctctgcaatccttggagcttaaaacaaatgttgctactcaagaaggtgctcatgtggttgaagacgatgtagatgaaacaaaaagacacttgaacgtggttttcatcggccatgttgatgctggaaaatcaactactggaggacaaatattgtttttgagtggtcaagttgatgataggaccatccagaagtatgagaaggaagcaaaggataaaagtcgggaaagctggtacatggcttacatcatggacacaaatgaggaagaaagggttaagggaaagactgttgaagttggtagagcccactttgagacagaacacacaagattcactatcttggatgcaccgggtcacaaaagttatgttccaaatatgatcagtggtgcatctcaagctgacattggtgttctggtcatatctgctcggaaaggggaattcgaaacaggttatgaaagaggaggacagacccgtgaacatgtactacttgcaaaaactttgggtgttgctaagctggtagttgtaataaataagatggatgaacctactgttaaatggtctaaggaaaggtatgatgagattgaagcaaaaatggttccattccttaaatcttcagggtacaatgttaagaaagatgtacaattcttgccaatttctggtcttgtgggaaccaatatgaagaccaggatggataaaagcatttgtagttggtgggatggaccttgtctttttgaagttctggaccgtattgaaattcctttacgcgaccccaaaggtccagtaaggatgccgattattgataaatataaggatatgggcactgttgtaatgggcaaaatagaggctggcactatcagagagggtgacagtttattgattatgccaaacaagtacgtcgtgctggacctgctgagaatgttcgtgtcaaattgtccggagttgaggaggaggatgtaatgtctggttttgtactttcaagtgtcgctaatcctgttggtgccgttaatgaattcatcgctcagttacagattttagagttgcttgacaatgctattttcacggctggctacaaagctgtgttgcatatccactctgttgtcgaagagtgtgagattgttgaactcatagaggaaattgacatgaagaaaaagaaaggagatccgaagaagaaaaaaccaaagaggaagcctctttttgtgaagaatggtgcaattgttgtttgccgcattcaggtgaataacttgatatgcatagagaagttctctgatttcccacagcttggaaggtttacacttagaactgaagttttctttgggagaagtgagattagttgagcataggttttttccgagcccggcttgagaatggtctatgccttaatggtttaggcaacaagcctgtttagattggttccataatgttacatctctggttacatgtgaggtataatcagtatggatgagtgttccaaccttaatgcactgccaaattgtggtggcatttttgcgtacaatgctgtaactgtacagttgtgtgtgaagtcaaatgggcaggctgcattactcggatgtgcagcgtcgtgtcacacctggttttaagggtaaaaccgaatgcataacatatgtgtgctaggatctattttaacatatatgttgacatcatgagtgtaatatatctaaagaacaatgcataaaagcgtaaataaagattatattaacata

SEQ ID NO: 20745 - DNA, 3089 bp, Zea Mays
ccacgccgattccgataccgattccgatagaaaattccgaaaaccgattccgttttcgaaaaataccgttaccgatgaatccgaccgaaaaatttcgaaatcggtttccggaataccgaaaaattccgaaaccgttttcatccctacatagaagtactgaaactagacccgacctcgcccagggcagcaactaagcccatactaccgatctccttagctcctgctaaaacccagcaaacacactcatctgagaaacatctaagaatcctgggcaatgaaggagactccccatgaaacactgctctgtttctctgaagccataggcaccaagcccccaggatgatcagagagttaagtcctttttcccttgtcttggtaactctaaggcacacctttccccaccattctgaaaagtttccctcatcagcagccggagtgagatgccccaagccaatagcagcaagaattgtatgccaaaattgccgggcaaaaatgcacgcagtaaggaggtggtaatggacagcgggtttcactgtatgcagacgatgtcgtgttatttctacaacctgaagagaatgagttaaatctggtcaaagaaatcctgagaattttttgtgaagcctccggcctgatcacaaacatcggtaagtgctcaatgacccctattcagtgtaatgcccatcatattgaaacagcccagagtattctgccttgcaatgtgatatccttcccgtgcaaatatttgggtctaccactataagtacgtaaactttccaagcatgatttccttgagctcatcgataaagtggttgatagacttctggggtggaagggcacaatggtcaacctggctgggagaacaactctagtaaaagcagtgttaactgctatccctatctatcacttaattgctcttcaatgtcccaagtgggtcatcaaggccattgataaaatttggagagggtttctttggaaaggccgtaaagatgtcaaaggaggccactgtatggtcagttgggcaaaggtttgcaaaccattgaccttagaaggctaggtctgcacaatttagaggtccttggttgggatcttaatatgaggtggctttggatgaagaaaactcaaccgaatcctatgtgggctgatgtgaaaattagagtacacccaaatgctacagccagggttgcatgtccagtggtttctttggcaggagacgggtcccaaacctcctttggacggatcgctggctccatggacaggctctgcgtgacttggctccgatccttgtctctcgggttccgaacagatttctccatagtagaacagtaaaggatgccttgactgaaaatggctgggtaaatgatatctcaggaagcatatcagctcaatttctatctgagtacttcatggtctgggacctgattcaaggcttccaacttcacccaggagtttcagaccaacaccgctggaccccttctgcctcaggggaatactcctctaaatctgcttatcatcgtttctttgaggggatggtcacctttgaaccggcagcaagggtctggaaaagttgggcacctccaagatgtaaattttttatctggctggcttctttaaatcgctgctggacagcggatcgattggctcgtcgaggtttggaccatcccacaaaatgccttctttgtgatcagaaagaagaaaccatgcaactcattatgttacaatgtgtttttgctagggatgtttggtttcataccctgtctcttattgggctgcagcacctcactccaggaactgtggaatctagttttcaagactgatggcataggtcaggaacgacagttcaaaaggaacaaaagaaaagattcaattcagccgtgatcctagtggcctggtggttgtggaaacacagaaactcttgtctttgatggggctactccgaacatctcttagatacataggttctggtctcctagatgaacaggacgactagtaaacgaccaggtaatgttcatcatcatcatattcatcatcatcactttcatagcatgtagtgttgacaactttcctcctagggcaattgctggatatatgcccttcttcaccacacttgtagcatttgacaataacttggtatctctttgccctgcccttctttgctgtttgattgtgtttaggtcgctttgcttttgattgagtagttttattatccatcttgctaggatagccctttgaggtgctctccatgtgagagtgtgaaggagatttgcttatcttcttttttttttcttgaacgcgcaggagagatgcgcatcattaaattaagagaagaaaagagttcaaaatggaccaaagtacaacgccaaaaaggcagaataccagaccaccaaactcctgctgtgcacagaaccccagcctcctgcgtatgaaaacagcaggacacaaaaggaggcaaacagcaaaagtgccagcaggctccacacacacacacctgcactacactactcactcagaagacccatggacctaacaatggcagcacctaggcccaagccctcaagatgttgggcaccggctagaccccaacactctaactcatccaagaaaactctcttaattccgcttatggaaggtctgactgttatgaccgacagcctagccgccctaaaaaaatcagttagtttgtttagatggataagtatcagttagtttgtttagatggataagcatcagtcagtttttttagatggatagggataaagagtttgtttatatagataaggatttggtttgttaagatattagataaggacgactgctatctcagccctataaatgtacccctccaatcaatctctactacttattaaggctgcaagagtagtctgtcattccgtattctgtcaccattcctgttctgccattcccgttctgccaccattcccgtttctcattctcatgttctgtcatcattctatgttctgtcattctcattcccctctccccgcaaagctcattctcattcccccgtacagcccacgtctagctaaaatttaaaaaaagcacatgtcctcaaggggatttgaacccgtgac

SEQ ID NO: 20746 - DNA, 1838 bp, Zea Mays
ggtattggtccgaccaaggcaaagcttacccatgacgaggcatgtggccagttaaaaggtcctcaatcatcaagcctacatcgacacggtccttaatcgactcagacggagacactacatcgaaactctcttctcacgcaagtcacctgctcggtctcagctttattatttaaaacccaaaaattggtacctagcagaggtacatctttttagatgttgaacccatcacagccgtgatggatccaccatcataagtcttttctttgtaaaaattctcatccaccgtgaagcatcaccttttgttttaaaacaaaacattttgtttttataaagcaaggctaagcatcataaaaatccttttcataaaagggagtcaaggaatgatgatcaattttccaaggaaggaaacacatcaactatttagcacacaaaccctatcacctaatgcgacatataaggtgataaagattttaaaacacaaggaaagggataatgcaccggggcttgcctggaataacactagattagtgttgttagacgtcgatcacttggcgaccatcctttgtcttgtcactcgttcagtctgtccatcttcaggttcgtccatcagcttcaccatgcggagtagtccacccgttacgtcatcttggggtcgactcagctctggtcctccgcgtcatgtggttaattaatgtaccaaaataatttgcataatgcacatgaatgcatataaacaagaatagtacaagactaaatattgctacactgaagatgattaaatatttagtgtcgaggcattactacactcaaacaacgctagatattactataccactagatataacaatcatgttcctttagcttaacccgatctaactcaatctttaagaaatgataactatgtgtaagctctacgtgtcttagttaaagttaaatgctaaaaacataataattctaaactcagtggtctaagaaatttaaatctagaacaagaacaaaagcacatcacttcctagaccacgcgaccggattaaattacataccactccaagctatcatatatagcataccatttaataaaacatcacaatattcctagatcaagtaggcagagtgccgtcaaacattacatattcaattagccatcaacatctatttacgaccgctatcccaccactagacatagcatataatgactactagcaagcattaatttcctcaaataaaataaatcggcacaacaacattgttagaacctataagctagccggataaaatactcaatctatcttttatattattaatccactcacgctatgtatgtaagtctgccaacacattcttcatctaactcgcatttctaacttagattccacacgcctatgaagcgttacttcacaaacacgaacctaaccaaatcacaatatacaatgaagcattttaataaacaattaatacaaccacaacgcacggttgctaccatccagagaactaacgcatctaatatagctaactaatccaatccttgaaccaatagtaggaactagcgaatcagtgtactattactagtcgatacaaaattcatgagaatgatgatgatcccggttcaaaccatccatcaagcacttagcgcgggatgaacaatgtccttctcgtcgtcgcccagcagctagaattccacttctatcatcaaccccataacatcacacaacacaacgacatgacaacggatctagccataactaccaagcgcatacctactaaataaaatgatcatcgcactaacccattaatttatttaattatcgaataacgcatccgctcaccatgaccaaaaa

SEQ ID NO: 20747 - DNA, 3430 bp, Zea Mays
gctatgcatgtgcaccagataacttaacaggatctgtccgagtgccccaaggacctcagataaaccacttacaaccaggatcacaggattaagtaaacacaaatcacacaccaacattttgcagcggaaatcttatttccaaattttacaagttacatcaagtttacaatgtacatgatcggagtgattacaaaagtgattcaaggaaataactttgaactgttataaattatttgtagttttgaaatatatatgctagcttaagtgaccatactcaataagaagtatagaagaagtacttaaacttatagaaggtcgtgcccaccggcgcttaacaccaatcacaatcaagtgactcgtaacctgcagcaaaaatgggaataaaaccctaagtacgcaagtactcaacaagacttacccgactaaagaaaagactctcaagggtatgctggttagaggcagtcaaggtaaagcttgtcaagaatcaatgactcttttgcagaaaagcttactatgggtggatccttaaaaatccatttttacttgtcaggttatgtaaagttacctacatctagagttcttcctattctagttcaagcacttggcctatactagctgtcttttatcaacccttcagttcactggatttctatgtgtaagtcagtgaccaagtcttcatatccgagaagtagcggcgatccgaatcgattcatactcaactgaggatctccaatcacacgacatatggagcacttaacccttgcatatgtcaactcgccaccgggtttcttaagactagactgggttcacgccaaccgagagcacaaatacaccaccgtccagcctcttgccacggagggtacacgctactctcgccatctctccactctcattgcgtgttggcctttctagtattagtccgcccgaggcaaagcttacccatgatgaggcatgtgaccagttaaagggtcctcggtcagtaggcccacatcgagacggtccttaatcgaatcagacggagacactacaccgacactcccttctcgtgcaagtcaaccgcccggtctcgttttaatcatttaaaccccaaagtttggtaccaggtagaggtacatcttttccgatgttgaacccatcacggccatgatggatccaccatcaagttttatttttgaaaacattcccacccactgaagcatcacttttattttaaaacaaaatattttttttgtttgataaagcaaggctaagcatcataaaattcttttcaaaaagggtatcaaggaaggataatcaattttccaaggaaggaaatgcagcaattgtctggcacacaactcctatcacctaatgcatcaaacaaggtgataaagattttaaaacagcaaggaggtggcaaatgcaccggggcttgcctggataacactacgttagtgtttgttagacgtcgatcacttgacgaccatcctttgtcttggcacttgtttagattatccatcttcaggttaatccatcagcatcatcttgtggaaaagctcacgcttaacattatcttatggttgactcagctctggttttccacatcatgtgtttaattatcgtacctaaatgagatgcattatgcacatgaatgcataaggactagaacgataataaacaattctatagggtagagaattaaacacttaacggataggcacagtacatcactcatacgagaacactggttatcgacatacgactaagcgcgataatcacgcttctctaaattaaacgaacctaacgcaaacatcacgaacaacaaactatacacatttaatacaattagcctaaacacaactcatcagctaattgattaaatgctaaacttatccctcgctttataaattataccactttgcttacaaagaactaatttaattttatttcgcaccacacatatttatttaatctatctaacaattcggctaacaaacttagtctaagacacctaattttgggaataagcataggagcacatcaactttctaaaccacctgaccggacgactttgcataacctgccagctaattaaaatgtctactagcaaagcattaatttatttaagcaaactaaattggtacgacaacatcgtcacacaatgtgcctatgctaacgacaagaaaaatcattgtggctatataactatccaattcaattaactgaaataatatattggctcaccacgatcgaatcgatttgataactgcgagggcgacgacggctctcagtttagacatccggtcgagctcctagcaattgttgcacggacttttctcacattttcatgcaactccaggatcagtctcctggagataaggttgacgacgagttccgtggagtgaacgacaacgttgttgtacccacgacgtggagatgaatgacggcaactccacaacttcttcacgagcacgacaaggacatagggcgcggcgactatgcttcactggcgagaaacgtcatggcgagctagttgacgggagcaacaaactatggatttgaagctcggacaaggaaaccatggtctaaacgacacggacaaaggacgagtgccggggctgtcaattcatcgcacggccggatgatgacgatgaacagccgagcacggtaaggagctgaaaaatgacgacgggtctagcagaggagctcgcgcgatgacaaccaaacagtgaagctcatgcgcacagtaaggaatacgagcgatgacggctatgtaaggagtgccaagttgaggagggcgggattcgacggctcgatgtcgcccgtggccgagcacacaaggcgaccagcgcacgtgacgaggagaccaccggtgaaggaacttggctggcaaatcgcgcgcatcagcggagcctagcagcaacgaccaacccccacaacaaggaaaggggacggcgagctcggatcggcgtgacgggaacgaaaaccgggcgcggggacacgcagaccgaacgacgcgagaaagagatgaagcaatagaccgcggtgagcttggggcggggaatgagcatgcagccaaggaaccgagctcagcagggagatgaagacgcgagggagagctgagggatagagaagatagctgggcgcgggagaacgcgcgcgcagggagccacggggtcggctgagcgggaacgcggtagagaggagcgtggcgcggagggagatggagcagggagggcgcgcgcgccattggagggagcaggagatggccgacgttgagggcagggccgagctcggtggccatggcgagctgggcgcggctagaccaaatccgatctggagctcgcggcgccggaggagcaggggaaaagctgcgtgcggggaagaaggtctcgtcacggcggccatggccggacagagagcagagcaggggcgcgggcctggagatggc

SEQ ID NO: 20748 - DNA, 1367 bp, Zea Mays
gaccgaaccgttgaattgcaatttccgctagaaagccgacgagacaatttcttccgttcgtttcagatcgggcggtggtcctgaccaaggcgctgccggccactggcctctcgcaaccggcgaccgcatctcgaagtagagggtgctggccgccgctctcggaagcgctctggaaggacacggccatggcgatgcgggccgctgcgcgtcaagccatactctctccaccgcttgggccccgcagtcctcgccccttcctctgtggttgttccttgtctatcgctcctcggttggagccgtgccgagcggcgagctccaccaccgcgccggccgccggaaagcatctccctccattgttcagcgtcgcgccgatgatggactggacggacaaccactatcggacgctcgcgcggcttatctcgcggcatgcctggctttatactgagatggtcgtcgccgagaccatcgtgcatcagaaggataacctggtttctagcatttccggaggaacaacatcctattgtgctgcagattggtggaagtaaccttgaaaatttagcaaaagcaacagaactggcaaatgattattcatatgatgagatcaacctaaactgtggctgtccaagcggcaaagttgctggtcatggttgctttggtgctcgcttaatgtttgatccagagtttgtaggagatgccatgtcaactatcgcagctaattgtgatgtcccagttagtgttaaatgcagaattggtgttgacgatcgtgattcttatgaagaactatgtgaatttgtagataaagttatctcaaaatctccaaccaggcatttcattattcatgctcggaaggcattgcttagtggtctcagtcccgcagagaatcggaagattcctccattgaagttagtgcatccatgagacaaggtgcacacggagttatggttggccgggctgcttataacaatccatggaacatgctaggacatgtggatggggaaatctatggcaagcaaacaagatacatttctcgtcgccagatacttgagaactaccaagcttatggtgattcaataattgaccagtatggccccagcaggccaaatgtgagacaacttgtcaagccactgttaaacttattccactcagaacctggcaacagcctatggaaacgcaaagctgactctgcattgcgtcattgcaaggagtgctacacatcctttctgtaagaaaaaaaactcggccggggagggaaagaccaccatctcggtattatattaagaaaagaccgaaacaatggtcccggccgagaaaatccccgaaccctgacccatcactaacgggccggcatcaactgtccactctacaac

SEQ ID NO: 20749 - DNA, 1454 bp, Zea Mays
gaccgaaccgttgaattgcaatttccgctagaaagccgacgagacaatttcttccgttcgtttcagatcgggcggtggtcctgaccaaggcgctgccggccactggcctctcgcaaccggcgaccgcatctcgaagtagagggtgctggccgccgctctcggaagcgctctggaaggacacggccatggcgatgcgggccgctgcgcgtcaagccatactctctccaccgcttgggccccgcagtcctcgccccttcctctgtggttgttccttgtctatcgctcctcggttggagccgtgccgagcggcgagctccaccaccgcgccggccgccggaaagcatctccctccattgttcagcgtcgcgccgatgatggactggacggacaaccactatcggacgctcgcgcggcttatctcgcggcatgcctggctttatactgagatggtcgtcgccgagaccatcgtgcatcagaaggataacctggataggtttctagcatttccggaggaacaacatcctattgtgctgcagattggtggaagtaaccttgaaaatttagcaaaagcaacagaactggcaaatgattattcatatgatgagatcaacctaaactgtggctgtccaagcggcaaagttgctggtcatggttgctttggtgctcgcttaatgtttgatccagagtttgtaggagatgccatgtcaactatcgcagctaattgtgatgtcccagttagtgttaaatgcagaattggtgttgacgatcgtgattcttatgaagaactatgtgaatttgtagataaagttatctcaaaatctccaaccaggcatttcattattcatgctcggaaggcattgcttagtggtctcagtcccgcagagaatcggaagattcctccattgaaatatgagtactattttgctttgttgcgggacttcccagaaataaaatttactctaaatggtggcataaccaatgttagtcaagttagtgcatccatgagacaaggtgcacacggagttatggttggccgggctgcttataacaatccatggaacatgctaggacatgtggatggggaaatctatggcaagcaaacaagatacatttctcgtcgccagatacttgagaactaccaagcttatggtgattcaataattgaccagtatggccccagcaggccaaatgtgagacaacttgtcaagccactgttaaacttattccactcagaacctggcaacagcctatggaaacgcaaagctgactctgcattgcgtcattgcaaggagtgctacacatcctttctgtaagaaaaaaaactcggccggggagggaaagaccaccatctcggtattatattaagaaaagaccgaaacaatggtcccggccgagaaaatccccgaaccctgacccatcactaacgggccggcatcaactgtccactctacaac

SEQ ID NO: 20750 - DNA, 1449 bp, Zea Mays
gaccgaaccgttgaattgcaatttccgctagaaagccgacgagacaatttcttccgttcgtttcagatcgggcggtggtcctgaccaaggcgctgccggccactggcctctcgcaaccggcgaccgcatctcgaagtagagggtgctggccgccgctctcggaagcgctctggaaggacacggccatggcgatgcgggccgctgcgcgtcaagccatactctctccaccgcttgggccccgcagtcctcgccccttcctctgtggttgttccttgtctatcgctcctcggttggagccgtgccgagcggcgagctccaccaccgcgccggccgccggaaagcatctccctccattgttcagcgtcgcgccgatgatggactggacggacaaccactatcggacgctcgcgcggcttatctcgcggcatgcctggctttatactgagatggtcgtcgccgagaccatcgtgcatcagaaggataacctggataggtttctagcatttccggaggaacaacatcctattgtgctgcagattggtggaagtaaccttgaaaatttagcaaaagcaacagaactggcaaatgattattcatatgatgagatcaacctaaagtaacactcatttgtacctcatgtaatcatgcagtgctttctattttcgaatagtttacatgttacttttgtgacagctgtggctgtccaagcggcaaagttgctggtcatggttgctttggtgctcgcttaatgtttgatccagagtttgtaggagatgccatgtcaactatcgcagctaattgtgatgtcccagttagtgttaaatgcagaattggtgttgacgatcgtgattcttatgaagaactatgtgaatttgtagataaagttatctcaaaatctccaaccaggcatttcattattcatgctcggaaggcattgcttagtggtctcagtcccgcagagaatcggaagattcctccattgaagttagtgcatccatgagacaaggtgcacacggagttatggttggccgggctgcttataacaatccatggaacatgctaggacatgtggatggggaaatctatggcaagcaaacaagatacatttctcgtcgccagatacttgagaactaccaagcttatggtgattcaataattgaccagtatggccccagcaggccaaatgtgagacaacttgtcaagccactgttaaacttattccactcagaacctggcaacagcctatggaaacgcaaagctgactctgcattgcgtcattgcaaggagtgctacacatcctttctgtaagaaaaaaaactcggccggggagggaaagaccaccatctcggtattatattaagaaaagaccgaaacaatggtcccggccgagaaaatccccgaaccctgacccatcactaacgggccggcatcaactgtccactctacaac

SEQ ID NO: 20751 - DNA, 1718 bp, Zea Mays
gaccgaaccgttgaattgcaatttccgctagaaagccgacgagacaatttcttccgttcgtttcagatcgggcggtggtcctgaccaaggcgctgccggccactggcctctcgcaaccggcgaccgcatctcgaagtagagggtgctggccgccgctctcggaagcgctctggaaggacacggccatggcgatgcgggccgctgcgcgtcaagccatactctctccaccgcttgggccccgcagtcctcgccccttcctctgtggttgttccttgtctatcgctcctcggttggagccgtgccgagcggcgagctccaccaccgcgccggccgccggaaagcatctccctccattgttcagcgtcgcgccgatgatggactggacggacaaccactatcggacgctcgcgcggcttatctcgcggcatgcctggctttatactgagatggtcgtcgccgagaccatcgtgcatcagaaggataacctggataggtttctagcatttccggaggaacaacatcctattgtgctgcagattggtggaagtaaccttgaaaatttagcaaaagcaacagaactggcaaatgattattcatatgatgagatcaacctaaactgtggctgtccaagcggcaaagttgctggtcatggttgctttggtgctcgcttaatgtttgatccagaggagatgccatgtcaactatcgcagctaattgtgatgtcccagttagtgttaaatgcagaattggtgttgacgatcgtgattcttatgaagaactatgtgaatttgtagataaagttatctcaaaatctccaaccaggcatttcattattcatgctcggaaggcattgcttagtggtctcagtcccgcagagaatcggaagattcctccattgaaatatgagtactattttgctttgttgcgggacttcccagaaataaaatttactctaaatggtggcataaccaatgttagtcaagttagtgcatccatgagacaaggtgcacacggagttatggttggccgggctgcttataacaatccatggaacatgctaggacatgtggatggggaaatctatggcaagcaaacaagatacatttctcgtcgccagatacttgagaactaccaagcttatggtgattcaataattgaccagtatggccccagcaggccaaatgtgagacaacttgtcaagccactgttaaacttattccactcagaacctggcaacagcctatggaaacgcaaagctgactctgcattgcgtcattgcaagacagtgaaaactttcttggaggagactcttgacgcaatatcggacagcgttcttgacaagccagtaaacagggaaccatccagtgacgaagaatattttgctagtgtcgattctctgttgccaccaaaatacacgacaccgatgcatgaaagacttgtagccgcatccacttgaacagcgtgtcgggaagcggattgcctgcggtactgcagggtgtagttgggtcactgcgcgtgggccctgtcgcacggggcagtgcccacgcagggggggctgtgaaaatgatctatgtaattgttgtaacacatatacgtcgccacgtcggggtatatcaatagctgtagacataaccattttgactttgcggtaaaatccttgctcatgcttgcatggaacatgtacccatttttttcatcaggattcttagccgtgaaga

SEQ ID NO: 20752 - DNA, 1759 bp, Zea Mays
gaccgaaccgttgaattgcaatttccgctagaaagccgacgagacaatttcttccgttcgtttcagatcgggcggtggtcctgaccaaggcgctgccggccactggcctctcgcaaccggcgaccgcatctcgaagtagagggtgctggccgccgctctcggaagcgctctggaaggacacggccatggcgatgcgggccgctgcgcgtcaagccatactctctccaccgcttgggccccgcagtcctcgccccttcctctgtggttgttccttgtctatcgctcctcggttggagccgtgccgagcggcgagctccaccaccgcgccggccgccggaaagcatctccctccattgttcagcgtcgcgccgatgatggactggacggacaaccactatcggacgctcgcgcggcttatctcgcggcatgcctggctttatactgagatggtcgtcgccgagaccatcgtgcatcagaaggataacctggataggtttctagcatttccggaggaacaacatcctattgtgctgcagattggtggaagtaaccttgaaaatttagcaaaagcaacagaactggcaaatgattattcatatgatgagatcaacctaaactgtggctgtccaagcggcaaagttgctggtcatggttgctttggtgctcgcttaatgtttgatccagagtttgtaggagatgccatgtcaactatcgcagctaattgtgatgtcccagttagtgttaaatgcagaattggtgttgacgatcgtgattcttatgaagaactatgtgaatttgtagataaagttatctcaaaatctccaaccaggcatttcattattcatgctcggaaggcattgcttagtggtctcagtcccgcagagaatcggaagattcctccattgaaatatgagtactattttgctttgttgcgggacttcccagaaataaaatttactctaaatggtggcataaccaatgttagtcaagttagtgcatccatgagacaaggtgcacacggagttatggttggccgggctgcttataacaatccatggaacatgctaggacatgtggatggggaaatctatggcaagcaaacaagatacatttctcgtcgccagatacttgagaactaccaagcttatggtgattcaataattgaccagtatggccccagcaggccaaatgtgagacaacttgtcaaggtaggagctacattttggtgacaaaaacacttcgccactgttaaacttattccactcagaacctggcaacagcctatggaaacgcaaagctgactctgcattgcgtcattgcaagacagtgaaaactttcttggaggagactcttgacgcaatatcggacagcgttcttgacaagccagtaaacagggaaccatccagtgacgaagaatattttgctagtgtcgattctctgttgccaccaaaatacacgacaccgatgcatgaaagacttgtagccgcatccacttgaacagcgtgtcgggaagcggattgcctgcggtactgcagggtgtagttgggtcactgcgcgtgggccctgtcgcacggggcagtgcccacgcagggggggctgtgaaaatgatctatgtaattgttgtaacacatatacgtcgccacgtcggggtatatcaatagctgtagacataaccattttgactttgcggtaaaatccttgctcatgcttgcatggaacatgtacccatttttttcatcaggattcttagccgtgaaga

SEQ ID NO: 20753 - DNA, 1720 bp, Zea Mays
gaccgaaccgttgaattgcaatttccgctagaaagccgacgagacaatttcttccgttcgtttcagatcgggcggtggtcctgaccaaggcgctgccggccactggcctctcgcaaccggcgaccgcatctcgaagtagagggtgctggccgccgctctcggaagcgctctggaaggacacggccatggcgatgcgggccgctgcgcgtcaagccatactctctccaccgcttgggccccgcagtcctcgccccttcctctgtggttgttccttgtctatcgctcctcggttggagccgtgccgagcggcgagctccaccaccgcgccggccgccggaaagcatctccctccattgttcagcgtcgcgccgatgatggactggacggacaaccactatcggacgctcgcgcggcttatctcgcggcatgcctggctttatactgagatggtcgtcgccgagaccatcgtgcatcagaaggataacctggtttctagcatttccggaggaacaacatcctattgtgctgcagattggtggaagtaaccttgaaaatttagcaaaagcaacagaactggcaaatgattattcatatgatgagatcaacctaaactgtggctgtccaagcggcaaagttgctggtcatggttgctttggtgctcgcttaatgtttgatccagagtttgtaggagatgccatgtcaactatcgcagctaattgtgatgtcccagttagtgttaaatgcagaattggtgttgacgatcgtgattcttatgaagaactatgtgaatttgtagataaagttatctcaaaatctccaaccaggcatttcattattcatgctcggaaggcattgcttagtggtctcagtcccgcagagaatcggaagattcctccattgaaatatgagtactattttgctttgttgcgggacttcccagaaataaaatttactctaaatggtggcataaccaatgttagtcaagttagtgcatccatgagacaaggtgcacacggagttatggttggccgggctgcttataacaatccatggaacatgctaggacatgtggatggggaaatctatggcaagcaaacaagatacatttctcgtcgccagatacttgagaactaccaagcttatggtgattcaataattgaccagtatggccccagcaggccaaatgtgagacaacttgtcaagccactgttaaacttattccactcagaacctggcaacagcctatggaaacgcaaagctgactctgcattgcgtcattgcaagacagtgaaaactttcttggaggagactcttgacgcaatatcggacagcgttcttgacaagccagtaaacagggaaccatccagtgacgaagaatattttgctagtgtcgattctctgttgccaccaaaatacacgacaccgatgcatgaaagacttgtagccgcatccacttgaacagcgtgtcgggaagcggattgcctgcggtactgcagggtgtagttgggtcactgcgcgtgggccctgtcgcacggggcagtgcccacgcagggggggctgtgaaaatgatctatgtaattgttgtaacacatatacgtcgccacgtcggggtatatcaatagctgtagacataaccattttgactttgcggtaaaatccttgctcatgcttgcatggaacatgtacccatttttttcatcaggattcttagccgtgaaga

SEQ ID NO: 20754 - DNA, 5111 bp, Zea Mays
cagaagtgttgtttagtagaattccggggtgtttgtggaccccggggtgttacacagcaggagctcgagggcaaggccagtgaggccgccctcgccgaggagaacctcaaggcgaagggagagtccttagataggcgagagatggacctcgctaggtgggagacggatctcggcttcagggaggaaatgctcacgcagcgaggcgagctgctagccgagcacgagctcgaggcagagaagaaagaaaaggagttggaggagcaggtccgctagttcaacgcggcacaggcggcgtagggttcccaagaggtggaggccaccaggaaggcccttgaagatctccagacggagcaccgcagcggggtccagcgcatcgccgcgtcggccggcgaggcgagcacggcactggtgccgctagggataagccccatcccggtgtcggagctgcctgcgtcgatctctgaggcgctcctggtgctggactccgccgctaatcgcctccaacacctggaccagatcctcggcgcccgcctagaggtagagggcagcaagctctgctgggcggtgattgagtatatcttgacatgcttccgaagtcacgacccgaccatatctttggagctggtgatcgctggtccggtggccaccactgaagacgccgcccgagagagcgtacaagacgccatggagctggtgggcgagcgcttccagcgcgaccctactgatgacgagtagccgaatctgcatagacaagacaagggtccctctagggagcggtttgtaataacctttggtggtgtaacatacttttgagaaccattaatcaagcagtattagcacttatcttgtatgttatttgtcctcgctgtgtgtagcgttaccaacctcccctggtacttggcccccctgggatgtaggctcgatgtgtcgaggctggataccagtatacctaagagaaaattggttgcccggtccctatggggtagtctctacggtttgagactacctgcgtctggattgggacctggacctgcacacagcttcggttttgaagtgttaggggcacacccataggacccatcgtctggtatctgccatcctttgattcatgcaacaggacctgcaggatttaacttgggaagccaagccgtatgcccggacccacaggatcacaactccaaatactagagtacccgttgcagagtggtggaggtgcaggcttagggtacggaaccaggctaagcggctacacagctccggaccactccaggaaaacgagcgcccattctctagaaaccggacccacaagttgctggaccccctgtagcagtaaaggggtcctgaactgcaagcttggcttactcaattcaaatgtcatcataccagcaagggtgggaactgtatgggtgggttagataaaaaataatatctgaaactgtagcagaataaaaccatcacaaaagcacatctgaggggtaaatctcttccttataacttgatatacatgggtgtagaccaagaggccaggtttacgagggcggacctcaccggattgacatacacatatgcgcaacccagttacaaaggaagaaaaactcaatcccccagttttgcttctatgggtagaacttatggagatgctctatgttccagggattgggaagagacactccttcagttgtggcaaggcggacacacctgggtcggcatattcccgtcacattgaagggtccttcccaattgggggagagtttgtggagcccttctcggttcagtactcgccttaggactaggtccccgaccctgagctccctactatgcacgaaccgttggtggtagcgcctgagtgcttggttgtactgtgcatttcggatcgtcgctcgccatctgtgttcgtcgatgaagtccacgtcctcacgccgtagctgttcctgcatagactcatcgaaagattggacccgtggggagcccataataatttccgggggaagacaggcttcggccccgtagaccaggaagaacgggatctccccggttgctcggctgggtgtggtccgtgtggcagaacctcccaaggtatcgggcccacatgcacctgtcctcgtctcaaagacctcagacggcatgcatgtgcaccagataacttaacaggatccgtccgattgccccaaggacatcggataaaccacttacaaccagaaccgcaggattaagtaacaaaaaaaatcacacacacaatattttagcagccgaaatcttattaccaaattttacaggttacaaaaattttacaatattttatcggagtgattacaagagtataagtttgaaatatatgctagctcaaatgaccatcctcagtaagaagataaagactgggtatacttatataagaaggccgagcccaccggcacttaacaccatcacagcagcacaaagttatatcctgaaaaacaacagggaataaaaccctgagtatggaattactcagcaagacttacccgactaaagaaaagactctcaaggatatgctggatttgggaatcaaggagaggctttagcaagaatcaacttagatactttcgcagaaatagcttactaaagtgagtccttactttcaatattttaacgctagattaaatattaatagactctgtttgcatctagtctaatttcaccatctcatcaatacaacatcatttttattcatgaggttcacatcctgacttaggttgcaggtcggagatcaagtctccactctccggggatataacggcgatccgaatcgatttactcagctgaggatctctaaccacacaacatatgtagcacttaacccttgcatatgtcaaccgttcccacagatcctccacaacgtgaaccggtccgcgctacccgggagcacagtactcctccatccaacctctagccagaagggtacacgctactcccaccatctcccacgcccagtgcgcggttgtcttttcacgtatggaatagccgggttcaagcttaccctgtcccatttccagggcatgtggctagttaagatagtccttgatcaacaggcctacatacgcatccaatccttaattgacccggacggaacatcacctgttcctagcccaagtcccgatttaagtacttccacccttaggattgtttgtgttcctaaggatgaaaagagcatcacagggaactttacagtaagatcccaccattgctcctaatgaaaatattcttgcaggcagaagccatccttcctcaggataacccctgacctaggcattaacgcaaaggacaacctctatccacaagatttacctctaagcaaggctaagcaattttgtaaaccatattttgatacttcatcagaagtatctataaaggtatggatatcaaggtaggcaatgcatcaaagggtttccaagcaactcctataaacctaatgcacatttcactagacttaaagtgtgcaaaaattatttaaaaacacaaagaagtggttgcatgcaccggggcttgcctttgttgcaatgaagtggttctagatccctctatccaatacccagttagatggcttcatccacttgaggagcaggcattggagtagacttctttaaataccacctcgtctaggtgttctacaagtcaattacaaatgcatgaatgcttatctaatgacatgtaatgcaaactctcacaaggagaggtggggaacagaaacactacaactaaagcacatgacaagaatgcacctatttcttaacgctcgattaaagtgaccaatttgaattcacttagataaaccagggaactaatccaacttatatctcatccaaaaccttaaaacttcttaagcaactttatctcttccctagataaacttatctcctttccaaagcactaacccacactgaactgctattacagctaactgaataaaattcagtcagagtcaatctggcagtccagttttggacagctgttatttcctactttatgtggattcaagcctaacttgcttaaagggatttgttccttataacatggtctttcactttgctataacattcctaccccaattcttcttggattaattaccacaaggacccaaattgaataaaaacacacaaattcagacttaaatattattctaagtctgaatcctaacacctgacagtccaccttttggccacttttacttccaaatttatgtggaaccaagtccacctcactttataaaacttgctctctttactatggtctccagctttgctatggaaactttaatccaataccccatgaatcagtcacaaatgaattccaaactaggcatcctgctgcaattcagttttcagaaatgaataaaaattctgttatgtgtccagccagacagacaaactttagccaacccttttctccaatttttacaaagcaacagaccaaactcacataaccaaagttattccttagatatagctctactactttggtatagtacccctaggttgaaaacattcagaacaatttttatgaagcaccaaaatagagctcaacacactagaacctagtttcagccttctgcactaagtctgggatccaaaaatccaacagcctatttttttgagcgaattttacacctagttcccagcaacagacagtggtagagtacaagtagtaaatggtgtgagcttcactgacctaaggagaacacgaaacttgcactgtacagctggggaatcgcttgtgattgcttgaccgcggcgaggtgggcacttggatgaccctggtcaccacacaggaggttgacactcagctcaggaacaacttaactctacagtaagggagaggactaacactggctggaacaccagaacaacttcacccttgcagtggttattggttagagctcgatgggcaaggagtattctttactggaccatgccctataaatacttgaatatggggcaaggtgttcctgacatgtttgacatgcagctaaggtgtcctcgcatggtgccagcaacatatcagctagcctacgtggctcacatgccctcatacaacaccagcacccagccctaatttaaacattgaacctggtcaac

SEQ ID NO: 20755 - DNA, 1640 bp, Zea Mays
caccaatagccggggctgcatagggatcaacggaatcaatccatccatcgcccccatacggcactgctaccgcgcgcgacattaactccgcgcattcaagtctcccactgcgctccaactacctcacctcacccctccccataaatgcactgtatcacccctgccttcctgctagttctccagagagagccgggagaacttggctgtctgccctgtctgcaagtacctcgtcttcttcctggagagaaaaagcagaagacaatacaaagatgtccaagatggcggaggagaaggcggcggcagtgggcggactcggaggagccggggcggcggacgcggcgcagcagcagcagctggcagcaggggaggccgcggcggcgcgggtgcggcccgtggagacgctgcttcgcgcggcaccgctggggctctgcgtggccgccatgaccgtcatgctccgtaaccagcagagcaacgagtacggcgccgtcgcctactccgacctgggaggcttcaagtacctcgtctacgccaacggcctctgcgctgcctactcgctggtatccgcgttctacactgccgtgccgaggcctgccaccgtgtcgcgctcctggctcgtcttcctcctcgaccaggtcggttcttgcctcccgtctctgctctgctctactcacactttttcacacggttctagtagcaagttgagaatgctccaaagaatcttttttttttctttttctgccaacatcacgtgacgaattttacgagtaatatgacggtacaaaagtttattcttcatgtgttcgttatatttttgttgttgtgacctactcctacaataatcaaggctggattactttgatgatgttggaggatctgttcgttctacaaaactcatgcgaaactcgtgactgaagaaacaaattaacacatggaaagaaattagctctggcagagactgtatggcagcttatgcgttggatttgttttatttctacatccattttttttcttgcttcagtgtttcagcaattaaaaaaattacataactcatataaagcaattataatatgtcgatctatatagtatacataattcataaagttacatgatttatgaaaaattacataatacatatcttaaatagttcttctgaactcttctgagctagattatgaagatacatttatatagtatagttataatatatggtggtttagtataattataatatatggtggtttagtttatagtttttgttatagaggtatatctatgcttttaaatgtttatttatatttggtagttctagtgatctaattgtgaaaaaagtttgtgtggtaggccacgtgctgcatacttgcatatttgtgctatggtcaaattttttagttttcatagaataagtatgacttagtacatgatttaaattggttgaggcttattaaacagtgtatagttaaaataaatatgcaaaaaagaaaaaatgtaactaaggcttagtaaaaaaatacgtatgtaaaaaagaaaaaatatggttccgtacaaatattgatatgtcttataaatatttaacatgactatgttattatagaaagacttttagacttaaactcacatattttattgtaaaaaaaattaat

SEQ ID NO: 20756 - DNA, 1460 bp, Zea Mays
aacttccgaaaaagcggacagagaaaaagaatagatgctcgaaatgttcattcctacccgtcggcaatggcctctcactcgccgtctcactcctctcgcactagcgctcgcttctcccaaaccctagctcctcctccgtagctctcagctccagctccagctccggcgatggcctccgtcccgcactcgccgccggtgatccgcaagtcgggcaacctaatggtgttcgtcacgccaccggcggagcccgagagcccgaggtccgagttctctacgcccccgacgagtccccgcgccgaggaatcccctgaatcgccgccggcgcagatggcccctccgcccacgcctatttattcggtttcggtctccacgccgccacttgtcaagacggtctctccgccacttcatgcggagaagctctcccgaccctcgctggtccaggtaccgccgccgcttgtcaaaacggtgtctccacctcttcccgcggagaagctctcccgacccccacttgtccaggtgccgccgttgcagttcgcgaaggtgtcggcagggtcggacggatcgctgctagcgttcttctgggacgcggttgcacacgtgcaaaaaggtgatgtggaagagaatccttgttcaacgctctgatttattttattttaatgtttgtgactttgaattttgatctgtgagcaaaatattttcctggtttagcacactcgaggttggacaagcacatctcgagatggttcgggctggaccagtccaagtaccagtgggcgctcaacgactattttgagaggaccggacagattcgagcacgctggagcacagttgtaaaaattcagaaagcatgacaaagtgaattatttatacctttatgtgtgtaactaagctgatgccgtgtcaagctgcatataccttttggtttcatgaagattgaggcctccttttctgcatacggaagcgcttggttgtaacaaatccatctgttagcagcttcactgtagttccgttgttgataaagaaaaaaaacctagttcctacttttttaatcgctttcacaacagctactctgccccgttgaaattactgtcttttcctcctggaccatccactggtgcatcgacagatttccatgggataaattcctcgacaacgacggggatggaagaaaaagcttcaccgacatgactagtttggcagtgaggagagaaaaatcctttggaaaccaatccatggattttagatgtcaccttattttcggatagaatctcccctcttcggtgtactctcctcttcggtgtactctcctctcggtgtacttatttaacattgtttgggaagcaataagctaaatgcccctcttgaacaaaaaatacataaaaaattagaaaaaatcaaagaaaacaagaaatctttcgaaaactcatgaataataaaacattagtaaaaatgcaaaaaat

SEQ ID NO: 20757 - DNA, 2382 bp, Zea Mays
attctattctgcacacttaacaaaaccgcctagattggattcgtccccaattctctgcctccgccgccaggacgacggcaaatccgcccacgcaaaatatcagcccaagtgcccatcgcccaagcttcctagctcacccgccgccacccactagccaaattccccatccctctcctgccgccacccatcagccacatctctccctcctactccctctccggcagccatcatcagacaagatccctcccccaccatcgagccatgtcgagtcgagtgcatcttctgcaagcacggccatcttacgaaaccctagctggctcgaaggaccactactgtccggcgccctgaacaacttggcatgatgccgacgaagggtggagcaaacaaatcacaatgacatcgggtagtagatccaccattgcatccctatgaagaggagcgccttagacaatgtatgaggaacaattcgaggttgcaacaacttggaattcctgctttagtcagcatgtgtgggaacataaattccatctctaggaacaaaaagccaaataacagggataatgaagattctgaatctgagtatgatccttcacatgacgattctattgaaggggatttgtttgaccatgatgatcataataagaagggctcaaaggacactaacagaagaactattcacatggctcctggtggaatcaagcctcgaactaagagagtttatgcagagcaacatactactagaaatacaaggtcaaagaaaagcattgctcagcctgacacaagtctaacacgaagtgacatctatgtgccaccaccctcgctatctcatttgacccaagttggagaagttgctcgtagcattgaaaaccatagaaagactagtgttgaagctaatggccctacccaggttgacaacacccacatggccaatcgagaagatggctttgaccaatttgatgacaacatgaccaaccaaggggaaggcattacccagcctggtggaaaaggagtaaatcagcatagagaaaggggacttaatatgggacttggtctccaaaggatgaaccgagctcggcgtggcaaactgccaattgtcattactgaaggaaggataaggcctgtggcaccaattgttgctgcaaagtttgcaactgagtgcaacattgcagttcggaatcatgtgcttgtgcttaagtcatggaaggaatacgagaagcatcctgggctctttaaattgtttacagcaaaacttagtgcaaagtttgatatcaatacagaagatgcgctagttaaaaatgcttgtttccaaatgatgaggaatgcactgcgccaacaacgatataagctgaagaaacaatattttgacccttttccgctacatctagtgaggaaaacatctcctatcaaatcgacaagtgatgaacaatggaatgaccttgtggaacattggaaaggtccaaaaaatatggcgacatgtgaacataacaaaggcaaccgaggcaaagttaagttccatcaaacaactggatctcgtagctatatggttcatgtagaaaatttgggggacaagtacatggatcaagaacctgatgcattggatctgttcaaggagtgccactacagtaagaaaaagcaaggctacacttccactgtacaactggctattactcaaatggaagacaagcgatctacaccaggagaaggtgaacaaccaatgtctacgactcaggttgtagctgatgtgcttgctgagaacacaaagaagaatcggtttcttcaaaatgtgggaatccaaaatgcacgacctagatctagtgtacaaaatattgaagcacaacttgaagtagagaggaaggcaaatgcagagcttcaatcacttgtcagcatccaacgtgagcgcatggatgtattattaaagcaagtgcatgaagcagaactggtaaggattagagagcaagaagagatgaagaagaagcaagatgccatggatgctcaacttgagcttatgctaagtcagattcaaccaagttaaagctaactagtatggggtgttaggctttgttggtacttctcttttgctgatgctattgcattctattgatggataaatacgtttcaatccattttttgtctattgtgctgctagagtagctttagcggcatgtgtggtgtgttggagtggcttacgtgtcagtggttggatacttgctgtaatgacatgctattggatacttgcatgtaatgacatgctggagtgtggtcagtattttttgtgatgagatgctggattaaaatctgagttgtgatgtaatagaattcaacattttgtcattatgttctggattataattaatatatatttaaattattgtgtttgcaaaa

SEQ ID NO: 20758 - DNA, 2354 bp, Zea Mays
cctagattggattcgtccccaattctctgcctccgccgccaggacgacggcaaatccgcccacgcaaaatatcagcccaagtgcccatcgcccaagcttcctagctcacccgccgccacccactagccaaattccccatccctctcctgccgccacccatcagccacatctctccctcctactccctctccggcagccatcatcagacaagatccctcccccaccatcgagccatgtcgagtcgagtgcatcttctgcaagcacggccatcttacgaaaccctagctggctcgaaggaccactactgtccggcgccctgaacaacttggcatgatgccgacgaagggtggagcaaacaaatcacaatgacatcgggtagtagatccaccattgcatccctatgaagaggagcgccttagacaatgtatgaggaacaattcgaggttgcaacaacttggaattcctgctttagtcagcatgtgtgggaacataaattccatctctaggaacaaaaagccaaataacagggataatgaagattctgaatctgagtatgatccttcacatgacgattctattgaaggggatttgtttgaccatgatgatcataataagaagggctcaaaggacactaacagaagaactattcacatggctcctggtggaatcaagcctcgaactaagagagtttatgcagagcaacatactactagaaatacaaggtcaaagaaaagcattgctcagcctgacacaagtctaacacgaagtgacatctatgtgccaccaccctcgctatctcatttgacccaagttggagaagttgctcgtagcattgaaaaccatagaaagactagtgttgaagctaatggccctacccaggttgacaacacccacatggccaatcgagatggctttgaccaatttgatgacaacatgaccaaccaaggggaaggcattacccagcctggtggaaaaggtgatgtaaatcagcatagagaaaggggacttaatatgggacttggtctccaaaggatgaaccgagctcggcgtggcaaactgccaattgtcattactgaaggaaggataaggcctgtggcaccaattgttgctgcaaagtttgcaactgagtgcaacattgcagttcggaatcatgtgcttgtgcttaagtcatggaaggaatacgagaagcatcctgggctctttaaattgtttacagcaaaacttagtgcaaagtttgatatcaatacagaagatgcgctagttaaaaatgcttgtttccaaatgatgaggaatgcactgcgccaacaacgatataagctgaagaaacaatattttgacccttttccgctacatctagtgaggaaaacatctcctatcaaatcgacaagtgatgaacaatggaatgaccttgtggaacattggaaaggtccaaaaaatatggcgacatgtgaacataacaaaggcaaccgaggcaaagttaagttccatcaaacaactggatctcgtagctatatggttcatgtagaaaatttgggggacaagtacatggatcaagaacctgatgcattggatctgttcaaggagtgccactacagtaagaaaaagcaaggctacacttccactgtacaactggctattactcaaatggaagacaagcgatctacaccaggagaaggtgaacaaccaatgtctacgactcaggttgtagctgatgtgcttgctgagaacacaaagaagaatcggtttcttcaaaatgtgggaatccaaaatgcacgacctagatctagtgtacaaaatattgaagcacaacttgaagtagagaggaaggcaaatgcagagcttcaatcacttgtcagcatccaacgtgagcgcatggatgtattattaaagcaagtgcatgaagcagaactggtaaggattagagagcaagaagagatgaagaagaagcaagatgccatggatgctcaacttgagcttatgctaagtcagattcaaccaagttaaagctaactagtatggggtgttaggctttgttggtacttctcttttgctgatgctattgcattctattgatggataaatacgtttcaatccattttttgtctattgtgctgctagagtagctttagcggcatgtgtggtgtgttggagtggcttacgtgtcagtggttggatacttgctgtaatgacatgctattggatacttgcatgtaatgacatgctggagtgtggtcagtattttttgtgatgagatgctggattaaaatctgagttgtgatgtaatagaattcaacattttgtcattatgttctggattataattaatatatatttaaattattgtgtttgcaaaa

SEQ ID NO: 20759 - DNA, 2351 bp, Zea Mays
cctagattggattcgtccccaattctctgcctccgccgccaggacgacggcaaatccgcccacgcaaaatatcagcccaagtgcccatcgcccaagcttcctagctcacccgccgccacccactagccaaattccccatccctctcctgccgccacccatcagccacatctctccctcctactccctctccggcagccatcatcagacaagatccctcccccaccatcgagccatgtcgagtcgagtgcatcttctgcaagcacggccatcttacgaaaccctagctggctcgaaggaccactactgtccggcgccctgaacaacttggcatgatgccgacgaagggtggagcaaacaaatcacaatgacatcgggtagtagatccaccattgcatccctatgaagaggagcgccttagacaatgtatgaggaacaattcgaggttgcaacaacttggaattcctgctttagtcagcatgtgtgggaacataaattccatctctaggaacaaaaagccaaataacagggataatgaagattctgaatctgagtatgatccttcacatgacgattctattgaaggggatttgtttgaccatgatgatcataataagggctcaaaggacactaacagaagaactattcacatggctcctggtggaatcaagcctcgaactaagagagtttatgcagagcaacatactactagaaatacaaggtcaaagaaaagcattgctcagcctgacacaagtctaacacgaagtgacatctatgtgccaccaccctcgctatctcatttgacccaagttggagaagttgctcgtagcattgaaaaccatagaaagactagtgttgaagctaatggccctacccaggttgacaacacccacatggccaatcgagaagatggctttgaccaatttgatgacaacatgaccaaccaaggggaaggcattacccagcctggtggaaaaggagtaaatcagcatagagaaaggggacttaatatgggacttggtctccaaaggatgaaccgagctcggcgtggcaaactgccaattgtcattactgaaggaaggataaggcctgtggcaccaattgttgctgcaaagtttgcaactgagtgcaacattgcagttcggaatcatgtgcttgtgcttaagtcatggaaggaatacgagaagcatcctgggctctttaaattgtttacagcaaaacttagtgcaaagtttgatatcaatacagaagatgcgctagttaaaaatgcttgtttccaaatgatgaggaatgcactgcgccaacaacgatataagctgaagaaacaatattttgacccttttccgctacatctagtgaggaaaacatctcctatcaaatcgacaagtgatgaacaatggaatgaccttgtggaacattggaaaggtccaaaaaatatggcgacatgtgaacataacaaaggcaaccgaggcaaagttaagttccatcaaacaactggatctcgtagctatatggttcatgtagaaaatttgggggacaagtacatggatcaagaacctgatgcattggatctgttcaaggagtgccactacagtaagaaaaagcaaggctacacttccactgtacaactggctattactcaaatggaagacaagcgatctacaccaggagaaggtgaacaaccaatgtctacgactcaggttgtagctgatgtgcttgctgagaacacaaagaagaatcggtttcttcaaaatgtgggaatccaaaatgcacgacctagatctagtgtacaaaatattgaagcacaacttgaagtagagaggaaggcaaatgcagagcttcaatcacttgtcagcatccaacgtgagcgcatggatgtattattaaagcaagtgcatgaagcagaactggtaaggattagagagcaagaagagatgaagaagaagcaagatgccatggatgctcaacttgagcttatgctaagtcagattcaaccaagttaaagctaactagtatggggtgttaggctttgttggtacttctcttttgctgatgctattgcattctattgatggataaatacgtttcaatccattttttgtctattgtgctgctagagtagctttagcggcatgtgtggtgtgttggagtggcttacgtgtcagtggttggatacttgctgtaatgacatgctattggatacttgcatgtaatgacatgctggagtgtggtcagtattttttgtgatgagatgctggattaaaatctgagttgtgatgtaatagaattcaacattttgtcattatgttctggattataattaatatatatttaaattattgtgtttgcaaaa

SEQ ID NO: 20760 - DNA, 2212 bp, Zea Mays
attggattcgtccccaattctctgcctccgccgccaggacgacggcaaatccgcccacgcaaaatatcagcccaagtgcccatcgcccaagcttcctagctcacccgccgccacccactagccaaattccccatccctctcctgccgccacccatcagccacatctctccctcctactccctctccggcagccatcatcagacaagatccctcccccaccatcgagccatgtcgagtcgagtgcatcttctgcaagcacggccatcttacgaaaccctagctggctcgaaggaccactactgtccggcgccctgaacaacttggcatgatgccgacgaagggtggagcaaacaaatcacaatgacatcgggtagtagatccaccattgcatccctatgaagaggagcgccttagacaatgtatgaggaacaattcgaggttgcaacaacttggaattcctgctttagtcagcatgtgtgggaacataaattccatctctaggaacaaaaagccaaataacagggataatgaagattctgaatctgagtatgatccttcacatgacgattctattgaaggggatttgtttgaccatgatgatcataataagaagggctcaaaggacactaacagaagaactattcacatggctcctggtggaatcaagcctcgaactaagagagtttatgcagagcaacatactactagaaatacaagctaatggccctacccaggttgacaacacccacatggccaatcgagaagatggctttgaccaatttgatgacaacatgaccaaccaaggggaaggcattacccagcctggtggaaaaggtgatgtaaatcagcatagagaaaggggacttaatatgggacttggtctccaaaggatgaaccgagctcggcgtggcaaactgccaattgtcattactgaaggaaggataaggcctgtggcaccaattgttgctgcaaagtttgcaactgagtgcaacattgcagttcggaatcatgtgcttgtgcttaagtcatggaaggaatacgagaagcatcctgggctctttaaattgtttacagcaaaacttagtgcaaagtttgatatcaatacagaagatgcgctagttaaaaatgcttgtttccaaatgatgaggaatgcactgcgccaacaacgatataagctgaagaaacaatattttgacccttttccgctacatctagtgaggaaaacatctcctatcaaatcgacaagtgatgaacaatggaatgaccttgtggaacattggaaaggtccaaaaaatatggcgacatgtgaacataacaaaggcaaccgaggcaaagttaagttccatcaaacaactggatctcgtagctatatggttcatgtagaaaatttgggggacaagtacatggatcaagaacctgatgcattggatctgttcaaggagtgccactacagtaagaaaaagcaaggctacacttccactgtacaactggctattactcaaatggaagacaagcgatctacaccaggagaaggtgaacaaccaatgtctacgactcaggttgtagctgatgtgcttgctgagaacacaaagaagaatcggtttcttcaaaatgtgggaatccaaaatgcacgacctagatctagtgtacaaaatattgaagcacaacttgaagtagagaggaaggcaaatgcagagcttcaatcacttgtcagcatccaacgtgagcgcatggatgtattattaaagcaagtgcatgaagcagaactggtaaggattagagagcaagaagagatgaagaagaagcaagatgccatggatgctcaacttgagcttatgctaagtcagattcaaccaagttaaagctaactagtatggggtgttaggctttgttggtacttctcttttgctgatgctattgcattctattgatggataaatacgtttcaatccattttttgtctattgtgctgctagagtagctttagcggcatgtgtggtgtgttggagtggcttacgtgtcagtggttggatacttgctgtaatgacatgctattggatacttgcatgtaatgacatgctggagtgtggtcagtattttttgtgatgagatgctggattaaaatctgagttgtgatgtaatagaattcaacattttgtcattatgttctggattataattaatatatatttaaattattgtgtttgcaaaa

SEQ ID NO: 20761 - DNA, 2302 bp, Zea Mays
attggattcgtccccaattctctgcctccgccgccaggacgacggcaaatccgcccacgcaaaatatcagcccaagtgcccatcgcccaagcttcctagctcacccgccgccacccactagccaaattccccatccctctcctgccgccacccatcagccacatctctccctcctactccctctccggcagccatcatcagacaagatccctcccccaccatcgagccatgtcgagtcgagtgcatcttctgcaagcacggccatcttacgaaaccctagctggctcgaaggaccactactgtccggcgccctgaacaacttggcatgatgccgacgaagggtggagcaaacaaatcacaatgacatcgggtagtagatccaccattgcatccctatgaagaggagcgccttagacaatgtatgaggaacaattcgaggttgcaacaacttggaattcctgctttagtcagcatgtgtgggaacataaattccatctctaggaacaaaaagccaaataacagggataatgaagattctgaatctgagtatgatccttcacatgacgattctattgaaggggatttgtttgaccatgatgatcataataagggctcaaaggacactaacagaagaactattcacatggctcctggtggaatcaagcctcgaactaagagagtttatgcagagcaacatactactagaaatacaaggtcaaagaaaagcattgctcagcctgacacaagtctaacacgaagtgacatctatgtgccaccaccctcgctatctcatttgacccaagttggagaagttgctcgtagcattgaaaaccatagaaagactagtgttgaagctaatggccctacccaggttgacaacacccacatggccaatcgagaagatggctttgaccaatttgatgacaacatgaccaaccaaggggaaggcattacccagcctggtggaaaaggagtaaatcagcatagagaaaggggacttaatatgggacttggtctccaaaggatgaaccgagctcggcgtggcaaactgccaattgtcattactgaaggaaggataaggcctgtggcaccaattgttgctgcaaagtttgcaactgagtgcaacattgcagttcggaatcatgtgcttgtgcttaagtcatggaaggaatacgagaagcatcctgggctctttaaattgtttacagcaaaacttagtgcaaagtttgatatcaatacagaagatgcgctagttaaaaatgcttgtttccaaatgatgaggaatgcactgcgccaacaacgatataagctgaagaaacaatattttgacccttttccgctacatctagtgaggaaaacatctcctatcaaatcgacaagtgatgaacaatggaatgaccttgtggaacattggaaaggtccaaaaaatatggcgacatgtgaacataacaaaggcaaccgaggcaaagttaagttccatcaaacaactggatctcgtagctatatggttcatgtagaaaatttgggggacaagtacatggatcaagaacctgatgcattggatctgttcaaggagtgccactacaactcaaatggaagacaagcgatctacaccaggagaaggtgaacaaccaatgtctacgactcaggttgtagctgatgtgcttgctgagaacacaaagaagaatcggtttcttcaaaatgtgggaatccaaaatgcacgacctagatctagtgtacaaaatattgaagcacaacttgaagtagagaggaaggcaaatgcagagcttcaatcacttgtcagcatccaacgtgagcgcatggatgtattattaaagcaagtgcatgaagcagaactggtaaggattagagagcaagaagagatgaagaagaagcaagatgccatggatgctcaacttgagcttatgctaagtcagattcaaccaagttaaagctaactagtatggggtgttaggctttgttggtacttctcttttgctgatgctattgcattctattgatggataaatacgtttcaatccattttttgtctattgtgctgctagagtagctttagcggcatgtgtggtgtgttggagtggcttacgtgtcagtggttggatacttgctgtaatgacatgctattggatacttgcatgtaatgacatgctggagtgtggtcagtattttttgtgatgagatgctggattaaaatctgagttgtgatgtaatagaattcaacattttgtcattatgttctggattataattaatatatatttaaattattgtgtttgcaaaa

SEQ ID NO: 20762 - DNA, 2575 bp, Zea Mays
attggattcgtccccaattctctgcctccgccgccaggacgacggcaaatccgcccacgcaaaatatcagcccaagtgcccatcgcccaagcttcctagctcacccgccgccacccactagccaaattccccatccctctcctgccgccacccatcagccacatctctccctcctactccctctccggcagccatcatcagacaagatccctcccccaccatcgagccatgtcgagtcgagtgcatcttctgcaagcacggccatcttacgaaaccctagctggctcgaaggaccactactgtccggcgccctgaacaacttggcatgatgccgacgaagggtggagcaaacaaatcacaatgacatcgggtagtagatccaccattgcatccctatgaagaggagcgccttagacaatgtatgaggaacaattcgaggttgcaacaacttggaattcctgctttagtcagcatgtgtgggaacataaattccatctctaggaacaaaaagccaaataacagggataatgaagattctgaatctgagtatgatccttcacatgacgattctattgaaggggatttgtttgaccatgatgatcataataagaagggctcaaaggacactaacagaagaactattcacatggctcctggtggaatcaagcctcgaactaagagagtttatgcagagcaacatactactagaaatacaaggtcaaagaaaagcattgctcagcctgacacaagtctaacacgaagtgacatctatgtgccaccaccctcgctatctcatttgacccaagttggagaagttgctcgtagcattgaaaaccatagaaagactagtgttgaagctaatggccctacccaggttgacaacacccacatggccaatcgagaagatggctttgaccaatttgatgacaacatgaccaaccaaggggaaggcattacccagcctggtggaaaaggtgatggtatatttctatatttaccatattgcatattacatcactagttgcttgctaaacctatcatgtgtcattagtttctactttactggatgttcttttgaccttttcaattagattcatgtgccatgtgtcattagcttgtcaatagtccattggatgatcatctttgatccatgtttgatgcacctcacttattgcaatttctatgtgaatctaaaactaggagtaaatcagcatagagaaaggggacttaatatgggacttggtctccaaaggatgaaccgagctcggcgtggcaaactgccaattgtcattactgaaggaaggataaggcctgtggcaccaattgttgctgcaaagtttgcaactgagtgcaacattgcagttcggaatcatgtgcttgtgcttaagtcatggaaggaatacgagaagcatcctgggctctttaaattgtttacagcaaaacttagtgcaaagtttgatatcaatacagaagatgcgctagttaaaaatgcttgtttccaaatgatgaggaatgcactgcgccaacaacgatataagctgaagaaacaatattttgacccttttccgctacatctagtgaggaaaacatctcctatcaaatcgacaagtgatgaacaatggaatgaccttgtggaacattggaaaggtccaaaaaatatggcgacatgtgaacataacaaaggcaaccgaggcaaagttaagttccatcaaacaactggatctcgtagctatatggttcatgtagaaaatttgggggacaagtacatggatcaagaacctgatgcattggatctgttcaaggagtgccactacagtaagaaaaagcaaggctacacttccactgtacaactggctattactcaaatggaagacaagcgatctacaccaggagaaggtgaacaaccaatgtctacgactcaggttgtagctgatgtgcttgctgagaacacaaagaagaatcggtttcttcaaaatgtgggaatccaaaatgcacgacctagatctagtgtacaaaatattgaagcacaacttgaagtagagaggaaggcaaatgcagagcttcaatcacttgtcagcatccaacgtgagcgcatggatgtattattaaagcaagtgcatgaagcagaactggtaaggattagagagcaagaagagatgaagaagaagcaagatgccatggatgctcaacttgagcttatgctaagtcagattcaaccaagttaaagctaactagtatggggtgttaggctttgttggtacttctcttttgctgatgctattgcattctattgatggataaatacgtttcaatccattttttgtctattgtgctgctagagtagctttagcggcatgtgtggtgtgttggagtggcttacgtgtcagtggttggatacttgctgtaatgacatgctattggatacttgcatgtaatgacatgctggagtgtggtcagtattttttgtgatgagatgctggattaaaatctgagttgtgatgtaatagaattcaacattttgtcattatgttctggattataattaatatatatttaaattattgtgtttgcaaaa

SEQ ID NO: 20763 - DNA, 2432 bp, Zea Mays
attggattcgtccccaattctctgcctccgccgccaggacgacggcaaatccgcccacgcaaaatatcagcccaagtgcccatcgcccaagcttcctagctcacccgccgccacccactagccaaattccccatccctctcctgccgccacccatcagccacatctctccctcctactccctctccggcagccatcatcagacaagatccctcccccaccatcgagccatgtcgagtcgagtgcatcttctgcaagcacggccatcttacgaaaccctagctggctcgaaggaccactactgtccggcgccctgaacaacttggcatgatgccgacgaagggtggagcaaacaaatcacaatgacatcgggtagtagatccaccattgcatccctatgaagaggagcgccttagacaatgtatgaggaacaattcgaggttgcaacaacttggaattcctgctttagtcagcatgtgtgggaacataaattccatctctaggaacaaaaagccaaataacagggataatgaagattctgaatctgagtatgatccttcacatgacgattctattgaaggggatttgtttgaccatgatgatcataataagggctcaaaggacactaacagaagaactattcacatggctcctggtggaatcaagcctcgaactaagagagtttatgcagagcaacatactactagaaatacaagctaatggccctacccaggttgacaacacccacatggccaatcgagaagatggctttgaccaatttgatgacaacatgaccaaccaaggggaaggcattacccagcctggtggaaaaggtgatggtatatttctatatttaccatattgcatattacatcactagttgcttgctaaacctatcatgtgtcattagtttctactttactggatgttcttttgaccttttcaattagattcatgtgccatgtgtcattagcttgtcaatagtccattggatgatcatctttgatccatgtttgatgcacctcacttattgcaatttctatgtgaatctaaaactaggagtaaatcagcatagagaaaggggacttaatatgggacttggtctccaaaggatgaaccgagctcggcgtggcaaactgccaattgtcattactgaaggaaggataaggcctgtggcaccaattgttgctgcaaagtttgcaactgagtgcaacattgcagttcggaatcatgtgcttgtgcttaagtcatggaaggaatacgagaagcatcctgggctctttaaattgtttacagcaaaacttagtgcaaagtttgatatcaatacagaagatgcgctagttaaaaatgcttgtttccaaatgatgaggaatgcactgcgccaacaacgatataagctgaagaaacaatattttgacccttttccgctacatctagtgaggaaaacatctcctatcaaatcgacaagtgatgaacaatggaatgaccttgtggaacattggaaaggtccaaaaaatatggcgacatgtgaacataacaaaggcaaccgaggcaaagttaagttccatcaaacaactggatctcgtagctatatggttcatgtagaaaatttgggggacaagtacatggatcaagaacctgatgcattggatctgttcaaggagtgccactacagtaagaaaaagcaaggctacacttccactgtacaactggctattactcaaatggaagacaagcgatctacaccaggagaaggtgaacaaccaatgtctacgactcaggttgtagctgatgtgcttgctgagaacacaaagaagaatcggtttcttcaaaatgtgggaatccaaaatgcacgacctagatctagtgtacaaaatattgaagcacaacttgaagtagagaggaaggcaaatgcagagcttcaatcacttgtcagcatccaacgtgagcgcatggatgtattattaaagcaagtgcatgaagcagaactggtaaggattagagagcaagaagagatgaagaagaagcaagatgccatggatgctcaacttgagcttatgctaagtcagattcaaccaagttaaagctaactagtatggggtgttaggctttgttggtacttctcttttgctgatgctattgcattctattgatggataaatacgtttcaatccattttttgtctattgtgctgctagagtagctttagcggcatgtgtggtgtgttggagtggcttacgtgtcagtggttggatacttgctgtaatgacatgctattggatacttgcatgtaatgacatgctggagtgtggtcagtattttttgtgatgagatgctggattaaaatctgagttgtgatgtaatagaattcaacattttgtcattatgttctggattataattaatatatatttaaattattgtgtttgcaaaa

SEQ ID NO: 20764 - DNA, 2535 bp, Zea Mays
attggattcgtccccaattctctgcctccgccgccaggacgacggcaaatccgcccacgcaaaatatcagcccaagtgcccatcgcccaagcttcctagctcacccgccgccacccactagccaaattccccatccctctcctgccgccacccatcagccacatctctccctcctactccctctccggcagccatcatcagacaagatccctcccccaccatcgagccatgtcgagtcgagtgcatcttctgcaagcacggccatcttacgaaaccctagctggctcgaaggaccactactgtccggcgccctgaacaacttggcatgatgccgacgaagggtggagcaaacaaatcacaatgacatcgggtagtagatccaccattgcatccctatgaagaggagcgccttagacaatgtatgaggaacaattcgaggttgcaacaacttggaattcctgctttagtcagcatgtgtgggaacataaattccatctctaggaacaaaaagccaaataacagggataatgaagattctgaatctgagtatgatccttcacatgacgattctattgaaggggatttgtttgaccatgatgatcataataagggctcaaaggacactaacagaagaactattcacatggctcctggtggaatcaagcctcgaactaagagagtttatgcagagcaacatactactagaaatacaaggtcaaagaaaagcattgctcagcctgacacaagtctaacacgaagtgacatctatgtgccaccaccctcgctatctcatttgacccaagttggagaagttgctcgtagcattgaaaaccatagaaagactagtgttgaagctaatggccctacccaggttgacaacacccacatggccaatcgagatggctttgaccaatttgatgacaacatgaccaaccaaggggaaggcattacccagcctggtggaaaaggtgatggtatatttctatatttaccatattgcatattacatcactagttgcttgctaaacctatcatgtgtcattagtttctactttactggatgttcttttgaccttttcaattagattcatgtgccatgtgtcattagcttgtcaatagtccattggatgatcatctttgatccatgtttgatgcacctcacttattgcaatttctatgtgaatctaaaactaggagtaaatcagcatagagaaaggggacttaatatgggacttggtctccaaaggatgaaccgagctcggcgtggcaaactgccaattgtcattactgaaggaaggataaggcctgtggcaccaattgttgctgcaaagtttgcaactgagtgcaacattgcagttcggaatcatgtgcttgtgcttaagtcatggaaggaatacgagaagcatcctgggctctttaaattgtttacagcaaaacttagtgcaaagtttgatatcaatacagaagatgcgctagttaaaaatgcttgtttccaaatgatgaggaatgcactgcgccaacaacgatataagctgaagaaacaatattttgacccttttccgctacatctagtgaggaaaacatctcctatcaaatcgacaagtgatgaacaatggaatgaccttgtggaacattggaaaggtccaaaaaatatggcgacatgtgaacataacaaaggcaaccgaggcaaagttaagttccatcaaacaactggatctcgtagctatatggttcatgtagaaaatttgggggacaagtacatggatcaagaacctgatgcattggatctgttcaaggagtgccactacagtaagaaaaaactcaaatggaagacaagcgatctacaccaggagaaggtgaacaaccaatgtctacgactcaggttgtagctgatgtgcttgctgagaacacaaagaagaatcggtttcttcaaaatgtgggaatccaaaatgcacgacctagatctagtgtacaaaatattgaagcacaacttgaagtagagaggaaggcaaatgcagagcttcaatcacttgtcagcatccaacgtgagcgcatggatgtattattaaagcaagtgcatgaagcagaactggtaaggattagagagcaagaagagatgaagaagaagcaagatgccatggatgctcaacttgagcttatgctaagtcagattcaaccaagttaaagctaactagtatggggtgttaggctttgttggtacttctcttttgctgatgctattgcattctattgatggataaatacgtttcaatccattttttgtctattgtgctgctagagtagctttagcggcatgtgtggtgtgttggagtggcttacgtgtcagtggttggatacttgctgtaatgacatgctattggatacttgcatgtaatgacatgctggagtgtggtcagtattttttgtgatgagatgctggattaaaatctgagttgtgatgtaatagaattcaacattttgtcattatgttctggattataattaatatatatttaaattattgtgtttgcaaaa

SEQ ID NO: 20765 - DNA, 2355 bp, Zea Mays
attggattcgtccccaattctctgcctccgccgccaggacgacggcaaatccgcccacgcaaaatatcagcccaagtgcccatcgcccaagcttcctagctcacccgccgccacccactagccaaattccccatccctctcctgccgccacccatcagccacatctctccctcctactccctctccggcagccatcatcagacaagatccctcccccaccatcgagccatgtcgagtcgagtgcatcttctgcaagcacggccatcttacgaaaccctagctggctcgaaggaccactactgtccggcgccctgaacaacttggcatgatgccgacgaagggtggagcaaacaaatcacaatgacatcgggtagtagatccaccattgcatccctatgaagaggagcgccttagacaatgtatgaggaacaattcgaggttgcaacaacttggaattcctgctttagtcagcatgtgtgggaacataaattccatctctaggaacaaaaagccaaataacagggataatgaagattctgaatctgagtatgatccttcacatgacgattctattgaaggggatttgtttgaccatgatgatcataataagggctcaaaggacactaacagaagaactattcacatggctcctggtggaatcaagcctcgaactaagagagtttatgcagagcaacatactactagaaatacaaggtcaaagaaaagcattgctcagcctgacacaagtctaacacgaagtgacatctatgtgccaccaccctcgctatctcatttgacccaagttggagaagttgctcgtagcattgaaaaccatagaaagactagtgttgaaggctagttttctaatggccctacccaggttgacaacacccacatggccaatcgagaagatggctttgaccaatttgatgacaacatgaccaaccaaggggaaggcattacccagcctggtggaaaaggagtaaatcagcatagagaaaggggacttaatatgggacttggtctccaaaggatgaaccgagctcggcgtggcaaactgccaattgtcattactgaaggaaggataaggcctgtggcaccaattgttgctgcaaagtttgcaactgagtgcaacattgcagttcggaatcatgtgcttgtgcttaagtcatggaaggaatacgagaagcatcctgggctctttaaattgtttacagcaaaacttagtgcaaagtttgatatcaatacagaagatgcgctagttaaaaatgcttgtttccaaatgatgaggaatgcactgcgccaacaacgatataagctgaagaaacaatattttgacccttttccgctacatctagtgaggaaaacatctcctatcaaatcgacaagtgatgaacaatggaatgaccttgtggaacattggaaaggtccaaaaaatatggcgacatgtgaacataacaaaggcaaccgaggcaaagttaagttccatcaaacaactggatctcgtagctatatggttcatgtagaaaatttgggggacaagtacatggatcaagaacctgatgcattggatctgttcaaggagtgccactacagtaagaaaaagcaaggctacacttccactgtacaactggctattactcaaatggaagacaagcgatctacaccaggagaaggtgaacaaccaatgtctacgactcaggttgtagctgatgtgcttgctgagaacacaaagaagaatcggtttcttcaaaatgtgggaatccaaaatgcacgacctagatctagtgtacaaaatattgaagcacaacttgaagtagagaggaaggcaaatgcagagcttcaatcacttgtcagcatccaacgtgagcgcatggatgtattattaaagcaagtgcatgaagcagaactggtaaggattagagagcaagaagagatgaagaagaagcaagatgccatggatgctcaacttgagcttatgctaagtcagattcaaccaagttaaagctaactagtatggggtgttaggctttgttggtacttctcttttgctgatgctattgcattctattgatggataaatacgtttcaatccattttttgtctattgtgctgctagagtagctttagcggcatgtgtggtgtgttggagtggcttacgtgtcagtggttggatacttgctgtaatgacatgctattggatacttgcatgtaatgacatgctggagtgtggtcagtattttttgtgatgagatgctggattaaaatctgagttgtgatgtaatagaattcaacattttgtcattatgttctggattataattaatatatatttaaattattgtgtttgcaaaa

SEQ ID NO: 20766 - DNA, 2351 bp, Zea Mays
ttggattcgtccccaattctctgcctccgccgccaggacgacggcaaatccgcccacgcaaaatatcagcccaagtgcccatcgcccaagcttcctagctcacccgccgccacccactagccaaattccccatccctctcctgccgccacccatcagccacatctctccctcctactccctctccggcagccatcatcagacaagatccctcccccaccatcgagccatgtcgagtcgagtgcatcttctgcaagcacggccatcttacgaaaccctagctggctcgaaggaccactactgtccggcgccctgaacaacttggcatgatgccgacgaagggtggagcaaacaaatcacaatgacatcgggtagtagatccaccattgcatccctatgaagaggagcgccttagacaatgtatgaggaacaattcgaggttgcaacaacttggaattcctgctttagtcagcatgtgtgggaacataaattccatctctaggaacaaaaagccaaataacagggataatgaagattctgaatctgagtatgatccttcacatgacgattctattgaaggggatttgtttgaccatgatgatcataataagaagggctcaaaggacactaacagaagaactattcacatggctcctggtggaatcaagcctcgaactaagagagtttatgcagagcaacatactactagaaatacaaggtcaaagaaaagcattgctcagcctgacacaagtctaacacgaagtgacatctatgtgccaccaccctcgctatctcatttgacccaagttggagaagttgctcgtagcattgaaaaccatagaaagactagtgttgaagctaatggccctacccaggttgacaacacccacatggccaatcgagaagatggctttgaccaatttgatgacaacatgaccaaccaaggggaaggcattacccagcctggtggaaaaggtgatgtaaatcagcatagagaaaggggacttaatatgggacttggtctccaaaggatgaaccgagctcggcgtggcaaactgccaattgtcattactgaaggaaggataaggcctgtggcaccaattgttgctgcaaagtttgcaactgagtgcaacattgcagttcggaatcatgtgcttgtgcttaagtcatggaaggaatacgagaagcatcctgggctctttaaattgtttacagcaaaacttagtgcaaagtttgatatcaatacagaagatgcgctagttaaaaatgcttgtttccaaatgatgaggaatgcactgcgccaacaacgatataagctgaagaaacaatattttgacccttttccgctacatctagtgaggaaaacatctcctatcaaatcgacaagtgatgaacaatggaatgaccttgtggaacattggaaaggtccaaaaaatatggcgacatgtgaacataacaaaggcaaccgaggcaaagttaagttccatcaaacaactggatctcgtagctatatggttcatgtagaaaatttgggggacaagtacatggatcaagaacctgatgcattggatctgttcaaggagtgccactacagtaagaaaaagcaaggctacacttccactgtacaactggctattactcaaatggaagacaagcgatctacaccaggagaaggtgaacaaccaatgtctacgactcaggttgtagctgatgtgcttgctgagaacacaaagaagaatcggtttcttcaaaatgtgggaatccaaaatgcacgacctagatctagtgtacaaaatattgaagcacaacttgaagtagagaggaaggcaaatgcagagcttcaatcacttgtcagcatccaacgtgagcgcatggatgtattattaaagcaagtgcatgaagcagaactggtaaggattagagagcaagaagagatgaagaagaagcaagatgccatggatgctcaacttgagcttatgctaagtcagattcaaccaagttaaagctaactagtatggggtgttaggctttgttggtacttctcttttgctgatgctattgcattctattgatggataaatacgtttcaatccattttttgtctattgtgctgctagagtagctttagcggcatgtgtggtgtgttggagtggcttacgtgtcagtggttggatacttgctgtaatgacatgctattggatacttgcatgtaatgacatgctggagtgtggtcagtattttttgtgatgagatgctggattaaaatctgagttgtgatgtaatagaattcaacattttgtcattatgttctggattataattaatatatatttaaattattgtgtttgcaaaa

SEQ ID NO: 20767 - DNA, 2207 bp, Zea Mays
attcgtccccaattctctgcctccgccgccaggacgacggcaaatccgcccacgcaaaatatcagcccaagtgcccatcgcccaagcttcctagctcacccgccgccacccactagccaaattccccatccctctcctgccgccacccatcagccacatctctccctcctactccctctccggcagccatcatcagacaagatccctcccccaccatcgagccatgtcgagtcgagtgcatcttctgcaagcacggccatcttacgaaaccctagctggctcgaaggaccactactgtccggcgccctgaacaacttggcatgatgccgacgaagggtggagcaaacaaatcacaatgacatcgggtagtagatccaccattgcatccctatgaagaggagcgccttagacaatgtatgaggaacaattcgaggttgcaacaacttggaattcctgctttagtcagcatgtgtgggaacataaattccatctctaggaacaaaaagccaaataacagggataatgaagattctgaatctgagtatgatccttcacatgacgattctattgaaggggatttgtttgaccatgatgatcataataagggctcaaaggacactaacagaagaactattcacatggctcctggtggaatcaagcctcgaactaagagagtttatgcagagcaacatactactagaaatacaagctaatggccctacccaggttgacaacacccacatggccaatcgagaagatggctttgaccaatttgatgacaacatgaccaaccaaggggaaggcattacccagcctggtggaaaaggtgatggagtaaatcagcatagagaaaggggacttaatatgggacttggtctccaaaggatgaaccgagctcggcgtggcaaactgccaattgtcattactgaaggaaggataaggcctgtggcaccaattgttgctgcaaagtttgcaactgagtgcaacattgcagttcggaatcatgtgcttgtgcttaagtcatggaaggaatacgagaagcatcctgggctctttaaattgtttacagcaaaacttagtgcaaagtttgatatcaatacagaagatgcgctagttaaaaatgcttgtttccaaatgatgaggaatgcactgcgccaacaacgatataagctgaagaaacaatattttgacccttttccgctacatctagtgaggaaaacatctcctatcaaatcgacaagtgatgaacaatggaatgaccttgtggaacattggaaaggtccaaaaaatatggcgacatgtgaacataacaaaggcaaccgaggcaaagttaagttccatcaaacaactggatctcgtagctatatggttcatgtagaaaatttgggggacaagtacatggatcaagaacctgatgcattggatctgttcaaggagtgccactacagtaagaaaaagcaaggctacacttccactgtacaactggctattactcaaatggaagacaagcgatctacaccaggagaaggtgaacaaccaatgtctacgactcaggttgtagctgatgtgcttgctgagaacacaaagaagaatcggtttcttcaaaatgtgggaatccaaaatgcacgacctagatctagtgtacaaaatattgaagcacaacttgaagtagagaggaaggcaaatgcagagcttcaatcacttgtcagcatccaacgtgagcgcatggatgtattattaaagcaagtgcatgaagcagaactggtaaggattagagagcaagaagagatgaagaagaagcaagatgccatggatgctcaacttgagcttatgctaagtcagattcaaccaagttaaagctaactagtatggggtgttaggctttgttggtacttctcttttgctgatgctattgcattctattgatggataaatacgtttcaatccattttttgtctattgtgctgctagagtagctttagcggcatgtgtggtgtgttggagtggcttacgtgtcagtggttggatacttgctgtaatgacatgctattggatacttgcatgtaatgacatgctggagtgtggtcagtattttttgtgatgagatgctggattaaaatctgagttgtgatgtaatagaattcaacattttgtcattatgttctggattataattaatatatatttaaattattgtgtttgcaaaa

SEQ ID NO: 20768 - DNA, 2566 bp, Zea Mays
ttcgtccccaattctctgcctccgccgccaggacgacggcaaatccgcccacgcaaaatatcagcccaagtgcccatcgcccaagcttcctagctcacccgccgccacccactagccaaattccccatccctctcctgccgccacccatcagccacatctctccctcctactccctctccggcagccatcatcagacaagatccctcccccaccatcgagccatgtcgagtcgagtgcatcttctgcaagcacggccatcttacgaaaccctagctggctcgaaggaccactactgtccggcgccctgaacaacttggcatgatgccgacgaagggtggagcaaacaaatcacaatgacatcgggtagtagatccaccattgcatccctatgaagaggagcgccttagacaatgtatgaggaacaattcgaggttgcaacaacttggaattcctgctttagtcagcatgtgtgggaacataaattccatctctaggaacaaaaagccaaataacagggataatgaagattctgaatctgagtatgatccttcacatgacgattctattgaaggggatttgtttgaccatgatgatcataataagaagggctcaaaggacactaacagaagaactattcacatggctcctggtggaatcaagcctcgaactaagagagtttatgcagagcaacatactactagaaatacaaggtcaaagaaaagcattgctcagcctgacacaagtctaacacgaagtgacatctatgtgccaccaccctcgctatctcatttgacccaagttggagaagttgctcgtagcattgaaaaccatagaaagactagtgttgaagctaatggccctacccaggttgacaacacccacatggccaatcgagatggctttgaccaatttgatgacaacatgaccaaccaaggggaaggcattacccagcctggtggaaaaggtgatggtatatttctatatttaccatattgcatattacatcactagttgcttgctaaacctatcatgtgtcattagtttctactttactggatgttcttttgaccttttcaattagattcatgtgccatgtgtcattagcttgtcaatagtccattggatgatcatctttgatccatgtttgatgcacctcacttattgcaatttctatgtgaatctaaaactaggagtaaatcagcatagagaaaggggacttaatatgggacttggtctccaaaggatgaaccgagctcggcgtggcaaactgccaattgtcattactgaaggaaggataaggcctgtggcaccaattgttgctgcaaagtttgcaactgagtgcaacattgcagttcggaatcatgtgcttgtgcttaagtcatggaaggaatacgagaagcatcctgggctctttaaattgtttacagcaaaacttagtgcaaagtttgatatcaatacagaagatgcgctagttaaaaatgcttgtttccaaatgatgaggaatgcactgcgccaacaacgatataagctgaagaaacaatattttgacccttttccgctacatctagtgaggaaaacatctcctatcaaatcgacaagtgatgaacaatggaatgaccttgtggaacattggaaaggtccaaaaaatatggcgacatgtgaacataacaaaggcaaccgaggcaaagttaagttccatcaaacaactggatctcgtagctatatggttcatgtagaaaatttgggggacaagtacatggatcaagaacctgatgcattggatctgttcaaggagtgccactacagtaagaaaaagcaaggctacacttccactgtacaactggctattactcaaatggaagacaagcgatctacaccaggagaaggtgaacaaccaatgtctacgactcaggttgtagctgatgtgcttgctgagaacacaaagaagaatcggtttcttcaaaatgtgggaatccaaaatgcacgacctagatctagtgtacaaaatattgaagcacaacttgaagtagagaggaaggcaaatgcagagcttcaatcacttgtcagcatccaacgtgagcgcatggatgtattattaaagcaagtgcatgaagcagaactggtaaggattagagagcaagaagagatgaagaagaagcaagatgccatggatgctcaacttgagcttatgctaagtcagattcaaccaagttaaagctaactagtatggggtgttaggctttgttggtacttctcttttgctgatgctattgcattctattgatggataaatacgtttcaatccattttttgtctattgtgctgctagagtagctttagcggcatgtgtggtgtgttggagtggcttacgtgtcagtggttggatacttgctgtaatgacatgctattggatacttgcatgtaatgacatgctggagtgtggtcagtattttttgtgatgagatgctggattaaaatctgagttgtgatgtaatagaattcaacattttgtcattatgttctggattataattaatatatatttaaattattgtgtttgcaaaa

SEQ ID NO: 20769 - DNA, 2337 bp, Zea Mays
cccaattctctgcctccgccgccaggacgacggcaaatccgcccacgcaaaatatcagcccaagtgcccatcgcccaagcttcctagctcacccgccgccacccactagccaaattccccatccctctcctgccgccacccatcagccacatctctccctcctactccctctccggcagccatcatcagacaagatccctcccccaccatcgagccatgtcgagtcgagtgcatcttctgcaagcacggccatcttacgaaaccctagctggctcgaaggaccactactgtccggcgccctgaacaacttggcatgatgccgacgaagggtggagcaaacaaatcacaatgacatcgggtagtagatccaccattgcatccctatgaagaggagcgccttagacaatgtatgaggaacaattcgaggttgcaacaacttggaattcctgctttagtcagcatgtgtgggaacataaattccatctctaggaacaaaaagccaaataacagggataatgaagattctgaatctgagtatgatccttcacatgacgattctattgaaggggatttgtttgaccatgatgatcataataagggctcaaaggacactaacagaagaactattcacatggctcctggtggaatcaagcctcgaactaagagagtttatgcagagcaacatactactagaaatacaaggtcaaagaaaagcattgctcagcctgacacaagtctaacacgaagtgacatctatgtgccaccaccctcgctatctcatttgacccaagttggagaagttgctcgtagcattgaaaaccatagaaagactagtgttgaagctaatggccctacccaggttgacaacacccacatggccaatcgagaagatggctttgaccaatttgatgacaacatgaccaaccaaggggaaggcattacccagcctggtggaaaaggtgatgtaaatcagcatagagaaaggggacttaatatgggacttggtctccaaaggatgaaccgagctcggcgtggcaaactgccaattgtcattactgaaggaaggataaggcctgtggcaccaattgttgctgcaaagtttgcaactgagtgcaacattgcagttcggaatcatgtgcttgtgcttaagtcatggaaggaatacgagaagcatcctgggctctttaaattgtttacagcaaaacttagtgcaaagtttgatatcaatacagaagatgcgctagttaaaaatgcttgtttccaaatgatgaggaatgcactgcgccaacaacgatataagctgaagaaacaatattttgacccttttccgctacatctagtgaggaaaacatctcctatcaaatcgacaagtgatgaacaatggaatgaccttgtggaacattggaaaggtccaaaaaatatggcgacatgtgaacataacaaaggcaaccgaggcaaagttaagttccatcaaacaactggatctcgtagctatatggttcatgtagaaaatttgggggacaagtacatggatcaagaacctgatgcattggatctgttcaaggagtgccactacagtaagaaaaagcaaggctacacttccactgtacaactggctattactcaaatggaagacaagcgatctacaccaggagaaggtgaacaaccaatgtctacgactcaggttgtagctgatgtgcttgctgagaacacaaagaagaatcggtttcttcaaaatgtgggaatccaaaatgcacgacctagatctagtgtacaaaatattgaagcacaacttgaagtagagaggaaggcaaatgcagagcttcaatcacttgtcagcatccaacgtgagcgcatggatgtattattaaagcaagtgcatgaagcagaactggtaaggattagagagcaagaagagatgaagaagaagcaagatgccatggatgctcaacttgagcttatgctaagtcagattcaaccaagttaaagctaactagtatggggtgttaggctttgttggtacttctcttttgctgatgctattgcattctattgatggataaatacgtttcaatccattttttgtctattgtgctgctagagtagctttagcggcatgtgtggtgtgttggagtggcttacgtgtcagtggttggatacttgctgtaatgacatgctattggatacttgcatgtaatgacatgctggagtgtggtcagtattttttgtgatgagatgctggattaaaatctgagttgtgatgtaatagaattcaacattttgtcattatgttctggattataattaatatatatttaaattattgtgtttgcaaaa

SEQ ID NO: 20770 - DNA, 2203 bp, Zea Mays
cccaattctctgcctccgccgccaggacgacggcaaatccgcccacgcaaaatatcagcccaagtgcccatcgcccaagcttcctagctcacccgccgccacccactagccaaattccccatccctctcctgccgccacccatcagccacatctctccctcctactccctctccggcagccatcatcagacaagatccctcccccaccatcgagccatgtcgagtcgagtgcatcttctgcaagcacggccatcttacgaaaccctagctggctcgaaggaccactactgtccggcgccctgaacaacttggcatgatgccgacgaagggtggagcaaacaaatcacaatgacatcgggtagtagatccaccattgcatccctatgaagaggagcgccttagacaatgtatgaggaacaattcgaggttgcaacaacttggaattcctgctttagtcagcatgtgtgggaacataaattccatctctaggaacaaaaagccaaataacagggataatgaagattctgaatctgagtatgatccttcacatgacgattctattgaaggggatttgtttgaccatgatgatcataataagaagggctcaaaggacactaacagaagaactattcacatggctcctggtggaatcaagcctcgaactaagagagtttatgcagagcaacatactactagaaatacaagctaatggccctacccaggttgacaacacccacatggccaatcgagaagatggctttgaccaatttgatgacaacatgaccaaccaaggggaaggcattacccagcctggtggaaaaggtgatggagtaaatcagcatagagaaaggggacttaatatgggacttggtctccaaaggatgaaccgagctcggcgtggcaaactgccaattgtcattactgaaggaaggataaggcctgtggcaccaattgttgctgcaaagtttgcaactgagtgcaacattgcagttcggaatcatgtgcttgtgcttaagtcatggaaggaatacgagaagcatcctgggctctttaaattgtttacagcaaaacttagtgcaaagtttgatatcaatacagaagatgcgctagttaaaaatgcttgtttccaaatgatgaggaatgcactgcgccaacaacgatataagctgaagaaacaatattttgacccttttccgctacatctagtgaggaaaacatctcctatcaaatcgacaagtgatgaacaatggaatgaccttgtggaacattggaaaggtccaaaaaatatggcgacatgtgaacataacaaaggcaaccgaggcaaagttaagttccatcaaacaactggatctcgtagctatatggttcatgtagaaaatttgggggacaagtacatggatcaagaacctgatgcattggatctgttcaaggagtgccactacagtaagaaaaagcaaggctacacttccactgtacaactggctattactcaaatggaagacaagcgatctacaccaggagaaggtgaacaaccaatgtctacgactcaggttgtagctgatgtgcttgctgagaacacaaagaagaatcggtttcttcaaaatgtgggaatccaaaatgcacgacctagatctagtgtacaaaatattgaagcacaacttgaagtagagaggaaggcaaatgcagagcttcaatcacttgtcagcatccaacgtgagcgcatggatgtattattaaagcaagtgcatgaagcagaactggtaaggattagagagcaagaagagatgaagaagaagcaagatgccatggatgctcaacttgagcttatgctaagtcagattcaaccaagttaaagctaactagtatggggtgttaggctttgttggtacttctcttttgctgatgctattgcattctattgatggataaatacgtttcaatccattttttgtctattgtgctgctagagtagctttagcggcatgtgtggtgtgttggagtggcttacgtgtcagtggttggatacttgctgtaatgacatgctattggatacttgcatgtaatgacatgctggagtgtggtcagtattttttgtgatgagatgctggattaaaatctgagttgtgatgtaatagaattcaacattttgtcattatgttctggattataattaatatatatttaaattattgtgtttgcaaaa

SEQ ID NO: 20771 - DNA, 2418 bp, Zea Mays
caattctctgcctccgccgccaggacgacggcaaatccgcccacgcaaaatatcagcccaagtgcccatcgcccaagcttcctagctcacccgccgccacccactagccaaattccccatccctctcctgccgccacccatcagccacatctctccctcctactccctctccggcagccatcatcagacaagatccctcccccaccatcgagccatgtcgagtcgagtgcatcttctgcaagcacggccatcttacgaaaccctagctggctcgaaggaccactactgtccggcgccctgaacaacttggcatgatgccgacgaagggtggagcaaacaaatcacaatgacatcgggtagtagatccaccattgcatccctatgaagaggagcgccttagacaatgtatgaggaacaattcgaggttgcaacaacttggaattcctgctttagtcagcatgtgtgggaacataaattccatctctaggaacaaaaagccaaataacagggataatgaagattctgaatctgagtatgatccttcacatgacgattctattgaaggggatttgtttgaccatgatgatcataataagaagggctcaaaggacactaacagaagaactattcacatggctcctggtggaatcaagcctcgaactaagagagtttatgcagagcaacatactactagaaatacaagctaatggccctacccaggttgacaacacccacatggccaatcgagatggctttgaccaatttgatgacaacatgaccaaccaaggggaaggcattacccagcctggtggaaaaggtgatggtatatttctatatttaccatattgcatattacatcactagttgcttgctaaacctatcatgtgtcattagtttctactttactggatgttcttttgaccttttcaattagattcatgtgccatgtgtcattagcttgtcaatagtccattggatgatcatctttgatccatgtttgatgcacctcacttattgcaatttctatgtgaatctaaaactaggagtaaatcagcatagagaaaggggacttaatatgggacttggtctccaaaggatgaaccgagctcggcgtggcaaactgccaattgtcattactgaaggaaggataaggcctgtggcaccaattgttgctgcaaagtttgcaactgagtgcaacattgcagttcggaatcatgtgcttgtgcttaagtcatggaaggaatacgagaagcatcctgggctctttaaattgtttacagcaaaacttagtgcaaagtttgatatcaatacagaagatgcgctagttaaaaatgcttgtttccaaatgatgaggaatgcactgcgccaacaacgatataagctgaagaaacaatattttgacccttttccgctacatctagtgaggaaaacatctcctatcaaatcgacaagtgatgaacaatggaatgaccttgtggaacattggaaaggtccaaaaaatatggcgacatgtgaacataacaaaggcaaccgaggcaaagttaagttccatcaaacaactggatctcgtagctatatggttcatgtagaaaatttgggggacaagtacatggatcaagaacctgatgcattggatctgttcaaggagtgccactacagtaagaaaaagcaaggctacacttccactgtacaactggctattactcaaatggaagacaagcgatctacaccaggagaaggtgaacaaccaatgtctacgactcaggttgtagctgatgtgcttgctgagaacacaaagaagaatcggtttcttcaaaatgtgggaatccaaaatgcacgacctagatctagtgtacaaaatattgaagcacaacttgaagtagagaggaaggcaaatgcagagcttcaatcacttgtcagcatccaacgtgagcgcatggatgtattattaaagcaagtgcatgaagcagaactggtaaggattagagagcaagaagagatgaagaagaagcaagatgccatggatgctcaacttgagcttatgctaagtcagattcaaccaagttaaagctaactagtatggggtgttaggctttgttggtacttctcttttgctgatgctattgcattctattgatggataaatacgtttcaatccattttttgtctattgtgctgctagagtagctttagcggcatgtgtggtgtgttggagtggcttacgtgtcagtggttggatacttgctgtaatgacatgctattggatacttgcatgtaatgacatgctggagtgtggtcagtattttttgtgatgagatgctggattaaaatctgagttgtgatgtaatagaattcaacattttgtcattatgttctggattataattaatatatatttaaattattgtgtttgcaaaa

SEQ ID NO: 20772 - DNA, 2338 bp, Zea Mays
caattctctgcctccgccgccaggacgacggcaaatccgcccacgcaaaatatcagcccaagtgcccatcgcccaagcttcctagctcacccgccgccacccactagccaaattccccatccctctcctgccgccacccatcagccacatctctccctcctactccctctccggcagccatcatcagacaagatccctcccccaccatcgagccatgtcgagtcgagtgcatcttctgcaagcacggccatcttacgaaaccctagctggctcgaaggaccactactgtccggcgccctgaacaacttggcatgatgccgacgaagggtggagcaaacaaatcacaatgacatcgggtagtagatccaccattgcatccctatgaagaggagcgccttagacaatgtatgaggaacaattcgaggttgcaacaacttggaattcctgctttagtcagcatgtgtgggaacataaattccatctctaggaacaaaaagccaaataacagggataatgaagattctgaatctgagtatgatccttcacatgacgattctattgaaggggatttgtttgaccatgatgatcataataagaagggctcaaaggacactaacagaagaactattcacatggctcctggtggaatcaagcctcgaactaagagagtttatgcagagcaacatactactagaaatacaaggtcaaagaaaagcattgctcagcctgacacaagtctaacacgaagtgacatctatgtgccaccaccctcgctatctcatttgacccaagttggagaagttgctcgtagcattgaaaaccatagaaagactagtgttgaagctaatggccctacccaggttgacaacacccacatggccaatcgagatggctttgaccaatttgatgacaacatgaccaaccaaggggaaggcattacccagcctggtggaaaaggtgatggagtaaatcagcatagagaaaggggacttaatatgggacttggtctccaaaggatgaaccgagctcggcgtggcaaactgccaattgtcattactgaaggaaggataaggcctgtggcaccaattgttgctgcaaagtttgcaactgagtgcaacattgcagttcggaatcatgtgcttgtgcttaagtcatggaaggaatacgagaagcatcctgggctctttaaattgtttacagcaaaacttagtgcaaagtttgatatcaatacagaagatgcgctagttaaaaatgcttgtttccaaatgatgaggaatgcactgcgccaacaacgatataagctgaagaaacaatattttgacccttttccgctacatctagtgaggaaaacatctcctatcaaatcgacaagtgatgaacaatggaatgaccttgtggaacattggaaaggtccaaaaaatatggcgacatgtgaacataacaaaggcaaccgaggcaaagttaagttccatcaaacaactggatctcgtagctatatggttcatgtagaaaatttgggggacaagtacatggatcaagaacctgatgcattggatctgttcaaggagtgccactacagtaagaaaaagcaaggctacacttccactgtacaactggctattactcaaatggaagacaagcgatctacaccaggagaaggtgaacaaccaatgtctacgactcaggttgtagctgatgtgcttgctgagaacacaaagaagaatcggtttcttcaaaatgtgggaatccaaaatgcacgacctagatctagtgtacaaaatattgaagcacaacttgaagtagagaggaaggcaaatgcagagcttcaatcacttgtcagcatccaacgtgagcgcatggatgtattattaaagcaagtgcatgaagcagaactggtaaggattagagagcaagaagagatgaagaagaagcaagatgccatggatgctcaacttgagcttatgctaagtcagattcaaccaagttaaagctaactagtatggggtgttaggctttgttggtacttctcttttgctgatgctattgcattctattgatggataaatacgtttcaatccattttttgtctattgtgctgctagagtagctttagcggcatgtgtggtgtgttggagtggcttacgtgtcagtggttggatacttgctgtaatgacatgctattggatacttgcatgtaatgacatgctggagtgtggtcagtattttttgtgatgagatgctggattaaaatctgagttgtgatgtaatagaattcaacattttgtcattatgttctggattataattaatatatatttaaattattgtgtttgcaaaa

SEQ ID NO: 20773 - DNA, 2497 bp, Zea Mays
cgccgccaggacgacggcaaatccgcccacgcaaaatatcagcccaagtgcccatcgcccaagcttcctagctcacccgccgccacccactagccaaattccccatccctctcctgccgccacccatcagccacatctctccctcctactccctctccggcagccatcatcagacaagatccctcccccaccatcgagccatgtcgagtcgagtgcatcttctgcaagcacggccatcttacgaaaccctagctggctcgaaggaccactactgtccggcgccctgaacaacttggcatgatgccgacgaagggtggagcaaacaaatcacaatgacatcgggtagtagatccaccattgcatccctatgaagaggagcgccttagacaatgtatgaggaacaattcgaggttgcaacaacttggaattcctgctttagtcagcatgtgtgggaacataaattccatctctaggaacaaaaagccaaataacagggataatgaagattctgaatctgagtatgatccttcacatgacgattctattgaaggggatttgtttgaccatgatgatcataataagggctcaaaggacactaacagaagaactattcacatggctcctggtggaatcaagcctcgaactaagagagtttatgcagagcaacatactactagaaatacaaggtcaaagaaaagcattgctcagcctgacacaagtctaacacgaagtgacatctatgtgccaccaccctcgctatctcatttgacccaagttggagaagttgctcgtagcattgaaaaccatagaaagactagtgttgaagctaatggccctacccaggttgacaacacccacatggccaatcgagatggctttgaccaatttgatgacaacatgaccaaccaaggggaaggcattacccagcctggtggaaaaggtgatggtatatttctatatttaccatattgcatattacatcactagttgcttgctaaacctatcatgtgtcattagtttctactttactggatgttcttttgaccttttcaattagattcatgtgccatgtgtcattagcttgtcaatagtccattggatgatcatctttgatccatgtttgatgcacctcacttattgcaatttctatgtgaatctaaaactaggagtaaatcagcatagagaaaggggacttaatatgggacttggtctccaaaggatgaaccgagctcggcgtggcaaactgccaattgtcattactgaaggaaggataaggcctgtggcaccaattgttgctgcaaagtttgcaactgagtgcaacattgcagttcggaatcatgtgcttgtgcttaagtcatggaaggaatacgagaagcatcctgggctctttaaattgtttacagcaaaacttagtgcaaagtttgatatcaatacagaagatgcgctagttaaaaatgcttgtttccaaatgatgaggaatgcactgcgccaacaacgatataagctgaagaaacaatattttgacccttttccgctacatctagtgaggaaaacatctcctatcaaatcgacaagtgatgaacaatggaatgaccttgtggaacattggaaaggtccaaaaaatatggcgacatgtgaacataacaaaggcaaccgaggcaaagttaagttccatcaaacaactggatctcgtagctatatggttcatgtagaaaatttgggggacaagtacatggatcaagaacctgatgcattggatctgttcaaggagtgccactacaactcaaatggaagacaagcgatctacaccaggagaaggtgaacaaccaatgtctacgactcaggttgtagctgatgtgcttgctgagaacacaaagaagaatcggtttcttcaaaatgtgggaatccaaaatgcacgacctagatctagtgtacaaaatattgaagcacaacttgaagtagagaggaaggcaaatgcagagcttcaatcacttgtcagcatccaacgtgagcgcatggatgtattattaaagcaagtgcatgaagcagaactggtaaggattagagagcaagaagagatgaagaagaagcaagatgccatggatgctcaacttgagcttatgctaagtcagattcaaccaagttaaagctaactagtatggggtgttaggctttgttggtacttctcttttgctgatgctattgcattctattgatggataaatacgtttcaatccattttttgtctattgtgctgctagagtagctttagcggcatgtgtggtgtgttggagtggcttacgtgtcagtggttggatacttgctgtaatgacatgctattggatacttgcatgtaatgacatgctggagtgtggtcagtattttttgtgatgagatgctggattaaaatctgagttgtgatgtaatagaattcaacattttgtcattatgttctggattataattaatatatatttaaattattgtgtttgcaaaa

SEQ ID NO: 20774 - DNA, 2175 bp, Zea Mays
cgccgccaggacgacggcaaatccgcccacgcaaaatatcagcccaagtgcccatcgcccaagcttcctagctcacccgccgccacccactagccaaattccccatccctctcctgccgccacccatcagccacatctctccctcctactccctctccggcagccatcatcagacaagatccctcccccaccatcgagccatgtcgagtcgagtgcatcttctgcaagcacggccatcttacgaaaccctagctggctcgaaggaccactactgtccggcgccctgaacaacttggcatgatgccgacgaagggtggagcaaacaaatcacaatgacatcgggtagtagatccaccattgcatccctatgaagaggagcgccttagacaatgtatgaggaacaattcgaggttgcaacaacttggaattcctgctttagtcagcatgtgtgggaacataaattccatctctaggaacaaaaagccaaataacagggataatgaagattctgaatctgagtatgatccttcacatgacgattctattgaaggggatttgtttgaccatgatgatcataataagggctcaaaggacactaacagaagaactattcacatggctcctggtggaatcaagcctcgaactaagagagtttatgcagagcaacatactactagaaatacaagctaatggccctacccaggttgacaacacccacatggccaatcgagatggctttgaccaatttgatgacaacatgaccaaccaaggggaaggcattacccagcctggtggaaaaggagtaaatcagcatagagaaaggggacttaatatgggacttggtctccaaaggatgaaccgagctcggcgtggcaaactgccaattgtcattactgaaggaaggataaggcctgtggcaccaattgttgctgcaaagtttgcaactgagtgcaacattgcagttcggaatcatgtgcttgtgcttaagtcatggaaggaatacgagaagcatcctgggctctttaaattgtttacagcaaaacttagtgcaaagtttgatatcaatacagaagatgcgctagttaaaaatgcttgtttccaaatgatgaggaatgcactgcgccaacaacgatataagctgaagaaacaatattttgacccttttccgctacatctagtgaggaaaacatctcctatcaaatcgacaagtgatgaacaatggaatgaccttgtggaacattggaaaggtccaaaaaatatggcgacatgtgaacataacaaaggcaaccgaggcaaagttaagttccatcaaacaactggatctcgtagctatatggttcatgtagaaaatttgggggacaagtacatggatcaagaacctgatgcattggatctgttcaaggagtgccactacagtaagaaaaagcaaggctacacttccactgtacaactggctattactcaaatggaagacaagcgatctacaccaggagaaggtgaacaaccaatgtctacgactcaggttgtagctgatgtgcttgctgagaacacaaagaagaatcggtttcttcaaaatgtgggaatccaaaatgcacgacctagatctagtgtacaaaatattgaagcacaacttgaagtagagaggaaggcaaatgcagagcttcaatcacttgtcagcatccaacgtgagcgcatggatgtattattaaagcaagtgcatgaagcagaactggtaaggattagagagcaagaagagatgaagaagaagcaagatgccatggatgctcaacttgagcttatgctaagtcagattcaaccaagttaaagctaactagtatggggtgttaggctttgttggtacttctcttttgctgatgctattgcattctattgatggataaatacgtttcaatccattttttgtctattgtgctgctagagtagctttagcggcatgtgtggtgtgttggagtggcttacgtgtcagtggttggatacttgctgtaatgacatgctattggatacttgcatgtaatgacatgctggagtgtggtcagtattttttgtgatgagatgctggattaaaatctgagttgtgatgtaatagaattcaacattttgtcattatgttctggattataattaatatatatttaaattattgtgtttgcaaaa

SEQ ID NO: 20775 - DNA, 1681 bp, Zea Mays
caggacgacggcaaatccgcccacgcaaaatatcagcccaagtgcccatcgcccaagcttcctagctcacccgccgccacccactagccaaattccccatccctctcctgccgccacccatcagccacatctctccctcctactccctctccggcagccatcatcagacaagatccctcccccaccatcgagccatgtcgagtcgagtgcatcttctgcaagcacggccatcttacgaaaccctagctggctcgaaggaccactactgtccggcgccctgaacaacttggcatgatgccgacgaagggtggagcaaacaaatcacaatgacatcgggtagtagatccaccattgcatccctatgaagaggagcgccttagacaatgtatgaggaacaattcgaggttgcaacaacttggaattcctgctttagtcagcatgtgtgggaacataaattccatctctaggaacaaaaagccaaataacagggataatgaagattctgaatctgagtatgatccttcacatgacgattctattgaaggggatttgtttgaccatgatgatcataataagggctcaaaggacactaacagaagaactattcacatggctcctggtggaatcaagcctcgaactaagagagtttatgcagagcaacatactactagaaatacaaggtcaaagaaaagcattgctcagcctgacacaagtctaacacgaagtgacatctatgtgccaccaccctcgctatctcatttgacccaagttggagaagttgctcgtagcattgaaaaccatagaaagactagtgttgaagctaatggccctacccaggttgacaacacccacatggccaatcgaggtgaggccattgctccacctaataaggggcacaaccagattggcaaccctaatgggcacaactagattgacatcggcgatgatgaattcttactaccattatattactttgattgtattgtgagtgcattcttactgtcttccttttttagaagatggctttgaccaatttgatgacaacatgaccaaccaaggggaaggcattacccagcctggtggaaaaggagtaaatcagcatagagaaaggggacttaatatgggacttggtctccaaaggatgaaccgagctcggcgtggcaaactgccaattgtcattactgaaggaaggataaggcctgtggcaccaattgttgctgcaaagtttgcaactgagtgcaacattgcagttcggaatcatgtgcttgtgcttaagtcatggaaggaatacgagaagcatcctgggctctttaaattgtttacagcaaaacttagtgcaaagtttgatatcaatacagaagatgcgctagttaaaaatgcttgtttccaaatgatgaggaatgcactgcgccaacaacgatataagctgaagaaacaatattttgacccttttccgctacatctagtgaggaaaacatctcctatcaaatcgacaagtgatgaacaatggaatgaccttgtggaacattggaaaggtccaaaaaatatggcgacatgtgaacataacaaaggcaaccgaggcaaagttaagttccatcaaacaactggatctcgtagctatatggttcatgtagaaaatttgtttcataaaataatcctactatcaagtgttgtgaacaag

SEQ ID NO: 20776 - DNA, 2401 bp, Zea Mays
caggacgacggcaaatccgcccacgcaaaatatcagcccaagtgcccatcgcccaagcttcctagctcacccgccgccacccactagccaaattccccatccctctcctgccgccacccatcagccacatctctccctcctactccctctccggcagccatcatcagacaagatccctcccccaccatcgagccatgtcgagtcgagtgcatcttctgcaagcacggccatcttacgaaaccctagctggctcgaaggaccactactgtccggcgccctgaacaacttggcatgatgccgacgaagggtggagcaaacaaatcacaatgacatcgggtagtagatccaccattgcatccctatgaagaggagcgccttagacaatgtatgaggaacaattcgaggttgcaacaacttggaattcctgctttagtcagcatgtgtgggaacataaattccatctctaggaacaaaaagccaaataacagggataatgaagattctgaatctgagtatgatccttcacatgacgattctattgaaggggatttgtttgaccatgatgatcataataagaagggctcaaaggacactaacagaagaactattcacatggctcctggtggaatcaagcctcgaactaagagagtttatgcagagcaacatactactagaaatacaagctaatggccctacccaggttgacaacacccacatggccaatcgagaagatggctttgaccaatttgatgacaacatgaccaaccaaggggaaggcattacccagcctggtggaaaaggtgatggtatatttctatatttaccatattgcatattacatcactagttgcttgctaaacctatcatgtgtcattagtttctactttactggatgttcttttgaccttttcaattagattcatgtgccatgtgtcattagcttgtcaatagtccattggatgatcatctttgatccatgtttgatgcacctcacttattgcaatttctatgtgaatctaaaactaggagtaaatcagcatagagaaaggggacttaatatgggacttggtctccaaaggatgaaccgagctcggcgtggcaaactgccaattgtcattactgaaggaaggataaggcctgtggcaccaattgttgctgcaaagtttgcaactgagtgcaacattgcagttcggaatcatgtgcttgtgcttaagtcatggaaggaatacgagaagcatcctgggctctttaaattgtttacagcaaaacttagtgcaaagtttgatatcaatacagaagatgcgctagttaaaaatgcttgtttccaaatgatgaggaatgcactgcgccaacaacgatataagctgaagaaacaatattttgacccttttccgctacatctagtgaggaaaacatctcctatcaaatcgacaagtgatgaacaatggaatgaccttgtggaacattggaaaggtccaaaaaatatggcgacatgtgaacataacaaaggcaaccgaggcaaagttaagttccatcaaacaactggatctcgtagctatatggttcatgtagaaaatttgggggacaagtacatggatcaagaacctgatgcattggatctgttcaaggagtgccactacagtaagaaaaagcaaggctacacttccactgtacaactggctattactcaaatggaagacaagcgatctacaccaggagaaggtgaacaaccaatgtctacgactcaggttgtagctgatgtgcttgctgagaacacaaagaagaatcggtttcttcaaaatgtgggaatccaaaatgcacgacctagatctagtgtacaaaatattgaagcacaacttgaagtagagaggaaggcaaatgcagagcttcaatcacttgtcagcatccaacgtgagcgcatggatgtattattaaagcaagtgcatgaagcagaactggtaaggattagagagcaagaagagatgaagaagaagcaagatgccatggatgctcaacttgagcttatgctaagtcagattcaaccaagttaaagctaactagtatggggtgttaggctttgttggtacttctcttttgctgatgctattgcattctattgatggataaatacgtttcaatccattttttgtctattgtgctgctagagtagctttagcggcatgtgtggtgtgttggagtggcttacgtgtcagtggttggatacttgctgtaatgacatgctattggatacttgcatgtaatgacatgctggagtgtggtcagtattttttgtgatgagatgctggattaaaatctgagttgtgatgtaatagaattcaacattttgtcattatgttctggattataattaatatatatttaaattattgtgtttgcaaaa

SEQ ID NO: 20777 - DNA, 2538 bp, Zea Mays
caggacgacggcaaatccgcccacgcaaaatatcagcccaagtgcccatcgcccaagcttcctagctcacccgccgccacccactagccaaattccccatccctctcctgccgccacccatcagccacatctctccctcctactccctctccggcagccatcatcagacaagatccctcccccaccatcgagccatgtcgagtcgagtgcatcttctgcaagcacggccatcttacgaaaccctagctggctcgaaggaccactactgtccggcgccctgaacaacttggcatgatgccgacgaagggtggagcaaacaaatcacaatgacatcgggtagtagatccaccattgcatccctatgaagaggagcgccttagacaatgtatgaggaacaattcgaggttgcaacaacttggaattcctgctttagtcagcatgtgtgggaacataaattccatctctaggaacaaaaagccaaataacagggataatgaagattctgaatctgagtatgatccttcacatgacgattctattgaaggggatttgtttgaccatgatgatcataataagggctcaaaggacactaacagaagaactattcacatggctcctggtggaatcaagcctcgaactaagagagtttatgcagagcaacatactactagaaatacaaggtcaaagaaaagcattgctcagcctgacacaagtctaacacgaagtgacatctatgtgccaccaccctcgctatctcatttgacccaagttggagaagttgctcgtagcattgaaaaccatagaaagactagtgttgaagctaatggccctacccaggttgacaacacccacatggccaatcgagaagatggctttgaccaatttgatgacaacatgaccaaccaaggggaaggcattacccagcctggtggaaaaggtgatggtatatttctatatttaccatattgcatattacatcactagttgcttgctaaacctatcatgtgtcattagtttctactttactggatgttcttttgaccttttcaattagattcatgtgccatgtgtcattagcttgtcaatagtccattggatgatcatctttgatccatgtttgatgcacctcacttattgcaatttctatgtgaatctaaaactaggagtaaatcagcatagagaaaggggacttaatatgggacttggtctccaaaggatgaaccgagctcggcgtggcaaactgccaattgtcattactgaaggaaggataaggcctgtggcaccaattgttgctgcaaagtttgcaactgagtgcaacattgcagttcggaatcatgtgcttgtgcttaagtcatggaaggaatacgagaagcatcctgggctctttaaattgtttacagcaaaacttagtgcaaagtttgatatcaatacagaagatgcgctagttaaaaatgcttgtttccaaatgatgaggaatgcactgcgccaacaacgatataagctgaagaaacaatattttgacccttttccgctacatctagtgaggaaaacatctcctatcaaatcgacaagtgatgaacaatggaatgaccttgtggaacattggaaaggtccaaaaaatatggcgacatgtgaacataacaaaggcaaccgaggcaaagttaagttccatcaaacaactggatctcgtagctatatggttcatgtagaaaatttgggggacaagtacatggatcaagaacctgatgcattggatctgttcaaggagtgccactacagtaagaaaaagcaaggctacacttccactgtacaactggctattactcaaatggaagacaagcgatctacaccaggagaaggtgaacaaccaatgtctacgactcaggttgtagctgatgtgcttgctgagaacacaaagaagaatcggtttcttcaaaatgtgggaatccaaaatgcacgacctagatctagtgtacaaaatattgaagcacaacttgaagtagagaggaaggcaaatgcagagcttcaatcacttgtcagcatccaacgtgagcgcatggatgtattattaaagcaagtgcatgaagcagaactggtaaggattagagagcaagaagagatgaagaagaagcaagatgccatggatgctcaacttgagcttatgctaagtcagattcaaccaagttaaagctaactagtatggggtgttaggctttgttggtacttctcttttgctgatgctattgcattctattgatggataaatacgtttcaatccattttttgtctattgtgctgctagagtagctttagcggcatgtgtggtgtgttggagtggcttacgtgtcagtggttggatacttgctgtaatgacatgctattggatacttgcatgtaatgacatgctggagtgtggtcagtattttttgtgatgagatgctggattaaaatctgagttgtgatgtaatagaattcaacattttgtcattatgttctggattataattaatatatatttaaattattgtgtttgcaaaa

SEQ ID NO: 20778 - DNA, 2138 bp, Zea Mays
caggacgacggcaaatccgcccacgcaaaatatcagcccaagtgcccatcgcccaagcttcctagctcacccgccgccacccactagccaaattccccatccctctcctgccgccacccatcagccacatctctccctcctactccctctccggcagccatcatcagacaagatccctcccccaccatcgagccatgtcgagtcgagtgcatcttctgcaagcacggccatcttacgaaaccctagctggctcgaaggaccactactgtccggcgccctgaacaacttggcatgatgccgacgaagggtggagcaaacaaatcacaatgacatcgggtagtagatccaccattgcatccctatgaagaggagcgccttagacaatgtatgaggaacaattcgaggttgcaacaacttggaattcctgctttagtcagcatgtgtgggaacataaattccatctctaggaacaaaaagccaaataacagggataatgaagattctgaatctgagtatgatccttcacatgacgattctattgaaggggatttgtttgaccatgatgatcataataagggctcaaaggacactaacagaagaactattcacatggctcctggtggaatcaagcctcgaactaagagagtttatgcagagcaacatactactagaaatacaagctaatggccctacccaggttgacaacacccacatggccaatcgagaagatggctttgaccaatttgatgacaacatgaccaaccaaggggaaggcattacccagcctggtggaaaaggagtaaatcagcatagagaaaggggacttaatatgggacttggtctccaaaggatgaaccgagctcggcgtggcaaactgccaattgtcattactgaaggaaggataaggcctgtggcaccaattgttgctgcaaagtttgcaactgagtgcaacattgcagttcggaatcatgtgcttgtgcttaagtcatggaaggaatacgagaagcatcctgggctctttaaattgtttacagcaaaacttagtgcaaagtttgatatcaatacagaagatgcgctagttaaaaatgcttgtttccaaatgatgaggaatgcactgcgccaacaacgatataagctgaagaaacaatattttgacccttttccgctacatctagtgaggaaaacatctcctatcaaatcgacaagtgatgaacaatggaatgaccttgtggaacattggaaaggtccaaaaaatatggcgacatgtgaacataacaaaggcaaccgaggcaaagttaagttccatcaaacaactggatctcgtagctatatggttcatgtagaaaatttgggggacaagtacatggatcaagaacctgatgcattggatctgttcaaggagtgccactacagtaagaaaaaactcaaatggaagacaagcgatctacaccaggagaaggtgaacaaccaatgtctacgactcaggttgtagctgatgtgcttgctgagaacacaaagaagaatcggtttcttcaaaatgtgggaatccaaaatgcacgacctagatctagtgtacaaaatattgaagcacaacttgaagtagagaggaaggcaaatgcagagcttcaatcacttgtcagcatccaacgtgagcgcatggatgtattattaaagcaagtgcatgaagcagaactggtaaggattagagagcaagaagagatgaagaagaagcaagatgccatggatgctcaacttgagcttatgctaagtcagattcaaccaagttaaagctaactagtatggggtgttaggctttgttggtacttctcttttgctgatgctattgcattctattgatggataaatacgtttcaatccattttttgtctattgtgctgctagagtagctttagcggcatgtgtggtgtgttggagtggcttacgtgtcagtggttggatacttgctgtaatgacatgctattggatacttgcatgtaatgacatgctggagtgtggtcagtattttttgtgatgagatgctggattaaaatctgagttgtgatgtaatagaattcaacattttgtcattatgttctggattataattaatatatatttaaattattgtgtttgcaaaa

SEQ ID NO: 20779 - DNA, 2175 bp, Zea Mays
caggacgacggcaaatccgcccacgcaaaatatcagcccaagtgcccatcgcccaagcttcctagctcacccgccgccacccactagccaaattccccatccctctcctgccgccacccatcagccacatctctccctcctactccctctccggcagccatcatcagacaagatccctcccccaccatcgagccatgtcgagtcgagtgcatcttctgcaagcacggccatcttacgaaaccctagctggctcgaaggaccactactgtccggcgccctgaacaacttggcatgatgccgacgaagggtggagcaaacaaatcacaatgacatcgggtagtagatccaccattgcatccctatgaagaggagcgccttagacaatgtatgaggaacaattcgaggttgcaacaacttggaattcctgctttagtcagcatgtgtgggaacataaattccatctctaggaacaaaaagccaaataacagggataatgaagattctgaatctgagtatgatccttcacatgacgattctattgaaggggatttgtttgaccatgatgatcataataagaagggctcaaaggacactaacagaagaactattcacatggctcctggtggaatcaagcctcgaactaagagagtttatgcagagcaacatactactagaaatacaagctaatggccctacccaggttgacaacacccacatggccaatcgagatggctttgaccaatttgatgacaacatgaccaaccaaggggaaggcattacccagcctggtggaaaaggtgatgtaaatcagcatagagaaaggggacttaatatgggacttggtctccaaaggatgaaccgagctcggcgtggcaaactgccaattgtcattactgaaggaaggataaggcctgtggcaccaattgttgctgcaaagtttgcaactgagtgcaacattgcagttcggaatcatgtgcttgtgcttaagtcatggaaggaatacgagaagcatcctgggctctttaaattgtttacagcaaaacttagtgcaaagtttgatatcaatacagaagatgcgctagttaaaaatgcttgtttccaaatgatgaggaatgcactgcgccaacaacgatataagctgaagaaacaatattttgacccttttccgctacatctagtgaggaaaacatctcctatcaaatcgacaagtgatgaacaatggaatgaccttgtggaacattggaaaggtccaaaaaatatggcgacatgtgaacataacaaaggcaaccgaggcaaagttaagttccatcaaacaactggatctcgtagctatatggttcatgtagaaaatttgggggacaagtacatggatcaagaacctgatgcattggatctgttcaaggagtgccactacagtaagaaaaagcaaggctacacttccactgtacaactggctattactcaaatggaagacaagcgatctacaccaggagaaggtgaacaaccaatgtctacgactcaggttgtagctgatgtgcttgctgagaacacaaagaagaatcggtttcttcaaaatgtgggaatccaaaatgcacgacctagatctagtgtacaaaatattgaagcacaacttgaagtagagaggaaggcaaatgcagagcttcaatcacttgtcagcatccaacgtgagcgcatggatgtattattaaagcaagtgcatgaagcagaactggtaaggattagagagcaagaagagatgaagaagaagcaagatgccatggatgctcaacttgagcttatgctaagtcagattcaaccaagttaaagctaactagtatggggtgttaggctttgttggtacttctcttttgctgatgctattgcattctattgatggataaatacgtttcaatccattttttgtctattgtgctgctagagtagctttagcggcatgtgtggtgtgttggagtggcttacgtgtcagtggttggatacttgctgtaatgacatgctattggatacttgcatgtaatgacatgctggagtgtggtcagtattttttgtgatgagatgctggattaaaatctgagttgtgatgtaatagaattcaacattttgtcattatgttctggattataattaatatatatttaaattattgtgtttgcaaaa

SEQ ID NO: 20780 - DNA, 2175 bp, Zea Mays
caggacgacggcaaatccgcccacgcaaaatatcagcccaagtgcccatcgcccaagcttcctagctcacccgccgccacccactagccaaattccccatccctctcctgccgccacccatcagccacatctctccctcctactccctctccggcagccatcatcagacaagatccctcccccaccatcgagccatgtcgagtcgagtgcatcttctgcaagcacggccatcttacgaaaccctagctggctcgaaggaccactactgtccggcgccctgaacaacttggcatgatgccgacgaagggtggagcaaacaaatcacaatgacatcgggtagtagatccaccattgcatccctatgaagaggagcgccttagacaatgtatgaggaacaattcgaggttgcaacaacttggaattcctgctttagtcagcatgtgtgggaacataaattccatctctaggaacaaaaagccaaataacagggataatgaagattctgaatctgagtatgatccttcacatgacgattctattgaaggggatttgtttgaccatgatgatcataataagaagggctcaaaggacactaacagaagaactattcacatggctcctggtggaatcaagcctcgaactaagagagtttatgcagagcaacatactactagaaatacaagctaatggccctacccaggttgacaacacccacatggccaatcgagaagatggctttgaccaatttgatgacaacatgaccaaccaaggggaaggcattacccagcctggtggaaaaggagtaaatcagcatagagaaaggggacttaatatgggacttggtctccaaaggatgaaccgagctcggcgtggcaaactgccaattgtcattactgaaggaaggataaggcctgtggcaccaattgttgctgcaaagtttgcaactgagtgcaacattgcagttcggaatcatgtgcttgtgcttaagtcatggaaggaatacgagaagcatcctgggctctttaaattgtttacagcaaaacttagtgcaaagtttgatatcaatacagaagatgcgctagttaaaaatgcttgtttccaaatgatgaggaatgcactgcgccaacaacgatataagctgaagaaacaatattttgacccttttccgctacatctagtgaggaaaacatctcctatcaaatcgacaagtgatgaacaatggaatgaccttgtggaacattggaaaggtccaaaaaatatggcgacatgtgaacataacaaaggcaaccgaggcaaagttaagttccatcaaacaactggatctcgtagctatatggttcatgtagaaaatttgggggacaagtacatggatcaagaacctgatgcattggatctgttcaaggagtgccactacagtaagaaaaagcaaggctacacttccactgtacaactggctattactcaaatggaagacaagcgatctacaccaggagaaggtgaacaaccaatgtctacgactcaggttgtagctgatgtgcttgctgagaacacaaagaagaatcggtttcttcaaaatgtgggaatccaaaatgcacgacctagatctagtgtacaaaatattgaagcacaacttgaagtagagaggaaggcaaatgcagagcttcaatcacttgtcagcatccaacgtgagcgcatggatgtattattaaagcaagtgcatgaagcagaactggtaaggattagagagcaagaagagatgaagaagaagcaagatgccatggatgctcaacttgagcttatgctaagtcagattcaaccaagttaaagctaactagtatggggtgttaggctttgttggtacttctcttttgctgatgctattgcattctattgatggataaatacgtttcaatccattttttgtctattgtgctgctagagtagctttagcggcatgtgtggtgtgttggagtggcttacgtgtcagtggttggatacttgctgtaatgacatgctattggatacttgcatgtaatgacatgctggagtgtggtcagtattttttgtgatgagatgctggattaaaatctgagttgtgatgtaatagaattcaacattttgtcattatgttctggattataattaatatatatttaaattattgtgtttgcaaaa

SEQ ID NO: 20781 - DNA, 2268 bp, Zea Mays
caggacgacggcaaatccgcccacgcaaaatatcagcccaagtgcccatcgcccaagcttcctagctcacccgccgccacccactagccaaattccccatccctctcctgccgccacccatcagccacatctctccctcctactccctctccggcagccatcatcagacaagatccctcccccaccatcgagccatgtcgagtcgagtgcatcttctgcaagcacggccatcttacgaaaccctagctggctcgaaggaccactactgtccggcgccctgaacaacttggcatgatgccgacgaagggtggagcaaacaaatcacaatgacatcgggtagtagatccaccattgcatccctatgaagaggagcgccttagacaatgtatgaggaacaattcgaggttgcaacaacttggaattcctgctttagtcagcatgtgtgggaacataaattccatctctaggaacaaaaagccaaataacagggataatgaagattctgaatctgagtatgatccttcacatgacgattctattgaaggggatttgtttgaccatgatgatcataataagggctcaaaggacactaacagaagaactattcacatggctcctggtggaatcaagcctcgaactaagagagtttatgcagagcaacatactactagaaatacaaggtcaaagaaaagcattgctcagcctgacacaagtctaacacgaagtgacatctatgtgccaccaccctcgctatctcatttgacccaagttggagaagttgctcgtagcattgaaaaccatagaaagactagtgttgaagctaatggccctacccaggttgacaacacccacatggccaatcgagatggctttgaccaatttgatgacaacatgaccaaccaaggggaaggcattacccagcctggtggaaaaggtgatgtaaatcagcatagagaaaggggacttaatatgggacttggtctccaaaggatgaaccgagctcggcgtggcaaactgccaattgtcattactgaaggaaggataaggcctgtggcaccaattgttgctgcaaagtttgcaactgagtgcaacattgcagttcggaatcatgtgcttgtgcttaagtcatggaaggaatacgagaagcatcctgggctctttaaattgtttacagcaaaacttagtgcaaagtttgatatcaatacagaagatgcgctagttaaaaatgcttgtttccaaatgatgaggaatgcactgcgccaacaacgatataagctgaagaaacaatattttgacccttttccgctacatctagtgaggaaaacatctcctatcaaatcgacaagtgatgaacaatggaatgaccttgtggaacattggaaaggtccaaaaaatatggcgacatgtgaacataacaaaggcaaccgaggcaaagttaagttccatcaaacaactggatctcgtagctatatggttcatgtagaaaatttgggggacaagtacatggatcaagaacctgatgcattggatctgttcaaggagtgccactacaactcaaatggaagacaagcgatctacaccaggagaaggtgaacaaccaatgtctacgactcaggttgtagctgatgtgcttgctgagaacacaaagaagaatcggtttcttcaaaatgtgggaatccaaaatgcacgacctagatctagtgtacaaaatattgaagcacaacttgaagtagagaggaaggcaaatgcagagcttcaatcacttgtcagcatccaacgtgagcgcatggatgtattattaaagcaagtgcatgaagcagaactggtaaggattagagagcaagaagagatgaagaagaagcaagatgccatggatgctcaacttgagcttatgctaagtcagattcaaccaagttaaagctaactagtatggggtgttaggctttgttggtacttctcttttgctgatgctattgcattctattgatggataaatacgtttcaatccattttttgtctattgtgctgctagagtagctttagcggcatgtgtggtgtgttggagtggcttacgtgtcagtggttggatacttgctgtaatgacatgctattggatacttgcatgtaatgacatgctggagtgtggtcagtattttttgtgatgagatgctggattaaaatctgagttgtgatgtaatagaattcaacattttgtcattatgttctggattataattaatatatatttaaattattgtgtttgcaaaa

SEQ ID NO: 20782 - DNA, 2312 bp, Zea Mays
caggacgacggcaaatccgcccacgcaaaatatcagcccaagtgcccatcgcccaagcttcctagctcacccgccgccacccactagccaaattccccatccctctcctgccgccacccatcagccacatctctccctcctactccctctccggcagccatcatcagacaagatccctcccccaccatcgagccatgtcgagtcgagtgcatcttctgcaagcacggccatcttacgaaaccctagctggctcgaaggaccactactgtccggcgccctgaacaacttggcatgatgccgacgaagggtggagcaaacaaatcacaatgacatcgggtagtagatccaccattgcatccctatgaagaggagcgccttagacaatgtatgaggaacaattcgaggttgcaacaacttggaattcctgctttagtcagcatgtgtgggaacataaattccatctctaggaacaaaaagccaaataacagggataatgaagattctgaatctgagtatgatccttcacatgacgattctattgaaggggatttgtttgaccatgatgatcataataagaagggctcaaaggacactaacagaagaactattcacatggctcctggtggaatcaagcctcgaactaagagagtttatgcagagcaacatactactagaaatacaaggtcaaagaaaagcattgctcagcctgacacaagtctaacacgaagtgacatctatgtgccaccaccctcgctatctcatttgacccaagttggagaagttgctcgtagcattgaaaaccatagaaagactagtgttgaagctaatggccctacccaggttgacaacacccacatggccaatcgagatggctttgaccaatttgatgacaacatgaccaaccaaggggaaggcattacccagcctggtggaaaaggagtaaatcagcatagagaaaggggacttaatatgggacttggtctccaaaggatgaaccgagctcggcgtggcaaactgccaattgtcattactgaaggaaggataaggcctgtggcaccaattgttgctgcaaagtttgcaactgagtgcaacattgcagttcggaatcatgtgcttgtgcttaagtcatggaaggaatacgagaagcatcctgggctctttaaattgtttacagcaaaacttagtgcaaagtttgatatcaatacagaagatgcgctagttaaaaatgcttgtttccaaatgatgaggaatgcactgcgccaacaacgatataagctgaagaaacaatattttgacccttttccgctacatctagtgaggaaaacatctcctatcaaatcgacaagtgatgaacaatggaatgaccttgtggaacattggaaaggtccaaaaaatatggcgacatgtgaacataacaaaggcaaccgaggcaaagttaagttccatcaaacaactggatctcgtagctatatggttcatgtagaaaatttgggggacaagtacatggatcaagaacctgatgcattggatctgttcaaggagtgccactacagtaagaaaaagcaaggctacacttccactgtacaactggctattactcaaatggaagacaagcgatctacaccaggagaaggtgaacaaccaatgtctacgactcaggttgtagctgatgtgcttgctgagaacacaaagaagaatcggtttcttcaaaatgtgggaatccaaaatgcacgacctagatctagtgtacaaaatattgaagcacaacttgaagtagagaggaaggcaaatgcagagcttcaatcacttgtcagcatccaacgtgagcgcatggatgtattattaaagcaagtgcatgaagcagaactggtaaggattagagagcaagaagagatgaagaagaagcaagatgccatggatgctcaacttgagcttatgctaagtcagattcaaccaagttaaagctaactagtatggggtgttaggctttgttggtacttctcttttgctgatgctattgcattctattgatggataaatacgtttcaatccattttttgtctattgtgctgctagagtagctttagcggcatgtgtggtgtgttggagtggcttacgtgtcagtggttggatacttgctgtaatgacatgctattggatacttgcatgtaatgacatgctggagtgtggtcagtattttttgtgatgagatgctggattaaaatctgagttgtgatgtaatagaattcaacattttgtcattatgttctggattataattaatatatatttaaattattgtgtttgcaaaa

SEQ ID NO: 20783 - DNA, 2175 bp, Zea Mays
caggacgacggcaaatccgcccacgcaaaatatcagcccaagtgcccatcgcccaagcttcctagctcacccgccgccacccactagccaaattccccatccctctcctgccgccacccatcagccacatctctccctcctactccctctccggcagccatcatcagacaagatccctcccccaccatcgagccatgtcgagtcgagtgcatcttctgcaagcacggccatcttacgaaaccctagctggctcgaaggaccactactgtccggcgccctgaacaacttggcatgatgccgacgaagggtggagcaaacaaatcacaatgacatcgggtagtagatccaccattgcatccctatgaagaggagcgccttagacaatgtatgaggaacaattcgaggttgcaacaacttggaattcctgctttagtcagcatgtgtgggaacataaattccatctctaggaacaaaaagccaaataacagggataatgaagattctgaatctgagtatgatccttcacatgacgattctattgaaggggatttgtttgaccatgatgatcataataagggctcaaaggacactaacagaagaactattcacatggctcctggtggaatcaagcctcgaactaagagagtttatgcagagcaacatactactagaaatacaagctaatggccctacccaggttgacaacacccacatggccaatcgagatggctttgaccaatttgatgacaacatgaccaaccaaggggaaggcattacccagcctggtggaaaaggtgatggagtaaatcagcatagagaaaggggacttaatatgggacttggtctccaaaggatgaaccgagctcggcgtggcaaactgccaattgtcattactgaaggaaggataaggcctgtggcaccaattgttgctgcaaagtttgcaactgagtgcaacattgcagttcggaatcatgtgcttgtgcttaagtcatggaaggaatacgagaagcatcctgggctctttaaattgtttacagcaaaacttagtgcaaagtttgatatcaatacagaagatgcgctagttaaaaatgcttgtttccaaatgatgaggaatgcactgcgccaacaacgatataagctgaagaaacaatattttgacccttttccgctacatctagtgaggaaaacatctcctatcaaatcgacaagtgatgaacaatggaatgaccttgtggaacattggaaaggtccaaaaaatatggcgacatgtgaacataacaaaggcaaccgaggcaaagttaagttccatcaaacaactggatctcgtagctatatggttcatgtagaaaatttgggggacaagtacatggatcaagaacctgatgcattggatctgttcaaggagtgccactacagtaagaaaaagcaaggctacacttccactgtacaactggctattactcaaatggaagacaagcgatctacaccaggagaaggtgaacaaccaatgtctacgactcaggttgtagctgatgtgcttgctgagaacacaaagaagaatcggtttcttcaaaatgtgggaatccaaaatgcacgacctagatctagtgtacaaaatattgaagcacaacttgaagtagagaggaaggcaaatgcagagcttcaatcacttgtcagcatccaacgtgagcgcatggatgtattattaaagcaagtgcatgaagcagaactggtaaggattagagagcaagaagagatgaagaagaagcaagatgccatggatgctcaacttgagcttatgctaagtcagattcaaccaagttaaagctaactagtatggggtgttaggctttgttggtacttctcttttgctgatgctattgcattctattgatggataaatacgtttcaatccattttttgtctattgtgctgctagagtagctttagcggcatgtgtggtgtgttggagtggcttacgtgtcagtggttggatacttgctgtaatgacatgctattggatacttgcatgtaatgacatgctggagtgtggtcagtattttttgtgatgagatgctggattaaaatctgagttgtgatgtaatagaattcaacattttgtcattatgttctggattataattaatatatatttaaattattgtgtttgcaaaa

SEQ ID NO: 20784 - DNA, 2304 bp, Zea Mays
caggacgacggcaaatccgcccacgcaaaatatcagcccaagtgcccatcgcccaagcttcctagctcacccgccgccacccactagccaaattccccatccctctcctgccgccacccatcagccacatctctccctcctactccctctccggcagccatcatcagacaagatccctcccccaccatcgagccatgtcgagtcgagtgcatcttctgcaagcacggccatcttacgaaaccctagctggctcgaaggaccactactgtccggcgccctgaacaacttggcatgatgccgacgaagggtggagcaaacaaatcacaatgacatcgggtagtagatccaccattgcatccctatgaagaggagcgccttagacaatgtatgaggaacaattcgaggttgcaacaacttggaattcctgctttagtcagcatgtgtgggaacataaattccatctctaggaacaaaaagccaaataacagggataatgaagattctgaatctgagtatgatccttcacatgacgattctattgaaggggatttgtttgaccatgatgatcataataagaagggctcaaaggacactaacagaagaactattcacatggctcctggtggaatcaagcctcgaactaagagagtttatgcagagcaacatactactagaaatacaaggtcaaagaaaagcattgctcagcctgacacaagtctaacacgaagtgacatctatgtgccaccaccctcgctatctcatttgacccaagttggagaagttgctcgtagcattgaaaaccatagaaagactagtgttgaagctaatggccctacccaggttgacaacacccacatggccaatcgagaagatggctttgaccaatttgatgacaacatgaccaaccaaggggaaggcattacccagcctggtggaaaagcatagagaaaggggacttaatatgggacttggtctccaaaggatgaaccgagctcggcgtggcaaactgccaattgtcattactgaaggaaggataaggcctgtggcaccaattgttgctgcaaagtttgcaactgagtgcaacattgcagttcggaatcatgtgcttgtgcttaagtcatggaaggaatacgagaagcatcctgggctctttaaattgtttacagcaaaacttagtgcaaagtttgatatcaatacagaagatgcgctagttaaaaatgcttgtttccaaatgatgaggaatgcactgcgccaacaacgatataagctgaagaaacaatattttgacccttttccgctacatctagtgaggaaaacatctcctatcaaatcgacaagtgatgaacaatggaatgaccttgtggaacattggaaaggtccaaaaaatatggcgacatgtgaacataacaaaggcaaccgaggcaaagttaagttccatcaaacaactggatctcgtagctatatggttcatgtagaaaatttgggggacaagtacatggatcaagaacctgatgcattggatctgttcaaggagtgccactacagtaagaaaaagcaaggctacacttccactgtacaactggctattactcaaatggaagacaagcgatctacaccaggagaaggtgaacaaccaatgtctacgactcaggttgtagctgatgtgcttgctgagaacacaaagaagaatcggtttcttcaaaatgtgggaatccaaaatgcacgacctagatctagtgtacaaaatattgaagcacaacttgaagtagagaggaaggcaaatgcagagcttcaatcacttgtcagcatccaacgtgagcgcatggatgtattattaaagcaagtgcatgaagcagaactggtaaggattagagagcaagaagagatgaagaagaagcaagatgccatggatgctcaacttgagcttatgctaagtcagattcaaccaagttaaagctaactagtatggggtgttaggctttgttggtacttctcttttgctgatgctattgcattctattgatggataaatacgtttcaatccattttttgtctattgtgctgctagagtagctttagcggcatgtgtggtgtgttggagtggcttacgtgtcagtggttggatacttgctgtaatgacatgctattggatacttgcatgtaatgacatgctggagtgtggtcagtattttttgtgatgagatgctggattaaaatctgagttgtgatgtaatagaattcaacattttgtcattatgttctggattataattaatatatatttaaattattgtgtttgcaaaa

SEQ ID NO: 20785 - DNA, 1370 bp, Zea Mays
cgcttcgtctctcttcgctcgacttccagaaccctttttgcggcttgagtagcccctcaagccattccgctgcagcctctcttactcgatggagctctagccccagcgctctccttccgcagccattcctctgtgtatcatgttcgtgtgcggtgccgagttatagctcaaggcttgcgggaggccaatactacgatctcgccatcatgcgcaccatcctcaacttcgccttctacaagccgaccgacgaactcaagttttacagaaacgttcccgatctgatgctttaaaagatgggcgcaaaggctcctttcccgatctgatgcttcttttcttttcccctttttattttatccttcttcttttatagttcccttagatcaggttccacataaaaaaataccagaaaagaaatatgcaaacaactcattagcaaacaaagctttgtttttggaacaacgctgggcagtacctctactccttaaggactacaccaacgaggttcacaactcagactacaaagtcattccagttctctctgttctaacaaattatggaacacataattatgcacaagaattgcttacgcaagatgatgcatttagccttccaagtacacaagattctccagcaatatcgtttggtatatattctccacgtgcaccaatcaaaaaactggacgacgcgacaaactcgcatattcccacatgctacgcgatactgaggatcatgaactctgcacgtcaacatgacaaggacagactgccctcgccaccctaagatcaggactagccaacttcgcatactctaatctgattctatataatctggtgaccatggcagttatattatatcgtaagttgcaccgaggcttgcaaaggtcgtccacgttgctagaacgagtttgcttttgtgtatagaggaccaaactgataaaggccatccaatttcgtatatgtttctaccacccatatcagtaagctctatcttatgtttaatggagactatgtgtcttatcgtgtaagtttgctctacaactaaactgtaacggtgatagtcatcatggtagactcatcttaggtttgtactgtgatgtatactataatatttatctgcttcacaaccaatattgtcactttaaacaggtatttaccatgctaatatccaacacattaatgttctatgaacaattcaatgtactatttaccacgcgcgcctatgggcgcgcccaatacactagtgtattacagatggaaacagattctctgctgggtgctccttatcggacatcaatttcacctcccttttcgagggctccccgcccccctccaaccctatccgccatttgtcccgcagccaacgcgcaagcg

SEQ ID NO: 20786 - DNA, 956 bp, Zea Mays
cttcgtctctcttcgctcgacttccagaaccctttttgcggcttgagtagcccctcaagccattccgctgcagcctctcttactcgatggagctctagccccagcgctctccttccgcagccattcctctgtgtatcatgttcgtgtgcggtgccgagttatagctcaaggcttgcgggaggccaatactacgatctcgccatcatgcgcaccatcctcaacttcgccttctacaagccgaccgacgaactcaagttatgtgcctttcctcaccggtccatgtgcccagtgctcctgtagaagatcggtaggtgccatgctagaaaagcctctacacacccaaaaacccgccatcagtgctgagccgccgacgggagtccatccctcttcctcccctgaaacgtcgtcgcccgccacccttctcccccagtagtgtcgcgatgctggctcaagacaccgcctttcctttcttgaacgaagtcaagatgctgcatgtgttgaggatatactccatatgattatccgtgtcctttcacagaactcgcttgtaccatctttcttggagtaggttttacagaaacgttcccgatctgatgctttaaaagatgggcgcaaaggctcctttcccgatctgatgcttcttttcttttcccctttttattttatccttcttcttttatagttcccttagatcaggttccacataaaaaaataccagaaaagaaatatgcaaacaactcattagcaaacaaaggtgagatttcaagaatcaaattgtacactttctcaaggcttcagctccaatatgtcttgtaaattcagtgtattaacgatacataaaggattggattttgtgttttgaatccttcgtggcagctttgtttttggaacaacgctgggcagtacctctactccttaaggactacaccaacgagcttgatcacaggatcatgaac

SEQ ID NO: 20787 - DNA, 1678 bp, Zea Mays
cttcgtctctcttcgctcgacttccagaaccctttttgcggcttgagtagcccctcaagccattccgctgcagcctctcttactcgatggagctctagccccagcgctctccttccgcagccattcctctgtgtatcatgttcgtgtgcggtgccgagttatagctcaaggcttgcgggaggccaatactacgatctcgccatcatgcgcaccatcctcaacttcgccttctacaagccgaccgacgaactcaagttatgtgcctttcctcaccggtccatgtgcccagtgctcctgtagaagatcggtaggtgccatgctagaaaagcctctacacacccaaaaacccgccatcagtgctgagccgccgacgggagtccatccctcttcctcccctgaaacgtcgtcgcccgccacccttctcccccagtagtgtcgcgatgctggctcaagacaccgcctttcctttcttgaacgaagtcaagatgctgcatgtgttgaggatatactccatatgattatccgtgtcctttcacagaactcgcttgtaccatctttcttggagtaggttttacagaaacgttcccgatctgatgctttaaaagatgggcgcaaaggctcctttcccgatctgatgcttcttttcttttcccctttttattttatccttcttcttttatagttcccttagatcaggttccacataaaaaaataccagaaaagaaatatgcaaacaactcattagcaaacaaagctttgtttttggaacaacgctgggcagtacctctactccttaaggactacaccaacgaggttcacaactcagactacaaagtcattccagttctctctgttctaacaaattatggaacacataattatgcacaagaattgcttacgcaagatgatgcatttagccttccaagtacacaagattctccagcaatatcgtttggtatatattctccacgtgcaccaatcaaaaaactggacgacgcgacaaactcgcatattcccacatgctacgcgatactgagcttgatcacaggatcatgaactctgcacgtcaacatgacaaggacagactgccctcgccaccctaagatcaggactagccaacttcgcatactctaatctgattctatataatctggtgaccatggcagttatattatatcgcttgcaaaggtcgtccacgttgctagaacgagtttgcttttgtgtatagaggaccaaactgataaaggccatccaatttcgtatatgtttctaccacccatatcagtaagctctatcttatgtttaatggagactatgtgtcttatcgtgtaagtttgctctacaactaaactgtaacggtgatagtcatcatggtagactcatcttaggtttgtactgtgatgtatactataatatttatctgcttcacaaccaatattgtcactttaaacaggtatttaccatgctaatatccaacacattaatgttctatgaacaattcaatgtactatttaccacgcgcgcctatgggcgcgcccaatacactagtgtattacagatggaaacagattctctgctgggtgctccttatcggacatcaatttcacctcccttttcgagggctccccgcccccctccaaccctatccgccatttgtcccgcagccaacgcgcaagcg

SEQ ID NO: 20788 - DNA, 1693 bp, Zea Mays
cttcgtctctcttcgctcgacttccagaaccctttttgcggcttgagtagcccctcaagccattccgctgcagcctctcttactcgatggagctctagccccagcgctctccttccgcagccattcctctgtgtatcatgttcgtgtgcggtgccgagttatagctcaaggcttgcgggaggccaatactacgatctcgccatcatgcgcaccatcctcaacttcgccttctacaagccgaccgacgaactcaagttatgtgcctttcctcaccggtccatgtgcccagtgctcctgtagaagatcggtaggtgccatgctagaaaagcctctacacacccaaaaacccgccatcagtgctgagccgccgacgggagtccatccctcttcctcccctgaaacgtcgtcgcccgccacccttctcccccagtagtgtcgcgatgctggctcaagacaccgcctttcctttcttgaacgaagtcaagatgctgcatgtgttgaggatatactccatatgattatccgtgtcctttcacagaactcgcttgtaccatctttcttggagtaggttttacagaaacgttcccgatctgatgctttaaaagatgggcgcaaaggctcctttcccgatctgatgcttcttttcttttcccctttttattttatccttcttcttttatagttcccttagatcaggttccacataaaaaaataccagaaaagaaatatgcaaacaactcattagcaaacaaagctttgtttttggaacaacgctgggcagtacctctactccttaaggactacaccaacgaggttcacaactcagactacaaagtcattccagttctctctgttctaacaaattatggaacacataattatgcacaagaattgcttacgcaagatgatgcatttagccttccaagtacacaagattctccagcaatatcgtttggtatatattctccacgtgcaccaatcaaaaaactggacgacgcgacaaactcgcatattcccacatgctacgcgatactgagcttgatcacaggatcatgaactctgcacgtcaacatgacaaggacagactgccctcgccaccctaagatcaggactagccaacttcgcatactctaatctgattctatataatctggtgaccatggcagttatattatatcgtaagttgcaccgaggcttgcaaaggtcgtccacgttgctagaacgagtttgcttttgtgtatagaggaccaaactgataaaggccatccaatttcgtatatgtttctaccacccatatcagtaagctctatcttatgtttaatggagactatgtgtcttatcgtgtaagtttgctctacaactaaactgtaacggtgatagtcatcatggtagactcatcttaggtttgtactgtgatgtatactataatatttatctgcttcacaaccaatattgtcactttaaacaggtatttaccatgctaatatccaacacattaatgttctatgaacaattcaatgtactatttaccacgcgcgcctatgggcgcgcccaatacactagtgtattacagatggaaacagattctctgctgggtgctccttatcggacatcaatttcacctcccttttcgagggctccccgcccccctccaaccctatccgccatttgtcccgcagccaacgcgcaagcg

SEQ ID NO: 20789 - DNA, 2363 bp, Zea Mays
gtctctcttcgctcgacttccagaaccctttttgcggcttgagtagcccctcaagccattccgctgcagcctctcttactcgatggagctctagccccagcgctctccttccgcagccattcctctgtgtatcatgttcgtgtgcggtgccgagttatagctcaaggcttgcgggaggccaatactacgatctcgccatcatgcgcaccatcctcaacttcgccttctacaagccgaccgacgaactcaagttatgtgcctttcctcaccggtccatgtgcccagtgctcctgtagaagatcggtaggtgccatgctagaaaagcctctacacacccaaaaacccgccatcagtgctgagccgccgacgggagtccatccctcttcctcccctgaaacgtcgtcgcccgccacccttctcccccagtagtgtcgcgatgctggctcaagacaccgcctttcctttcttgaacgaagtcaagatgctgcatgtgttgaggatatactccatatgattatccgtgtcctttcacagaactcgcttgtaccatctttcttggagtaggtaaattcacttgattgttgttatattttcatcaatcttcttaagaggtgatttgctttgatttacttacagatattagatagaagcaagcaaatatttcaattacatcaattctcacgttaataaggaactttgctattgtcattactcaatgggccgggtttatcaaattgcagctattatggacttcttcttttttcttaaaaaattaactttgtctccgattggtgaacactatttttcctttacttcgtgtcatcctttttgtgatacaattcaaggcaagatgcaaatgtggtttctatatctgttttctctctgtatcgtgctttttagtttatatatgaagatgtgatatttgcattaattgtttgcgaggaaatttgagccaatctgtctattagtcctttagcttcttggaaagcttttagagcagataatcaccaagtttcatactaagtttaataccatgatatttatcatcttatctttagcttccaatgttaactaatgccctcaacaaagtaactaatgcttatactttgtttctaggttttacagaaacgttcccgatctgatgctttaaaagatgggcgcaaaggctcctttcccgatctgatgcttcttttcttttcccctttttattttatccttcttcttttatagttcccttagatcaggttccacataaaaaaataccagaaaagaaatatgcaaacaactcattagcaaacaaaggtgagatttcaagaatcaaattgtacactttctcaaggcttcagctccaatatgtcttgtaaattcagtgtattaacgatacataaaggattggattttgtgttttgaatccttcgtggcagctttgtttttggaacaacgctgggcagtacctctactccttaaggactacaccaacgaggttcacaactcagactacaaagtcattccagttctctctgttctaacaaattatggaacacataattatgcacaagaattgcttacgcaagatgatgcatttagccttccaagtacacaagattctccagcaatatcgtttggtatatattctccacgtgcaccaatcaaaaaactggacgacgcgacaaactcgcatattcccacatgctacgcgatactgagcttgatcacaggatcatgaactctgcacgtcaacatgacaaggacagactgccctcgccaccctaagatcaggactagccaacttcgcatactctaatctgattctatataatctggtgaccatggcagttatattatatcgtaagttgcaccgaggcttgcaaaggtcgtccacgttgctagaacgagtttgcttttgtgtatagaggaccaaactgataaaggccatccaatttcgtatatgtttctaccacccatatcagtaagctctatcttatgtttaatggagactatgtgtcttatcgtgtaagtttgctctacaactaaactgtaacggtgatagtcatcatggtagactcatcttaggtttgtactgtgatgtatactataatatttatctgcttcacaaccaatattgtcactttaaacaggtatttaccatgctaatatccaacacattaatgttctatgaacaattcaatgtactatttaccacgcgcgcctatgggcgcgcccaatacactagtgtattacagatggaaacagattctctgctgggtgctccttatcggacatcaatttcacctcccttttcgagggctccccgcccccctccaaccctatccgccatttgtcccgcagccaacgcgcaagcg

SEQ ID NO: 20790 - DNA, 1608 bp, Zea Mays
gcttgagtagcccctcaagccattccgctgcagcctctcttactcgatggagctctagccccagcgctctccttccgcagccattcctctgtgtatcatgttcgtgtgcggtgccgagttatagctcaaggcttgcgggaggccaatactacgatctcgccatcatgcgcaccatcctcaacttcgccttctacaagccgaccgacgaactcaagttatgtgcctttcctcaccggtccatgtgcccagtgctcctgtagaagatcggtaggtgccatgctagaaaagcctctacacacccaaaaacccgccatcagtgctgagccgccgacgggagtccatccctcttcctcccctgaaacgtcgtcgcccgccacccttctcccccagtagtgtcgcgatgctggctcaagacaccgcctttcctttcttgaacgaagtcaagatgctgcatgtgttgaggatatactccatatgattatccgtgtcctttcacagaactcgcttgtaccatctttcttggagtaggttttacagaaacgttcccgatctgatgctttaaaagatgggcgcaaaggctcctttcccgatctgatgcttcttttcttttcccctttttattttatccttcttcttttatagttcccttagatcaggttccacataaaaaaataccagaaaagaaatatgcaaacaactcattagcaaacaaagctttgtttttggaacaacgctgggcagtacctctactccttaaggactacaccaacgaggttcacaactcagactacaaagtcattccagttctctctgttctaacaaattatggaacacataattatgcacaagaattgcttacgcaagatgatgcatttagccttccaagtacacaagattctccagcaatatcgtttggtatatattctccacgtgcaccaatcaaaaaactggacttgatcacaggatcatgaactctgcacgtcaacatgacaaggacagactgccctcgccaccctaagatcaggactagccaacttcgcatactctaatctgattctatataatctggtgaccatggcagttatattatatcgtaagttgcaccgaggcttgcaaaggtcgtccacgttgctagaacgagtttgcttttgtgtatagaggaccaaactgataaaggccatccaatttcgtatatgtttctaccacccatatcagtaagctctatcttatgtttaatggagactatgtgtcttatcgtgtaagtttgctctacaactaaactgtaacggtgatagtcatcatggtagactcatcttaggtttgtactgtgatgtatactataatatttatctgcttcacaaccaatattgtcactttaaacaggtatttaccatgctaatatccaacacattaatgttctatgaacaattcaatgtactatttaccacgcgcgcctatgggcgcgcccaatacactagtgtattacagatggaaacagattctctgctgggtgctccttatcggacatcaatttcacctcccttttcgagggctccccgcccccctccaaccctatccgccatttgtcccgcagccaacgcgcaagcg

SEQ ID NO: 20791 - DNA, 1203 bp, Zea Mays
cctcaagccattccgctgcagcctctcttactcgatggagctctagccccagcgctctccttccgcagccattcctctgtgtatcatgttcgtgtgcggtgccgagttatagctcaaggcttgcgggaggccaatactacgatctcgccatcatgcgcaccatcctcaacttcgccttctacaagccgaccgacgaactcaagttatgtgcctttcctcaccggtccatgtgcccagtgctcctgtagaagatcggtaggtgccatgctagaaaagcctctacacacccaaaaacccgccatcagtgctgagccgccgacgggagtccatccctcttcctcccctgaaacgtcgtcgcccgccacccttctcccccagtagtgtcgcgatgctggctcaagacaccgcctttcctttcttgaacgaagtcaagatgctgcatgtgttgaggatatactccatatgattatccgtgtcctttcacagaactcgcttgtaccatctttcttggagtaggttttacagaaacgttcccgatctgatgctttaaaagatgggcgcaaaggctcctttcccgatctgatgcttcttttcttttcccctttttattttatccttcttcttttatagttcccttagatcaggttccacataaaaaaataccagaaaagaaatatgcaaacaactcattagcaaacaaaggtgagatttcaagaatcaaattgtacactttctcaaggcttcagctccaatatgtcttgtaaattcagtgtattaacgatacataaaggattggattttgtgttttgaatccttcgtggcagctttgtttttggaacaacgctgggcagtacctctactccttaaggactacaccaacgaggttcacaactcagactacaaagtcattccagttctctctgttctaacaaattatggaacacataattatgcacaagaattgcttacgcaagatgatgcatttagccttccaagtacacaagattctccagcaatatcgtttggtatatattctccacgtgcaccaatcaaaaaactggagatcatgaactctgcacgtcaacatgacaaggacagactgccctcgccaccctaagatcaggactagccaacttcgcatactctaatctgattctatataatctggtgaccatggcagttatattatatcgtaagttgcac

SEQ ID NO: 20792 - DNA, 1537 bp, Zea Mays
cctcaagccattccgctgcagcctctcttactcgatggagctctagccccagcgctctccttccgcagccattcctctgtgtatcatgttcgtgtgcggtgccgagttatagctcaaggcttgcgggaggccaatactacgatctcgccatcatgcgcaccatcctcaacttcgccttctacaagccgaccgacgaactcaagttatgtgcctttcctcaccggtccatgtgcccagtgctcctgtagaagatcggtaggtgccatgctagaaaagcctctacacacccaaaaacccgccatcagtgctgagccgccgacgggagtccatccctcttcctcccctgaaacgtcgtcgcccgccacccttctcccccagtagtgtcgcgatgctggctcaagacaccgcctttcctttcttgaacgaagtcaagatgctgcatgtgttgaggatatactccatatgattatccgtgtcctttcacagaactcgcttgtaccatctttcttggagtaggttttacagaaacgttcccgatctgatgctttaaaagatgggcgcaaaggctcctttcccgatctgatgcttcttttcttttcccctttttattttatccttcttcttttatagttcccttagatcaggttccacataaaaaaataccagaaaagaaatatgcaaacaactcattagcaaacaaagctttgtttttggaacaacgctgggcagtacctctactccttaaggactacaccaacgagccttccaagtacacaagattctccagcaatatcgtttggtatatattctccacgtgcaccaatcaaaaaactggacgacgcgacaaactcgcatattcccacatgctacgcgatactgagcttgatcacaggatcatgaactctgcacgtcaacatgacaaggacagactgccctcgccaccctaagatcaggactagccaacttcgcatactctaatctgattctatataatctggtgaccatggcagttatattatatcgtaagttgcaccgaggcttgcaaaggtcgtccacgttgctagaacgagtttgcttttgtgtatagaggaccaaactgataaaggccatccaatttcgtatatgtttctaccacccatatcagtaagctctatcttatgtttaatggagactatgtgtcttatcgtgtaagtttgctctacaactaaactgtaacggtgatagtcatcatggtagactcatcttaggtttgtactgtgatgtatactataatatttatctgcttcacaaccaatattgtcactttaaacaggtatttaccatgctaatatccaacacattaatgttctatgaacaattcaatgtactatttaccacgcgcgcctatgggcgcgcccaatacactagtgtattacagatggaaacagattctctgctgggtgctccttatcggacatcaatttcacctcccttttcgagggctccccgcccccctccaaccctatccgccatttgtcccgcagccaacgcgcaagcg

SEQ ID NO: 20793 - DNA, 3357 bp, Zea Mays
gttgtggcgcatggaacacggtggaaactgccaacgcgctaggatccgtagcggacggcgatctgtcttcgactgctctctgccatcgctgtggcgaccccgacggagccaagcgacggttcatcttcttgcggcggcggcgacctcgagctgattgcagcgagaaggcggggacaaatcgatctcccctagctggctacacccgatggagccgagggttccttgcgttgacggcggcggcgacggcctcgagctgagggccgcgagaaggcatcgacgggagggcgggcgaatccacgtcctcgatgcgcaaatcctggagcctcagcgacagagatcgaatccattcaggaacatctttcatctattaactcaacgagaggtcttacctcgaacgaaacaccatgctaaaaggatatggaataactctccaaaatatgatcctcatttaattgagttaaggttttcagatgcagatgctaaacttggtattttatcttgggcagaatcactgtccctgcatcgctggtctgccaagtattgccctcttttgccacctcctaggtcaactattgcagctgctttcagtccagatggaaaatcacttgcgtccacacatggtgaccatactgtgaaaataatggactgccatacagggaaatgtgtgaaggttttgagtggacatcgacgcactccttgggtggtcaggtaccatcctttacattctgacattctggctagtggaagtttggatcatgaggttcgtctgtgggatgctaatacttcagactgtattggatcacaagacttccatcggccaattgcgtccattgcatttcatggaagaggagagattctggcagttgcatcaggtcacaaattgtacatatggaactacaataagagagatgatgcttctgtcccaaccatcatactaaggacccgccgttcgttgagagctgtgcattttcacccgcatggcgctccatatcttctaacagcagaggttaataatatagagtctgcagactcaccgctgactctggcaagatcatctggatattcaaactacccttcggccctgctggtgtcaaacactaattctagattctgtccacttcctgagtccaatgtgacgtcaccgtgcttactgtggcctgcgtacctcagagatgatgggattttacatgtgcttggcaatgccagtagttcaaccattgtgcagcagagatcatcattagttcaaccttccacatcagatactgcaaatctacagcttgaacagtttgctacccctatggatgtatgtcctggagagccaacttcatttaataacatatcagatgcagtaactgtgcctacttcaaatgcaattgaaatgcatggtgctggcggccagtctaacccaagactgcagggcagcagctctattagtaatcttgagaggttcagtgctagagatgctttgcaagtgtcttccctgagcagcattgagccaatcccatcaacagctgggtcttcgggatccaattcacgccgtgctatgccactgaatatgctcctcactggtggattagatgttcaaatgttccaaagaaatgtaggaagtggacaacaggatcattttctcttcggcgactcaagtaactgggaagtgccatttgtgcagggttttttgatgacccaaaaccatacaggtttgcaccctgcacttgtgaacaataatgtccttgaagacctatctggtgctggtactgcagggattaacaactcaactagggaatcatcacacatgcataactttggacgtccaggtgcttcatcatcgattccccttacttctggcagttctaggagaccaaatcgacactatgcctcacgctctgtgcctggggttgggagtttgctcctagtaggtcctcaaattgacgaagctgaagctcatgctgcttcactaggtgctggttcagaaatcactgcgtcgatgcttgctcctggtactgaattgccttgtacagtgaagctcagaatatggcggcatgatatcaatgaaccatgtgttcctttagcacctgaggcatgccgtctgacgatttctcatgccgttctttgcagtgaaatgggtgcccatttttccccatgtggacgatttcttgtagcctgcgttgcatgtttgttgcctcaaacagaaggtggccgtggtagccaattgcctgtgccttatgaagaggctggatcatcaccaactcgtcatccacttccctctcaccgagttatttatgagcttcgggtttattcgcttgaggaggagacatttggggatattcttgcttctagagcaataagggcagcacattgcttaacttccattcagttctcacctacatccgaacacatacttttggcatatggtcgtcgtcatagctcgctgcttaggagcatagtcgtggagggagaaaatgggattcctgtatatactattttggagagtttcagatatggagcttgtgagagtgcttcctagtgccgaagatgaagtcaatgttgcatgctttcatcctttaccaggaggtggccttgtttatgggactaaggaagggaagctcaggatccttcaacacaatggcgcaaacatgataaacatggggtcgggttgcttcattgaggaaaatatggttgagatccagaggtatgcattggaatgctgaataagcttgaccacatcatgtgaattttaggcttacttccatggtctttgcaggggcggcaggagatgtaaatctacatggccaccgtcgtggctgccatcacgatgcttctttttgttgtatacttcacctatcctaacaagcggtcgatgatgcaagaaattacaaaggcgaatgggattctctgggtttgattttacacgtgataatcatgtatttttttcctgttctcgtctgggttgattaatcattaaacgtttggagtttctatatctgtatgaaatagcatctgttgcaacataagaatatggttgacactagacgtctacaagggctggtctagaatgccgtgctattgtcattattttttaagtttaccaagagctatctgaacgcgttccatttggattgaggtgtattgaagtggatggatgaggattttgattagtagtggatttattccctcttaatccttgtagatttaggagaaaacgaacatggcctaaattatttttttcatttcttccctggtggaatattattagacgccagttacatttaatgctcggtcgacaaagttgtcatgaaaatcatggaatcatttggtttctttgggatttttatttttaaccctcaaaaaaataaaaaa

SEQ ID NO: 20794 - DNA, 4174 bp, Zea Mays
gttgtggcgcatggaacacggtggaaactgccaacgcgctaggatccgtagcggacggcgatctgtcttcgactgctctctgccatcgctgtggcgaccccgacggagccaagcgacggttcatcttcttgcggcggcggcgacctcgagctgattgcagcgagaaggcggggacaaatcgatctcccctagctggctacacccgatggagccgagggttccttgcgttgacggcggcggcgacggcctcgagctgagggccgcgagaaggcatcgacgggagggcgggcgaatccacgtcctcgatgcgcaaatcctggagcctcagcgacagagatcgaatccattcaggaacatctttcatctattaactcaacgagaggtcttacctcgaacgaaacaccatgctaaaaggatatggaataactctccaaaatatgatcctcatttaattgagttaaggttttcagatgcagatgctaaacttggtattttatcttgggcagaatcactgtccctgcatcgctggtctgccaagtattgccctcttttgccacctcctaggtcaactattgcagctgctttcagtccagatggaaaatcacttgcgtccacacatggtgaccatactgtgaaaataatggactgccatacagggaaatgtgtgaaggttttgagtggacatcgacgcactccttgggtggtcaggtaccatcctttacattctgacattctggctagtggaagtttggatcatgaggttcgtctgtgggatgctaatacttcagactgtattggatcacaagacttccatcggccaattgcgtccattgcatttcatggaagaggagagattctggcagttgcatcaggtcacaaattgtacatatggaactacaataagagagatgatgcttctgtcccaaccatcatactaaggacccgccgttcgttgagagctgtgcattttcacccgcatggcgctccatatcttctaacagcagaggttaataatatagagtctgcagactcaccgctgactctggcaagatcatctggatattcaaactacccttcggccctgctggtgtcaaacactaattctagattctgtccacttcctgagtccaatgtgacgtcaccgtgcttactgtggcctgcgtacctcagagatgatgggattttacatgtgcttggcaatgccagtagttcaaccattgtgcagcagagatcatcattagttcaaccttccacatcagatactgcaaatctacagcttgaacagtttgctacccctatggatgtatgtcctggagagccaacttcatttaataacatatcagatgcagtaactgtgcctacttcaaatgcaattgaaatgcatggtgctggcggccagtctaacccaagactgcagggcagcagctctattagtaatcttgagaggttcagtgctagagatgctttgcaagtgtcttccctgagcagcattgagccaatcccatcaacagctgggtcttcgggatccaattcacgccgtgctatgccactgaatatgctcctcactggtggattagatgttcaaatgttccaaagaaatgtaggaagtggacaacaggatcattttctcttcggcgactcaagtaactgggaagtgccatttgtgcagggttttttgatgacccaaaaccatacaggtgcttcatcatcgattccccttacttctggcagttctaggagaccaaatcgacactatgcctcacgctctgtgcctggggttgggagtttgctcctagtaggtcctcaaattgacgaagctgaagctcatgctgcttcactaggtgctggttcagaaatcactgcgtcgatgcttgctcctggtactgaattgccttgtacagtgaagctcagaatatggcggcatgatatcaatgaaccatgtgttcctttagcacctgaggcatgccgtctgacgatttctcatgccgttctttgcagtgaaatgggtgcccatttttccccatgtggacgatttcttgtagcctgcgttgcatgtttgttgcctcaaacagaaggtggccgtggtagccaattgcctgtgccttatgaagaggctggatcatcaccaactcgtcatccacttccctctcaccgagttatttatgagcttcgggtttattcgcttgaggaggagacatttggggatattcttgcttctagagcaataagggcagcacattgcttaacttccattcagttctcacctacatccgaacacatacttttggcatatggtcgtcgtcatagctcgctgcttaggagcatagtcgtggagggagaaaatgggattcctgtatatactattttggaggtatatagagtttcagatatggagcttgtgagagtgcttcctagtgccgaagatgaagtcaatgttgcatgctttcatcctttaccaggaggtggccttgtttatgggactaaggaagggaagctcaggatccttcaacacaatggcgcaaacatgataaacatggggtcgggttgcttcattgaggaaaatatggttgagatccagaggtatgcattggaatgctgaataagcttgaccacatcatgtgaattttaggcttacttccatgaaagacttctctgcaggcttcatctgtgtgatccgtccaagggaaaacattagatccatctccaactacattagaacagataattctcaatgggctctttcaagtgccttggggactggtatgggactctttgcactttaggattaactaatattcctggtatggatataatatcttttctctgctgctagctacaagggacctgagtatcttaagtcgattttgtacacagtaggataatcaagtaattaatgctgtaggaaacattggtatccagtttactgattggaatcgtgtccttacaagcatcattagctcttacaacttgctgaagcaagctgccctacaaattttttccgctggatcaggagccttgaatatttgtccagttttgcaggtgggcttggatgtccaataagctagctcgattttgacagtaggttgctttatgtttttaaccctttggagcgcctttgcaacctttgatcatccttatctgcctttacgttttttgtgtggcaaccgtgctatttatggttaagtctgtctaggttaatcatgttttgtaaaaaatggatatggttctagtggaaaattgtttttctaaccttggaaaaattattctagtcccgttcatactattttctgcatttaggtgtttggtttcttagtcaccctcctttctatttgggaggcctccttgagacatattgtttggctttttagggacaaagtgactaagtttaggaggtaggaaccaacaccctcttagtgcatgttgtatggacactaaagttacttttgaactacatatgttacgtgtaaacacgatccagtaaaagaatgtttttatcatagcctctagaatatatatttctttggcagtagaatgattctaatgccttgctatttacaacttgatttaggtctttgcaggggcggcaggagatgtaaatctacatggccaccgtcgtggctgccatcacgatgcttctttttgttgtatacttcacctatcctaacaagcggtcgatgatgcaagaaattacaaaggcgaatgggattctctgggtttgattttacacgtgataatcatgtatttttttcctgttctcgtctgggttgattaatcattaaacgtttggagtttctatatctgtatgaaatagcatctgttgcaacataagaatatggttgacactagacgtctacaagggctggtctagaatgccgtgctattgtcattattttttaagtttaccaagagctatctgaacgcgttccatttggattgaggtgtattgaagtggatggatgaggattttgattagtagtggatttattccctcttaatccttgtagatttaggagaaaacgaacatggcctaaattatttttttcatttcttccctggtggaatattattagacgccagttacatttaatgctcggtcgacaaagttgtcatgaaaatcatggaatcatttggtttctttgggatttttatttttaaccctcaaaaaaataaaaaa

SEQ ID NO: 20795 - DNA, 3342 bp, Zea Mays
gtggaaactgccaacgcgctaggatccgtagcggacggcgatctgtcttcgactgctctctgccatcgctgtggcgaccccgacggagccaagcgacggttcatcttcttgcggcggcggcgacctcgagctgattgcagcgagaaggcggggacaaatcgatctcccctagctggctacacccgatggagccgagggttccttgcgttgacggcggcggcgacggcctcgagctgagggccgcgagaaggcatcgacgggagggcgggcgaatccacgtcctcgatgcgcaaatcctggagcctcagcgacagagatcgaatccattcaggaacatctttcatctattaactcaacgagaggtcttacctcgaacgaaacaccatgctaaaaggatatggaataactctccaaaatatgatcctcatttaattgagttaaggttttcagatgcagatgctaaacttggtattttatcttgggcagaatcactgtccctgcatcgctggtctgccaagtattgccctcttttgccacctcctaggtcaactattgcagctgctttcagtccagatggaaaatcacttgcgtccacacatggtgaccatactgtgaaaataatggactgccatacagggaaatgtgtgaaggttttgagtggacatcgacgcactccttgggtggtcaggtaccatcctttacattctgacattctggctagtggaagtttggatcatgaggttcgtctgtgggatgctaatacttcagactgtattggatcacaagacttccatcggccaattgcgtccattgcatttcatggaagaggagagattctggcagttgcatcaggtcacaaattgtacatatggaactacaataagagagatgatgcttctgtcccaaccatcatactaaggacccgccgttcgttgagagctgtgcattttcacccgcatggcgctccatatcttctaacagcagaggttaataatatagagtctgcagactcaccgctgactctggcaagatcatctggatattcaaactacccttcggccctgctggtgtcaaacactaattctagattctgtccacttcctgagtccaatgtgacgtcaccgtgcttactgtggcctgcgtacctcagagatgatgggattttacatgtgcttggcaatgccagtagttcaaccattgtgcagcagagatcatcattagttcaaccttccacatcagatactgcaaatctacagcttgaacagtttgctacccctatggatgtatgtcctggagagccaacttcatttaataacatatcagatgcagtaactgtgcctacttcaaatgcaattgaaatgcatggtgctggcggccagtctaacccaagactgcagggcagcagctctattagtaatcttgagaggttcagtgctagagatgctttgcaagtgtcttccctgagcagcattgagccaatcccatcaacagctgggtcttcgggatccaattcacgccgtgctatgccactgaatatgctcctcactggtggattagatgttcaaatgttccaaagaaatgtaggaagtggacaacaggatcattttctcttcggcgactcaagtaactgggaagtgccatttgtgcagggttttttgatgacccaaaaccatacaggtgcttcatcatcgattccccttacttctggcagttctaggagaccaaatcgacactatgcctcacgctctgtgcctggggttgggagtttgctcctagtaggtcctcaaattgacgaagctgaagctcatgctgcttcactaggtgctggttcagaaatcactgcgtcgatgcttgctcctggtactgaattgccttgtacagtgaagctcagaatatggcggcatgatatcaatgaaccatgtgttcctttagcacctgaggcatgccgtctgacgatttctcatgccgttctttgcagtgaaatgggtgcccatttttccccatgtggacgatttcttgtagcctgcgttgcatgtttgttgcctcaaacagaaggtggccgtggtagccaattgcctgtgccttatgaagaggctggatcatcaccaactcgtcatccacttccctctcaccgagttatttatgagcttcgggtttattcgcttgaggaggagacatttggggatattcttgcttctagagcaataagggcagcacattgcttaacttccattcagttctcacctacatccgaacacatacttttggcatatggtcgtcgtcatagctcgctgcttaggagcatagtcgtggagggagaaaatgggattcctgtatatactattttggaggtatatagagtttcagatatggagcttgtgagagtgcttcctagtgccgaagatgaagtcaatgttgcatgctttcatcctttaccaggaggtggccttgtttatgggactaagggaagctcaggatccttcaacacaatggcgcaaacatgataaacatggggtcgggttgcttcattgaggaaaatatggttgagatccagaggtatgcattggaatgctgaataagcttgaccacatcatgtgaattttaggcttacttccatgaaagacttctctgcaggcttcatctgtgtgatccgtccaagggaaaacattagatccatctccaactacattagaacagataattctcaatgggctctttcaagtgccttggggactggtctttgcaggggcggcaggagatgtaaatctacatggccaccgtcgtggctgccatcacgatgcttctttttgttgtatacttcacctatcctaacaagcggtcgatgatgcaagaaattacaaaggcgaatgggattctctgggtttgattttacacgtgataatcatgtatttttttcctgttctcgtctgggttgattaatcattaaacgtttggagtttctatatctgtatgaaatagcatctgttgcaacataagaatatggttgacactagacgtctacaagggctggtctagaatgccgtgctattgtcattattttttaagtttaccaagagctatctgaacgcgttccatttggattgaggtgtattgaagtggatggatgaggattttgattagtagtggatttattccctcttaatccttgtagatttaggagaaaacgaacatggcctaaattatttttttcatttcttccctggtggaatattattagacgccagttacatttaatgctcggtcgacaaagttgtcatgaaaatcatggaatcatttggtttctttgggatttttatttttaaccctcaaaaaaataaaaaa

SEQ ID NO: 20796 - DNA, 3374 bp, Zea Mays
gtggaaactgccaacgcgctaggatccgtagcggacggcgatctgtcttcgactgctctctgccatcgctgtggcgaccccgacggagccaagcgacggttcatcttcttgcggcggcggcgacctcgagctgattgcagcgagaaggcggggacaaatcgatctcccctagctggctacacccgatggagccgagggttccttgcgttgacggcggcggcgacggcctcgagctgagggccgcgagaaggcatcgacgggagggcgggcgaatccacgtcctcgatgcgcaaatcctggagcctcagcgacagagatcgaatccattcaggaacatctttcatctattaactcaacgagaggtcttacctcgaacgaaacaccatgctaaaaggatatggaataactctccaaaatatgatcctcatttaattgagttaaggttttcagatgcagatgctaaacttggtattttatcttgggcagaatcactgtccctgcatcgctggtctgccaagtattgccctcttttgccacctcctaggtcaactattgcagctgctttcagtccagatggaaaatcacttgcgtccacacatggtgaccatactgtgaaaataatggactgccatacagggaaatgtgtgaaggttttgagtggacatcgacgcactccttgggtggtcaggtaccatcctttacattctgacattctggctagtggaagtttggatcatgaggttcgtctgtgggatgctaatacttcagactgtattggatcacaagacttccatcggccaattgcgtccattgcatttcatggaagaggagagattctggcagttgcatcaggtcacaaattgtacatatggaactacaataagagagatgatgcttctgtcccaaccatcatactaaggacccgccgttcgttgagagctgtgcattttcacccgcatggcgctccatatcttctaacagcagaggttaataatatagagtctgcagactcaccgctgactctggcaagatcatctggatattcaaactacccttcggccctgctggtgtcaaacactaattctagattctgtccacttcctgagtccaatgtgacgtcaccgtgcttactgtggcctgcgtacctcagagatgatgggattttacatgtgcttggcaatgccagtagttcaaccattgtgcagcagagatcatcattagttcaaccttccacatcagatactgcaaatctacagcttgaacagtttgctacccctatggatgtatgtcctggagagccaacttcatttaataacatatcagatgcagtaactgtgcctacttcaaatgcaattgaaatgcatggtgctggcggccagtctaacccaagactgcagggcagcagctctattagtaatcttgagaggttcagtgctagagatgctttgcaagtgtcttccctgagcagcattgagccaatcccatcaacagctgggtcttcgggatccaattcacgccgtgctatgccactgaatatgctcctcactggtggattagatgttcaaatgttccaaagaaatgtaggaagtggacaacaggatcattttctcttcggcgactcaagtaactgggaagtgccatttgtgcagggttttttgatgacccaaaaccatacaggtgcttcatcatcgattccccttacttctggcagttctaggagaccaaatcgacactatgcctcacgctctgtgcctggggttgggagtttgctcctagtaggtcctcaaattgacgaagctgaagctcatgctgcttcactaggtgctggttcagaaatcactgcgtcgatgcttgctcctggtactgaattgccttgtacagtgaagctcagaatatggcggcatgatatcaatgaaccatgtgttcctttagcacctgaggcatgccgtctgacgatttctcatgccgttctttgcagtgaaatgggtgcccatttttccccatgtggacgatttcttgtagcctgcgttgcatgtttgttgcctcaaacagaaggtggccgtggtagccaattgcctgtgccttatgaagaggctggatcatcaccaactcgtcatccacttccctctcaccgagttatttatgagcttcgggtttattcgcttgaggaggagacatttggggatattcttgcttctagagcaataagggcagcacattgcttaacttccattcagttctcacctacatccgaacacatacttttggcatatggtcgtcgtcatagctcgctgcttaggagcatagtcgtggagggagaaaatgggattcctgtatatactattttggagtgctggttctgcagttgcatgatactttttgatacatgggattcaaaatgatttgcttattatcctccacaactactcatattgctcatactttgtgtacaatgtaagccaaactatcaatctttttttttaatttattactttaggtatatagagtttcagatatggagcttgtgagagtgcttcctagtgccgaagatgaagtcaatgttgcatgctttcatcctttaccaggaggtggccttgtttatgggactaaggaagggaagctcaggatccttcaacacaatggcgcaaacatgataaacatggggtcgggttgcttcattgaggaaaatatggttgagatccagaggtatgcattggaatgctgaataagcttgaccacatcatgtgaattttaggcttacttccatggtctttgcaggggcggcaggagatgtaaatctacatggccaccgtcgtggctgccatcacgatgcttctttttgttgtatacttcacctatcctaacaagcggtcgatgatgcaagaaattacaaaggcgaatgggattctctgggtttgattttacacgtgataatcatgtatttttttcctgttctcgtctgggttgattaatcattaaacgtttggagtttctatatctgtatgaaatagcatctgttgcaacataagaatatggttgacactagacgtctacaagggctggtctagaatgccgtgctattgtcattattttttaagtttaccaagagctatctgaacgcgttccatttggattgaggtgtattgaagtggatggatgaggattttgattagtagtggatttattccctcttaatccttgtagatttaggagaaaacgaacatggcctaaattatttttttcatttcttccctggtggaatattattagacgccagttacatttaatgctcggtcgacaaagttgtcatgaaaatcatggaatcatttggtttctttgggatttttatttttaaccctcaaaaaaataaaaaa

SEQ ID NO: 20797 - DNA, 2613 bp, Zea Mays
cggcgatctgtcttcgactgctctctgccatcgctgtggcgaccccgacggagccaagcgacggttcatcttcttgcggcggcggcgacctcgagctgattgcagcgagaaggcggggacaaatcgatctcccctagctggctacacccgatggagccgagggttccttgcgttgacggcggcggcgacggcctcgagctgagggccgcgagaaggcatcgacgggagggcgggcgaatccacgtcctcgatgcgcaaatcctggagcctcagcgacagagatcgaatccattcaggaacatctttcatctattaactcaacgagaggtcttacctcgaacgaaacaccatgctaaaaggatatggaataactctccaaaatatgatcctcatttaattgagttaaggttttcagatgcagatgctaaacttggtattttatcttgggcagaatcactgtccctgcatcgctggtctgccaagtattgccctcttttgccacctcctaggtcaactattgcagctgctttcagtccagatggaaaatcacttgcgtccacacatggtgaccatactgtgaaaataatggactgccatacagggaaatgtgtgaaggttttgagtggacatcgacgcactccttgggtggtcaggtaccatcctttacattctgacattctggctagtggaagtttggatcatgaggttcgtctgtgggatgctaatacttcagactgtattggatcacaagacttccatcggccaattgcgtccattgcatttcatggaagaggagagattctggcagttgcatcaggtcacaaattgtacatatggaactacaataagagagatgatgcttctgtcccaaccatcatactaaggacccgccgttcgttgagagctgtgcattttcacccgcatggcgctccatatcttctaacagcagaggttaataatatagagtctgcagactcaccgctgactctggcaagatcatctggatattcaaactacccttcggccctgctggtgtcaaacactaattctagattctgtccacttcctgagtccaatgtgacgtcaccgtgcttactgtggcctgcgtacctcagagatgatgggattttacatgtgcttggcaatgccagtagttcaaccattgtgcagcagagatcatcattagttcaaccttccacatcagatactgcaaatctacagcttgaacagtttgctacccctatggatgtatgtcctggagagccaacttcatttaataacatatcagatgcagtaactgtgcctacttcaaatgcaattgaaatgcatggtgctggcggccagtctaacccaagactgcagggcagcagctctattagtaatcttgagaggttcagtgctagagatgctttgcaagtgtcttccctgagcagcattgagccaatcccatcaacagctgggtcttcgggatccaattcacgccgtgctatgccactgaatatgctcctcactggtggattagatgttcaaatgttccaaagaaatgtaggaagtggacaacaggatcattttctcttcggcgactcaagtaactgggaagtgccatttgtgcagggttttttgatgacccaaaaccatacaggtgcttcatcatcgattccccttacttctggcagttctaggagaccaaatcgacactatgcctcacgctctgtgcctggggttgggagtttgctcctagtaggtcctcaaattgacgaagctgaagctcatgctgcttcactaggtgctggttcagaaatcactgcgtcgatgcttgctcctggtactgaattgccttgtacagtgaagctcagaatatggcggcatgatatcaatgaaccatgtgttcctttagcacctgaggcatgccgtctgacgatttctcatgccgttctttgcagtgaaatgggtgcccatttttccccatgtggacgatttcttgtagcctgcgttgcatgtttgttgcctcaaacagaaggtggccgtggtagccaattgcctgtgccttatgaagaggctggatcatcaccaactcgtcatccacttccctctcaccgagttatttatgagcttcgggtttattcgcttgaggaggagacatttggggatattcttgcttctagagcaataagggcagcacattgcttaacttccattcagttctcacctacatccgaacacatacttttggcatatggtcgtcgtcatagctcgctgcttaggagcatagtcgtggagggagaaaatgggattcctgtatatactattttggaggtatatagagtttcagatatggagcttgtgagagtgcttcctagtgccgaagatgaagtcaatgttgcatgctttcatcctttaccaggaggtggccttgtttatgggactaaggaagggaagctcaggatccttcaacacaatggcgcaaacatgataaacatggggtcgggttgcttcattgaggaaaatatggttgagatccagaggtatgcattggaatgctgaataagcttgaccacatcatgtgaattttaggcttacttccatgtggacttggttgttgatctgaaagca

SEQ ID NO: 20798 - DNA, 3448 bp, Zea Mays
cggcgatctgtcttcgactgctctctgccatcgctgtggcgaccccgacggagccaagcgacggttcatcttcttgcggcggcggcgacctcgagctgattgcagcgagaaggcggggacaaatcgatctcccctagctggctacacccgatggagccgagggttccttgcgttgacggcggcggcgacggcctcgagctgagggccgcgagaaggcatcgacgggagggcgggcgaatccacgtcctcgatgcgcaaatcctggagcctcagcgacagagatcgaatccattcaggaacatctttcatctattaactcaacgagaggtcttacctcgaacgaaacaccatgctaaaaggatatggaataactctccaaaatatgatcctcatttaattgagttaaggttttcagatgcagatgctaaacttggtattttatcttgggcagaatcactgtccctgcatcgctggtctgccaagtattgccctcttttgccacctcctaggtcaactattgcagctgctttcagtccagatggaaaatcacttgcgtccacacatggtgaccatactgtgaaaataatggactgccatacagggaaatgtgtgaaggttttgagtggacatcgacgcactccttgggtggtcaggtaccatcctttacattctgacattctggctagtggaagtttggatcatgaggttcgtctgtgggatgctaatacttcagactgtattggatcacaagacttccatcggccaattgcgtccattgcatttcatggaagaggagagattctggcagttgcatcaggtcacaaattgtacatatggaactacaataagagagatgatgcttctgtcccaaccatcatactaaggacccgccgttcgttgagagctgtgcattttcacccgcatggcgctccatatcttctaacagcagaggttaataatatagagtctgcagactcaccgctgactctggcaagatcatctggatattcaaactacccttcggccctgctggtgtcaaacactaattctagattctgtccacttcctgagtccaatgtgacgtcaccgtgcttactgtggcctgcgtacctcagagatgatgggattttacatgtgcttggcaatgccagtagttcaaccattgtgcagcagagatcatcattagttcaaccttccacatcagatactgcaaatctacagcttgaacagtttgctacccctatggatgtatgtcctggagagccaacttcatttaataacatatcagatgcagtaactgtgcctacttcaaatgcaattgaaatgcatggtgctggcggccagtctaacccaagactgcagggcagcagctctattagtaatcttgagaggttcagtgctagagatgctttgcaagtgtcttccctgagcagcattgagccaatcccatcaacagctgggtcttcgggatccaattcacgccgtgctatgccactgaatatgctcctcactggtggattagatgttcaaatgttccaaagaaatgtaggaagtggacaacaggatcattttctcttcggcgactcaagtaactgggaagtgccatttgtgcagggttttttgatgacccaaaaccatacaggtgcttcatcatcgattccccttacttctggcagttctaggagaccaaatcgacactatgcctcacgctctgtgcctggggttgggagtttgctcctagtaggtcctcaaattgacgaagctgaagctcatgctgcttcactaggtgctggttcagaaatcactgcgtcgatgcttgctcctggtactgaattgccttgtacagtgaagctcagaatatggcggcatgatatcaatgaaccatgtgttcctttagcacctgaggcatgccgtctgacgatttctcatgccgttctttgcagtgaaatgggtgcccatttttccccatgtggacgatttcttgtagcctgcgttgcatgtttgttgcctcaaacagaaggtggccgtggtagccaattgcctgtgccttatgaagaggctggatcatcaccaactcgtcatccacttccctctcaccgagttatttatgagcttcgggtttattcgcttgaggaggagacatttggggatattcttgcttctagagcaataagggcagcacattgcttaacttccattcagttctcacctacatccgaacacatacttttggcatatggtcgtcgtcatagctcgctgcttaggagcatagtcgtggagggagaaaatgggattcctgtatatactattttggaggtatatagagtttcagatatggagcttgtgagagtgcttcctagtgccgaagatgaagtcaatgttgcatgctttcatcctttaccaggaggtggccttgtttatgggactaaggaagggaagctcaggatccttcaacacaatggcgcaaacatgataaacatggggtcgggttgcttcattgaggaaaatatggttgagatccagaggtatgcattggaatgctgaataagcttgaccacatcatgtgaattttaggcttacttccatgaaagacttctctgcaggcttcatctgtgtgatccgtccaagggaaaacattagatccatctccaactacattagaacagataattctcaatgggctctttcaagtgccttggggactggaaacattggtatccagtttactgattggaatcgtgtccttacaagcatcattagctcttacaacttgctgaagcaagctgccctacaaattttttccgctggatcaggagccttgaatatttgtccagttttgcaggtctttgcaggggcggcaggagatgtaaatctacatggccaccgtcgtggctgccatcacgatgcttctttttgttgtatacttcacctatcctaacaagcggtcgatgatgcaagaaattacaaaggcgaatgggattctctgggtttgattttacacgtgataatcatgtatttttttcctgttctcgtctgggttgattaatcattaaacgtttggagtttctatatctgtatgaaatagcatctgttgcaacataagaatatggttgacactagacgtctacaagggctggtctagaatgccgtgctattgtcattattttttaagtttaccaagagctatctgaacgcgttccatttggattgaggtgtattgaagtggatggatgaggattttgattagtagtggatttattccctcttaatccttgtagatttaggagaaaacgaacatggcctaaattatttttttcatttcttccctggtggaatattattagacgccagttacatttaatgctcggtcgacaaagttgtcatgaaaatcatggaatcatttggtttctttgggatttttatttttaaccctcaaaaaaataaaaaa

SEQ ID NO: 20799 - DNA, 3497 bp, Zea Mays
cggcgatctgtcttcgactgctctctgccatcgctgtggcgaccccgacggagccaagcgacggttcatcttcttgcggcggcggcgacctcgagctgattgcagcgagaaggcggggacaaatcgatctcccctagctggctacacccgatggagccgagggttccttgcgttgacggcggcggcgacggcctcgagctgagggccgcgagaaggcatcgacgggagggcgggcgaatccacgtcctcgatgcgcaaatcctggagcctcagcgacagagatcgaatccattcaggaacatctttcatctattaactcaacgagaggtcttacctcgaacgaaacaccatgctaaaaggatatggaataactctccaaaatatgatcctcatttaattgagttaaggttttcagatgcagatgctaaacttggtattttatcttgggcagaatcactgtccctgcatcgctggtctgccaagtattgccctcttttgccacctcctaggtcaactattgcagctgctttcagtccagatggaaaatcacttgcgtccacacatggtgaccatactgtgaaaataatggactgccatacagggaaatgtgtgaaggttttgagtggacatcgacgcactccttgggtggtcaggtaccatcctttacattctgacattctggctagtggaagtttggatcatgaggttcgtctgtgggatgctaatacttcagactgtattggatcacaagacttccatcggccaattgcgtccattgcatttcatggaagaggagagattctggcagttgcatcaggtcacaaattgtacatatggaactacaataagagagatgatgcttctgtcccaaccatcatactaaggacccgccgttcgttgagagctgtgcattttcacccgcatggcgctccatatcttctaacagcagaggttaataatatagagtctgcagactcaccgctgactctggcaagatcatctggatattcaaactacccttcggccctgctggtgtcaaacactaattctagattctgtccacttcctgagtccaatgtgacgtcaccgtgcttactgtggcctgcgtacctcagagatgatgggattttacatgtgcttggcaatgccagtagttcaaccattgtgcagcagagatcatcattagttcaaccttccacatcagatactgcaaatctacagcttgaacagtttgctacccctatggatgtatgtcctggagagccaacttcatttaataacatatcagatgcagtaactgtgcctacttcaaatgcaattgaaatgcatggtgctggcggccagtctaacccaagactgcagggcagcagctctattagtaatcttgagaggttcagtgctagagatgctttgcaagtgtcttccctgagcagcattgagccaatcccatcaacagctgggtcttcgggatccaattcacgccgtgctatgccactgaatatgctcctcactggtggattagatgttcaaatgttccaaagaaatgtaggaagtggacaacaggatcattttctcttcggcgactcaagtaactgggaagtgccatttgtgcagggttttttgatgacccaaaaccatacaggtttgcaccctgcacttgtgaacaataatgtccttgaagacctatctggtgctggtactgcagggattaacaactcaactagggaatcatcacacatgcataactttggacgtccaggtgcttcatcatcgattccccttacttctggcagttctaggagaccaaatcgacactatgcctcacgctctgtgcctggggttgggagtttgctcctagtaggtcctcaaattgacgaagctgaagctcatgctgcttcactaggtgctggttcagaaatcactgcgtcgatgcttgctcctggtactgaattgccttgtacagtgaagctcagaatatggcggcatgatatcaatgaaccatgtgttcctttagcacctgaggcatgccgtctgacgatttctcatgccgttctttgcagtgaaatgggtgcccatttttccccatgtggacgatttcttgtagcctgcgttgcatgtttgttgcctcaaacagaaggtggccgtggtagccaattgcctgtgccttatgaagaggctggatcatcaccaactcgtcatccacttccctctcaccgagttatttatgagcttcgggtttattcgcttgaggaggagacatttggggatattcttgcttctagagcaataagggcagcacattgcttaacttccattcagttctcacctacatccgaacacatacttttggcatatggtcgtcgtcatagctcgctgcttaggagcatagtcgtggagggagaaaatgggattcctgtatatactattttggaggtatatagagtttcagatatggagcttgtgagagtgcttcctagtgccgaagatgaagtcaatgttgcatgctttcatcctttaccaggaggtggccttgtttatgggactaagggaagctcaggatccttcaacacaatggcgcaaacatgataaacatggggtcgggttgcttcattgaggaaaatatggttgagatccagaggtatgcattggaatgctgaataagcttgaccacatcatgtgaattttaggcttacttccatggcttcatctgtgtgatccgtccaagggaaaacattagatccatctccaactacattagaacagataattctcaatgggctctttcaagtgccttggggactggtctttgcaggggcggcaggagatgtaaatctacatggccaccgtcgtggctgccatcacgatgctgtaattataccttttgtacatgtattccaatcagcttaactcgattgctgttgtatttcagaacgttgacggtgctaatacttctgaagtctttttgttgtatacttcacctatcctaacaagcggtcgatgatgcaagaaattacaaaggcgaatgggattctctgggtttgattttacacgtgataatcatgtatttttttcctgttctcgtctgggttgattaatcattaaacgtttggagtttctatatctgtatgaaatagcatctgttgcaacataagaatatggttgacactagacgtctacaagggctggtctagaatgccgtgctattgtcattattttttaagtttaccaagagctatctgaacgcgttccatttggattgaggtgtattgaagtggatggatgaggattttgattagtagtggatttattccctcttaatccttgtagatttaggagaaaacgaacatggcctaaattatttttttcatttcttccctggtggaatattattagacgccagttacatttaatgctcggtcgacaaagttgtcatgaaaatcatggaatcatttggtttctttgggatttttatttttaaccctcaaaaaaataaaaaa

SEQ ID NO: 20800 - DNA, 3223 bp, Zea Mays
ctgtcttcgactgctctctgccatcgctgtggcgaccccgacggagccaagcgacggttcatcttcttgcggcggcggcgacctcgagctgattgcagcgagaaggcggggacaaatcgatctcccctagctggctacacccgatggagccgagggttccttgcgttgacggcggcggcgacggcctcgagctgagggccgcgagaaggcatcgacgggagggcgggcgaatccacgtcctcgatgcgcaaatcctggagcctcagcgacagagatcgaatccattcaggaacatctttcatctattaactcaacgagaggtcttacctcgaacgaaacaccatgctaaaaggatatggaataactctccaaaatatgatcctcatttaattgagttaaggttttcagatgcagatgctaaacttggtattttatcttgggcagaatcactgtccctgcatcgctggtctgccaagtattgccctcttttgccacctcctaggtcaactattgcagctgctttcagtccagatggaaaatcacttgcgtccacacatggtgaccatactgtgaaaataatggactgccatacagggaaatgtgtgaaggttttgagtggacatcgacgcactccttgggtggtcaggtaccatcctttacattctgacattctggctagtggaagtttggatcatgaggttcgtctgtgggatgctaatacttcagactgtattggatcacaagacttccatcggccaattgcgtccattgcatttcatggaagaggagagattctggcagttgcatcaggtcacaaattgtacatatggaactacaataagagagatgatgcttctgtcccaaccatcatactaaggacccgccgttcgttgagagctgtgcattttcacccgcatggcgctccatatcttctaacagcagaggttaataatatagagtctgcagactcaccgctgactctggcaagatcatctggatattcaaactacccttcggccctgctggtgtcaaacactaattctagattctgtccacttcctgagtccaatgtgacgtcaccgtgcttactgtggcctgcgtacctcagagatgatgggattttacatgtgcttggcaatgccagtagttcaaccattgtgcagcagagatcatcattagttcaaccttccacatcagatactgcaaatctacagcttgaacagtttgctacccctatggatgtatgtcctggagagccaacttcatttaataacatatcagatgcagtaactgtgcctacttcaaatgcaattgaaatgcatggtgctggcggccagtctaacccaagactgcagggcagcagctctattagtaatcttgagaggttcagtgctagagatgctttgcaagtgtcttccctgagcagcattgagccaatcccatcaacagctgggtcttcgggatccaattcacgccgtgctatgccactgaatatgctcctcactggtggattagatgttcaaatgttccaaagaaatgtaggaagtggacaacaggatcattttctcttcggcgactcaagtaactgggaagtgccatttgtgcagggttttttgatgacccaaaaccatacaggtttgcaccctgcacttgtgaacaataatgtccttgaagacctatctggtgctggtactgcagggattaacaactcaactagggaatcatcacacatgcataactttggacgtccaggtgcttcatcatcgattccccttacttctggcagttctaggagaccaaatcgacactatgcctcacgctctgtgcctggggttgggagtttgctcctagtaggtcctcaaattgacgaagctgaagctcatgctgcttcactaggtgctggttcagaaatcactgcgtcgatgcttgctcctggtactgaattgccttgtacagtgaagctcagaatatggcggcatgatatcaatgaaccatgtgttcctttagcacctgaggcatgccgtctgacgatttctcatgccgttctttgcagatttggggatattcttgcttctagagcaataagggcagcacattgcttaacttccattcagttctcacctacatccgaacacatacttttggcatatggtcgtcgtcatagctcgctgcttaggagcatagtcgtggagggagaaaatgggattcctgtatatactattttggaggtatatagagtttcagatatggagcttgtgagagtgcttcctagtgccgaagatgaagtcaatgttgcatgctttcatcctttaccaggaggtggccttgtttatgggactaaggaagggaagctcaggatccttcaacacaatggcgcaaacatgataaacatggggtcgggttgcttcattgaggaaaatatggttgagatccagaggtatgcattggaatgctgaataagcttgaccacatcatgtgaattttaggcttacttccatgaaagacttctctgcaggcttcatctgtgtgatccgtccaagggaaaacattagatccatctccaactacattagaacagataattctcaatgggctctttcaagtgccttggggactggtctttgcaggggcggcaggagatgtaaatctacatggccaccgtcgtggctgccatcacgatgcttctttttgttgtatacttcacctatcctaacaagcggtcgatgatgcaagaaattacaaaggcgaatgggattctctgggtttgattttacacgtgataatcatgtatttttttcctgttctcgtctgggttgattaatcattaaacgtttggagtttctatatctgtatgaaatagcatctgttgcaacataagaatatggttgacactagacgtctacaagggctggtctagaatgccgtgctattgtcattattttttaagtttaccaagagctatctgaacgcgttccatttggattgaggtgtattgaagtggatggatgaggattttgattagtagtggatttattccctcttaatccttgtagatttaggagaaaacgaacatggcctaaattatttttttcatttcttccctggtggaatattattagacgccagttacatttaatgctcggtcgacaaagttgtcatgaaaatcatggaatcatttggtttctttgggatttttatttttaaccctcaaaaaaataaaaaa

SEQ ID NO: 20801 - DNA, 3392 bp, Zea Mays
cttcgactgctctctgccatcgctgtggcgaccccgacggagccaagcgacggttcatcttcttgcggcggcggcgacctcgagctgattgcagcgagaaggcggggacaaatcgatctcccctagctggctacacccgatggagccgagggttccttgcgttgacggcggcggcgacggcctcgagctgagggccgcgagaaggcatcgacgggagggcgggcgaatccacgtcctcgatgcgcaaatcctggagcctcagcgacagagatcgaatccattcaggaacatctttcatctattaactcaacgagaggtcttacctcgaacgaaacaccatgctaaaaggatatggaataactctccaaaatatgatcctcatttaattgagttaaggttttcagatgcagatgctaaacttggtattttatcttgggcagaatcactgtccctgcatcgctggtctgccaagtattgccctcttttgccacctcctaggtcaactattgcagctgctttcagtccagatggaaaatcacttgcgtccacacatggtgaccatactgtgaaaataatggactgccatacagggaaatgtgtgaaggttttgagtggacatcgacgcactccttgggtggtcaggtaccatcctttacattctgacattctggctagtggaagtttggatcatgaggttcgtctgtgggatgctaatacttcagactgtattggatcacaagacttccatcggccaattgcgtccattgcatttcatggaagaggagagattctggcagttgcatcaggtcacaaattgtacatatggaactacaataagagagatgatgcttctgtcccaaccatcatactaaggacccgccgttcgttgagagctgtgcattttcacccgcatggcgctccatatcttctaacagcagaggttaataatatagagtctgcagactcaccgctgactctggcaagatcatctggatattcaaactacccttcggccctgctggtgtcaaacactaattctagattctgtccacttcctgagtccaatgtgacgtcaccgtgcttactgtggcctgcgtacctcagagatgatgggattttacatgtgcttggcaatgccagtagttcaaccattgtgcagcagagatcatcattagttcaaccttccacatcagatactgcaaatctacagcttgaacagtttgctacccctatggatgtatgtcctggagagccaacttcatttaataacatatcagatgcagtaactgtgcctacttcaaatgcaattgaaatgcatggtgctggcggccagtctaacccaagactgcagggcagcagctctattagtaatcttgagaggttcagtgctagagatgctttgcaagtgtcttccctgagcagcattgagccaatcccatcaacagctgggtcttcgggatccaattcacgccgtgctatgccactgaatatgctcctcactggtggattagatgttcaaatgttccaaagaaatgtaggaagtggacaacaggatcattttctcttcggcgactcaagtaactgggaagtgccatttgtgcagggttttttgatgacccaaaaccatacaggtttgcaccctgcacttgtgaacaataatgtccttgaagacctatctggtgctggtactgcagggattaacaactcaactagggaatcatcacacatgcataactttggacgtccaggtgcttcatcatcgattccccttacttctggcagttctaggagaccaaatcgacactatgcctcacgctctgtgcctggggttgggagtttgctcctagtaggtcctcaaattgacgaagctgaagctcatgctgcttcactaggtgctggttcagaaatcactgcgtcgatgcttgctcctggtactgaattgccttgtacagtgaagctcagaatatggcggcatgatatcaatgaaccatgtgttcctttagcacctgaggcatgccgtctgacgatttctcatgccgttctttgcagatttggggatattcttgcttctagagcaataagggcagcacattgcttaacttccattcagttctcacctacatccgaacacatacttttggcatatggtcgtcgtcatagctcgctgcttaggagcatagtcgtggagggagaaaatgggattcctgtatatactattttggaggtatatagagtttcagatatggagcttgtgagagtgcttcctagtgccgaagatgaagtcaatgttgcatgctttcatcctttaccaggaggtggccttgtttatgggactaaggaagggaagctcaggatccttcaacacaatggcgcaaacatgataaacatggggtcgggttgcttcattgaggaaaatatggttgagatccagaggtatgcattggaatgctgaataagcttgaccacatcatgtgaattttaggcttacttccatgaaagacttctctgcaggcttcatctgtgtgatccgtccaagggaaaacattagatccatctccaactacattagaacagataattctcaatgggctctttcaagtgccttggggactggtatgggactctttgcactttaggattaactaatattcctggtatggatataatatcttttctctgctgctagctacaagggacgtctttgcaggggcggcaggagatgtaaatctacatggccaccgtcgtggctgccatcacgatgctgtaattataccttttgtacatgtattccaatcagcttaactcgattgctgttgtatttcagaacgttgacggtgctaatacttctgaagtctttttgttgtatacttcacctatcctaacaagcggtcgatgatgcaagaaattacaaaggcgaatgggattctctgggtttgattttacacgtgataatcatgtatttttttcctgttctcgtctgggttgattaatcattaaacgtttggagtttctatatctgtatgaaatagcatctgttgcaacataagaatatggttgacactagacgtctacaagggctggtctagaatgccgtgctattgtcattattttttaagtttaccaagagctatctgaacgcgttccatttggattgaggtgtattgaagtggatggatgaggattttgattagtagtggatttattccctcttaatccttgtagatttaggagaaaacgaacatggcctaaattatttttttcatttcttccctggtggaatattattagacgccagttacatttaatgctcggtcgacaaagttgtcatgaaaatcatggaatcatttggtttctttgggatttttatttttaaccctcaaaaaaataaaaaa

SEQ ID NO: 20802 - DNA, 2352 bp, Zea Mays
tcgactgctctctgccatcgctgtggcgaccccgacggagccaagcgacggttcatcttcttgcggcggcggcgacctcgagctgattgcagcgagaaggcggggacaaatcgatctcccctagctggctacacccgatggagccgagggttccttgcgttgacggcggcggcgacggcctcgagctgagggccgcgagaaggcatcgacgggagggcgggcgaatccacgtcctcgatgcgcaaatcctggagcctcagcgacagagatcgaatccattcaggaacatctttcatctattaactcaacgagaggtcttacctcgaacgaaacaccatgctaaaaggatatggaataactctccaaaatatgatcctcatttaattgagttaaggttttcagatgcagatgctaaacttggtattttatcttgggcagaatcactgtccctgcatcgctggtctgccaagtattgccctcttttgccacctcctaggtcaactattgcagctgctttcagtccagatggaaaatcacttgcgtccacacatggtgaccatactgtgaaaataatggactgccatacagggaaatgtgtgaaggttttgagtggacatcgacgcactccttgggtggtcaggtaccatcctttacattctgacattctggctagtggaagtttggatcatgaggttcgtctgtgggatgctaatacttcagactgtattggatcacaagacttccatcggccaattgcgtccattgcatttcatggaagaggagagattctggcagttgcatcaggtcacaaattgtacatatggaactacaataagagagatgatgcttctgtcccaaccatcatactaaggacccgccgttcgttgagagctgtgcattttcacccgcatggcgctccatatcttctaacagcagaggttaataatatagagtctgcagactcaccgctgactctggcaagatcatctggatattcaaactacccttcggccctgctggtgtcaaacactaattctagattctgtccacttcctgagtccaatgtgacgtcaccgtgcttactgtggcctgcgtacctcagagatgatgggattttacatgtgcttggcaatgccagtagttcaaccattgtgcagcagagatcatcattagttcaaccttccacatcagatactgcaaatctacagcttgaacagtttgctacccctatggatgtatgtcctggagagccaacttcatttaataacatatcagatgcagtaactgtgcctacttcaaatgcaattgaaatgcatggtgctggcggccagtctaacccaagactgcagggcagcagctctattagtaatcttgagaggttcagtgctagagatgctttgcaagtgtcttccctgagcagcattgagccaatcccatcaacagctgggtcttcgggatccaattcacgccgtgctatgccactgaatatgctcctcactggtggattagatgttcaaatgttccaaagaaatgtaggaagtggacaacaggatcattttctcttcggcgactcaagtaactgggaagtgccatttgtgcagggttttttgatgacccaaaaccatacaggtgcttcatcatcgattccccttacttctggcagttctaggagaccaaatcgacactatgcctcacgctctgtgcctggggttgggagtttgctcctagtaggtcctcaaattgacgaagctgaagctcatgctgcttcactaggtgctggttcagaaatcactgcgtcgatgcttgctcctggtactgaattgccttgtacagtgaagctcagaatatggcggcatgatatcaatgaaccatgtgttcctttagcacctgaggcatgccgtctgacgatttctcatgccgttctttgcagtgaaatgggtgcccatttttccccatgtggacgatttcttgtagcctgcgttgcatgtttgttgcctcaaacagaaggtggccgtggtagccaattgcctgtgccttatgaagaggctggatcatcaccaactcgtcatccacttccctctcaccgagttatttatgagcttcgggtttattcgcttgaggaggagacatttggggatattcttgcttctagagcaataagggcagcacattgcttaacttccattcagttctcacctacatccgaacacatacttttggcatatggtcgtcgtcatagctcgctgcttaggagcatagtcgtggagggagaaaatgggattcctgtatatactattttggagttgcatgatactttttgatacatgggattcaaaatgatttgcttattat

SEQ ID NO: 20803 - DNA, 3677 bp, Zea Mays
cgactgctctctgccatcgctgtggcgaccccgacggagccaagcgacggttcatcttcttgcggcggcggcgacctcgagctgattgcagcgagaaggcggggacaaatcgatctcccctagctggctacacccgatggagccgagggttccttgcgttgacggcggcggcgacggcctcgagctgagggccgcgagaaggcatcgacgggagggcgggcgaatccacgtcctcgatgcgcaaatcctggagcctcagcgacagagatcgaatccattcaggaacatctttcatctattaactcaacgagaggtcttacctcgaacgaaacaccatgctaaaaggatatggaataactctccaaaatatgatcctcatttaattgagttaaggttttcagatgcagatgctaaacttggtattttatcttgggcagaatcactgtccctgcatcgctggtctgccaagtattgccctcttttgccacctcctaggtcaactattgcagctgctttcagtccagatggaaaatcacttgcgtccacacatggtgaccatactgtgaaaataatggactgccatacagggaaatgtgtgaaggttttgagtggacatcgacgcactccttgggtggtcaggtaccatcctttacattctgacattctggctagtggaagtttggatcatgaggttcgtctgtgggatgctaatacttcagactgtattggatcacaagacttccatcggccaattgcgtccattgcatttcatggaagaggagagattctggcagttgcatcaggtcacaaattgtacatatggaactacaataagagagatgatgcttctgtcccaaccatcatactaaggacccgccgttcgttgagagctgtgcattttcacccgcatggcgctccatatcttctaacagcagaggttaataatatagagtctgcagactcaccgctgactctggcaagatcatctggatattcaaactacccttcggccctgctggtgtcaaacactaattctagattctgtccacttcctgagtccaatgtgacgtcaccgtgcttactgtggcctgcgtacctcagagatgatgggattttacatgtgcttggcaatgccagtagttcaaccattgtgcagcagagatcatcattagttcaaccttccacatcagatactgcaaatctacagcttgaacagtttgctacccctatggatgtatgtcctggagagccaacttcatttaataacatatcagatgcagtaactgtgcctacttcaaatgcaattgaaatgcatggtgctggcggccagtctaacccaagactgcagggcagcagctctattagtaatcttgagaggttcagtgctagagatgctttgcaagtgtcttccctgagcagcattgagccaatcccatcaacagctgggtcttcgggatccaattcacgccgtgctatgccactgaatatgctcctcactggtggattagatgttcaaatgttccaaagaaatgtaggaagtggacaacaggatcattttctcttcggcgactcaagtaactgggaagtgccatttgtgcagggttttttgatgacccaaaaccatacaggtttgcaccctgcacttgtgaacaataatgtccttgaagacctatctggtgctggtactgcagggattaacaactcaactagggaatcatcacacatgcataactttggacgtccaggtgcttcatcatcgattccccttacttctggcagttctaggagaccaaatcgacactatgcctcacgctctgtgcctggggttgggagtttgctcctagtaggtcctcaaattgacgaagctgaagctcatgctgcttcactaggtgctggttcagaaatcactgcgtcgatgcttgctcctggtactgaattgccttgtacagtgaagctcagaatatggcggcatgatatcaatgaaccatgtgttcctttagcacctgaggcatgccgtctgacgatttctcatgccgttctttgcagtgaaatgggtgcccatttttccccatgtggacgatttcttgtagcctgcgttgcatgtttgttgcctcaaacagaaggtggccgtggtagccaattgcctgtgccttatgaagaggctggatcatcaccaactcgtcatccacttccctctcaccgagttatttatgagcttcgggtttattcgcttgaggaggagacatttggggatattcttgcttctagagcaataagggcagcacattgcttaacttccattcagttctcacctacatccgaacacatacttttggcatatggtcgtcgtcatagctcgctgcttaggagcatagtcgtggagggagaaaatgggattcctgtatatactattttggaggtatatagagtttcagatatggagcttgtgagagtgcttcctagtgccgaagatgaagtcaatgttgcatgctttcatcctttaccaggaggtggccttgtttatgggactaaggaagggaagctcaggatccttcaacacaatggcgcaaacatgataaacatggggtcgggttgcttcattgaggaaaatatggttgaggtatggcactggcgcgcccgctcggtctgctgccttccccaccttcggcgacaacgacatgtcagctaccctccccctagcgtcgcctttgctcttctcggtggcattggcgcgcccgctcggtctgctgccttccccaccttcggcgacaacgacatgtctgcttggtcgacccttgtctcccacctcggcccatgcaccctcctgctcttgtctacgccgccattcgtggccctctccttcctcgacgtgtccgcttcccccgcatgcgacttcttctttagtgctttccctggtggcatgaccctcctgatccagaggcttacttccatgaaagacttctctgcaggcttcatctgtgtgatccgtccaagggaaaacattagatccatctccaactacattagaacagataattctcaatgggctctttcaagtgccttggggactggtctttgcaggggcggcaggagatgtaaatctacatggccaccgtcgtggctgccatcacgatgcttctttttgttgtatacttcacctatcctaacaagcggtcgatgatgcaagaaattacaaaggcgaatgggattctctgggtttgattttacacgtgataatcatgtatttttttcctgttctcgtctgggttgattaatcattaaacgtttggagtttctatatctgtatgaaatagcatctgttgcaacataagaatatggttgacactagacgtctacaagggctggtctagaatgccgtgctattgtcattattttttaagtttaccaagagctatctgaacgcgttccatttggattgaggtgtattgaagtggatggatgaggattttgattagtagtggatttattccctcttaatccttgtagatttaggagaaaacgaacatggcctaaattatttttttcatttcttccctggtggaatattattagacgccagttacatttaatgctcggtcgacaaagttgtcatgaaaatcatggaatcatttggtttctttgggatttttatttttaaccctcaaaaaaataaaaaa

SEQ ID NO: 20804 - DNA, 1204 bp, Zea Mays
agatatagaacctagctcatgtctataaatacagcacaccccgtcgtcatcttcagtcctcggacacaagcaaataagagcaaatcatagctgaccgatccaaacaacacgcccccgctctctcccaggtccctaagtgaaccaccctgtctggctaggcatggcctattgcgcatttgctccatctgcaccacctcaatattctgagcttaagatgactctatacacaaacaaggaggtgtatcgttctgggccagatcaaaacggagtaaccatcacagagagatcaaacatgggcacaacctgggtcttctcgtggcctgtagccgatgggccaacacctgatgcgaacatcgtcggccaactccagggcactagtgttcaagtagccaatactcccgttgtggtgtaccactactccctgggattagtgttcgaggataaaagaaagaaagcctactcacggcatttttcgctttccttcaacataccccgcgcgcgtgatgatgtatacctcatttttcaagaaagaagcctactcatgtacatacattaatcagaaaactgcaagtaacaaacgttcaatgggtccacactccaaatacaagggacctcccaaataaatggcgagtggagcattgttggagggacaggacaacttactatggcaatgggtactgtcaaacgcactgaagttgtgtacaaagacaataccaggatctcagaactcaaaatacatgcctatttcgctccagtgaattaagcctactacaactagtgtttatgaggctactgcatccgattaacctccccaaggcgtgagctttatgcagtcatttagcctggagtttgtatccgtgtcacctagtactttacggtaataataagagactgtatctgtatgtttcggtaaactagagttctggtcacctcttgtactcttttgtattttaatgaaatttagaatccgagtgtttctcttttgtactgatgcatcagtagttgtacatgcatcggtagatcgatcttttgttctttctaagctgtgatttgttgttggccttcttgtataatggtatatgaaaatacctttagccgagccggttaggtgtttgagtagcacttcttagtgttagagtgttcatgggcctggcccatgcattaggatttctatgttacctgtactgtagctagggttagggtt

SEQ ID NO: 20805 - DNA, 1035 bp, Zea Mays
cacaaattcctcggtgttagttgcaacaaccacccacgatagaaggagccatcgtcatccccgtaacagaagacccaacgttcgccgggagctcgcgcgacatcatcgcgtccagctcggtgtccacccgatgccttataaaattggagccggtgacctcctcctaccagaggctagaagctaaccaccgttgcgttgcatcgctgggatttgggggaaaacaaatttcaaatcgaagtcggcttgtgatggtggtgaccggcgatggaagacgagtagacgacagtggtgagtagggtttgttgactgagtagaggtcgagggtgcgccggccatggtgcggcttctcgggctacggagcctaagcttcggcccgaaggactcgccgcgggagatcccctccactgccgacgtggccccgcccgttggcagcagtgcctggcacgtgcgcttcttcaactccgccttcttctgcgggtggattttcgtcagctacctctacaagcacgaccatgctggagtgcacgactacatctgcaaccgcatgtacacgctcccgctgccggggctcgaggcctacctcttccagagcttgagctggaggatgatgacgatctcgatgggatcgatatggtgcaggagcagtgccaggatgcagcgaccgtgcagggcgagtggccaccgctggtccggccttcacttccatcccctgttgccagtccacgagaaaacacactggtgctacacgaatcaatgagaagcaaagtggaaaaccaccattaccaactaatttagtagcagagcttcgaaaagtctcttacagagatgaatagcccttctgctgaaaaaatgagcagtgaggacacgagaatctgaagaccagtctggtacctggaatcttgagtctaaggcaagttgtgcccttgatcacttttctctttacccaataatgctcctatcaatcactgtgacatgctcatgttaatttgatgggacctaataggtttccctagcattattaatcccacaccttgc

SEQ ID NO: 20806 - DNA, 3820 bp, Zea Mays
ttggaaacattatgcaacggcatgagtgtaacaaccaacatataataaaataattatccattatttaggaaaaatagaaggaaagcaaagaaatgagggagtaacacctgaatttggtgaatattaggaaagaaattttatacccccaaatttagggtgttacattgtggcgtcccaatggacgagggttgcaatcaacccctctcaagtggtccaaagacccacttgaataccacggtgttttgctttgcttatctttatcccacttgcgaggaatctccacaaattggagtctctcgcccttacacttaaagttcacaaagaagcacggagtaagtgagggaagcaacacacacaaatccacagcaaaatgcgcaaacacacggccaagaatcgagctcaaaagactatctcaaagttctcactagaacggagctcgaatcactgagaatgacaaacggatgcgcaaagactgagtgtggatgatcaagaatgctctaaggttgcttggttttctcctccatgcgcctaggggtcccttttatagccccaaggcagctaggagccgttgagagcaattctagaaggctgatcttgccttctgtcatcgggcgcaccggacagtccggtgcacaccggacactgtccggtgcccgatctctttcccaaaatggcacagccgaccgttgcagatctgggagccgttggtgcaccggacatgtccggtgcacaccggacagtccggtgcccccttccgaccgttggctcggccacgtgtcgcgcgcggattccgcggtcgaccgttggcccgaccgaccgttggctcaccggacagtccggtgcacaccggacagtccggtgaattttagccgtacgccgtcggcgaattcccgagagcggccacttcacccgaggcagcctggcgcaccggacactgtccggtgcaccaccggacagtccggtgccccagaccgaaacagccttttggctgtacacaaccaactcttctcttttcttcttctttctgtttctaacacttagacaagtatattagtacacaaaaccaatgtactaaggcttagaaacatacctttactcttgatttgcactttgtccatccatgagcataaattcacatttaagcacttgtgttggcactcaatcaccaaaatacttagaaatggcccaagggcacatttccctttcagctggacgtgtttggcgcagggggaactggtgctgaggtggatgtcgagcttcgtcctgcaaaagggttagaatatggcttcgagcggcgtccctgcacttcacgttcagctttgcaagcatattcaaataaagtagtcattacataatattccttataatcaagtatatcctggatttcgcggtttaaaccaccacaaaaacgtgccatagcagtgtcgttgtcctccaatatcccacaaagaatcatacctttttgtaactcctggaaatagtcctcaacaaatttagaaccttgctgaaaatgctgcattttattaagcaaatcacgagcataatacgaaggcacaaatcgatgtcgcatcacagctttcaactgatcccaagtggttggaatggcagtgggatgttttattttatactcacgccaccaaattaaagcaaaatcagtaaattcactaatagcagctttaacctgagaatgtgcagcaatatcatggcatgaaaatttttgttcaacctctaactcccaatcaagatatgcagcaggatcatatttgccattaaaaggtggaattttaaatttaatcttagaaaataagtcattagggggatgacgaaccacacggcgtgcacgaccacggtgatctccatcgtcctgctcagcgtcaccgccgtagtcctgctccatctttgtggtcaacgcatcaaggcatgctaggatggtgtcgagtgtggtgcgagtcgccgtttgagcaaggtcaagctggttgaaactctcagtcgtcgaagtgaccgttgaatcaagtcgttcatgcatcgtcctaatgtcagcagcaagtccatcaacttgtccccttacttccagcaactgggcatccaccgtgtcgtgtgctcctgccatagttagcgcaaacaccaaaacaccaaaaggagaaaaaccgacgacaacagggaaatggtggtgacaactcgctcaatggaatgctgttatcaagttcttatccgttcttaccaagccacagtggtgaactgcaaccaacaggtggaaccggtgaaagattggatgagcgattgcctggagaaacagaaaccttttcgtcgtagaaatatgtggagttttgagtaggctgcactcaagtcaaggattagcatgatcaaacaataatgcaaagttgaattatagtgcaaaacacaaaactatattgctggccacaagtgcaaaggacagatggaactagcagaatggcagtaccgtaaatattgtactagcgaggccaaaaatgcactagtaggaatcacaggtgattttgtttttcttttttatatgattttttgatatttttctaagcacaaggagcaacaaaataggagctacacgaagtttcacctaaaatagagttcagatgtggtctacagaaaatcaggaagttctctgaaaaacgtgcgagaactttgacgaattttttctttattttcctgaatatttttgacaattttatcgaaaccgaacaggtcgtaggcaagttggccggcctcagaatggtgtcaacaagctcctgtaaaaattccagattttttgaacaaccgagcgaaacgttatgcccggtttaaggaaggtatgtttaaaacggccgagatgagacaaccgctttgtatcctttctccttcgttttctgttttttttgtttctgtttttttttacgtaacggaaggagaaaaacaaggaagcggcgttgactcggtttgtttttttctgtttttttacgtaaccgaaggagaaaaataaggaagcggcgttgacttggtttgtggcgcgatcaaacggaatatggtggcggcgcgctagggtttgaatggtggaataacacaatgcaaccaacaacaaatgacgtgaaagcaaacaaattcaacaatgcagattattgaaagaaagtgcgaggctcaaaagggtgctgggataaggtctaacctaaatttttatgtagttttgtggactgtaggagaaaaaaacactcgataaactcaccgatcaacatggaaatctgataccacttgatggagctggagtgcccgatctttcggtgagtggagataattccgatttggtggaagtagaccctcacgatccgactacgacgagcgaacccgaagcgccaatgcaatcgctgaaccaactctcaatggttaccgaccttgctgatacgagatcggctgatcatgaagatcgtttcaggcctgacaaaatccgagcagggaggagactttggcccagcatggagctcgacgcggccaggcgagcaggagatcagggaaccgcgacctccatggccgagcagataaccacggtgcgacggctgagggagaggcagagcgcgcgcgtcggcatgggagagagagctcaggggatgaagacgtgagcaactcgcagggaagaccgacgcagggagccggccatggacgaagcaggcgcggcgctggacgctggagactagagaggagagctgaggggggcgcgactggagaagctgggaaggagttgggcgatggtgcggcaagctccacgacgagaaggctcagatagcgtccaccacacagcgcggataagagcagg

SEQ ID NO: 20807 - DNA, 572 bp, Zea Mays
tttttttccaaccgtcgttatcttgtggccgctacgcacttctctcctgcttcttccacgacagctccctcggccttcatctcccagccgctcctcctctctcctccctccatctctcctgcgtgcgccctactccctgctgctcgcccggccgagctccctagccgccgcgccgcgaactctagcgctcggtgcccaacttccagcgtcgcggcttcccaactccctctccctgcgcacgccgcgcgccgttctcccagcagcgtcccatcgagtctctctctccctccggtcgctaccatagtctttccccgctctagatccatggcaccagattcgcccagctgagttcatcagacctctggtctttgcctccccacgcgccatggctgttggaagctccgtcagcaattcagcaattcgtttcgtgcgtcatcaagaaatcccaagagtcgggtgaagacggagttagcagcatgatgttcaccaagtactcgacacaagggccgaactggaatccatgtcgtgctcgcggatagcgcgtcagagttagtatggtacgtgaattaacc

SEQ ID NO: 20808 - DNA, 1489 bp, Zea Mays
ggccaacagcctgctctgctgttcctgcgaagtggaactgcaaccgccaccacgggccccaccgcggcaaatcgccaccgacccagagaatggagactggagccgtctcctcctgtcctcccgagacccgactcaactttttctctgcacgccactgccaattccccgccagcagcagaaatcacactccgcttcatcttccgctggatccctagtctacgccggcctaacgccttgggacctccgctgctgttctctcgccggtcatttttggttcaggggctgatcgcttgatcggatcggtgtcgcagccctatacatcatacatgacgacgcccggctcctgtcctgcgacaaccgccgccacccaccctcccatgtgcgccgctagcgccgcaggtggatcgcaaaaaatggtgcgtccgcgactagtgctcttcggggactccatcaccgagcagtccttccgccccggtggctggggtgccgcactggctgatacctactcgcgcaaggctgatgtagttgtcagaggctatggtggatacaacacaagatgggctcttttcttagtacatcacatctttccgctggatggtttagcaccccctcttgcaaccactattttctttggagcaaatgacgcagccctgttaggaagaactggcgagcgacaacatgttccagtttcagaatataaaaataatctcaaaatgattgttaatcatttgaaggattgttctaattccatggttattgtgcttattacgccacctccaattgatgaagaaggaagagaaagatttgcacgaatgcgaggaagctacctgaaaggacaaatgaaatggctggggtctatgctggttattgcgtcgaactagctagagaaatgtgtataccctgtgttaatatctggtcaaagatgcaggagacagaaggatggcagaaactttacctaaggaaggaaacgcagttgtccacaaggaggttgtcgaagcattgagaaatgctggtttcaaagctgaacagatgccgtacgactttcctcatcactccaaaatagatggcagttgtccagaaaaggccttccaatgaaatgatttcgagttgtgtgatgttttggagttttggatcctgcattgaagattacgataacgtccaatgacatgagcttgagctgttacattttgggagtttgaaatcttgcgtatattttggagtttgagatcctgcattgaagattgtaatttcctccgtgcaaaattaaggacctaggcttctccaagatgctggtgttgcttcttctacacttacattttctggattaagacatgttagcttccatttctcgttattgtggtggatggtttggatattgaacgaattgaatattcggatatcatggtgttctgaagataccggatacagatctggatgactggatacagaaacggatactgatatgtagatagttgattagttgtcactt

SEQ ID NO: 20809 - DNA, 814 bp, Zea Mays
gtggaactgcaaccgccaccacgggccccaccgcggcaaatcgccaccgacccagagaatggagactggagccgtctcctcctgtcctcccgagacccgactcaactttttctctgcacgccactgccaattccccgccagcagcagaaatcacactccgcttcatcttccgctggatccctagtctacgccggcctaacgccttgggacctccgctgctgttctctcgccggtcatttttggttcaggggctgatcgcttgatcggatcggtgtcgcagccctatacatcatacatgacgacgcccggctcctgtcctgcgacaaccgccgccacccaccctcccatgtgcgccgctagcgccgcaggtggatcgcaaaaaatggtgcgtccgcgactagtgctcttcggggactccatcaccgagcagtccttccgccccggtggctggggtgccgcactggctgatacctactcgcgcaaggctgatgtagttgtcagaggctatggtggatacaacacaagatgggctcttttcttagtacatcacatctttccgctggatggtttagcaccccctcttgcaaccactattttctttggagcaaatgacgcagccctgttaggaagaactggcgagcgacaacatgttccagtttcagaatataaaaataatctcaaaatgattgttaatcatttgaaggattgttctaattccatggttattgtgcttattacgccacctccaattgatgaagaaggaagagaaagatttgcacggaaccattaggtttcatttgacataaagtttacc

SEQ ID NO: 20810 - DNA, 939 bp, Zea Mays
cgccaccgacccagagaatggagactggagccgtctcctcctgtcctcccgagacccgactcaactttttctctgcacgccactgccaattccccgccagcagcagaaatcacactccgcttcatcttccgctggatccctagtctacgccggcctaacgccttgggacctccgctgctgttctctcgccggtcatttttggttcaggggctgatcgcttgatcggatcggtgtcgcagccctatacatcatacatgacgacgcccggctcctgtcctgcgacaaccgccgccacccaccctcccatgtgcgccgctagcgccgcaggtggatcgcaaaaaatggtgcgtccgcgactagtgctcttcggggactccatcaccgagcagtccttccgccccggtggctggggtgccgcactggctgatacctactcgcgcaaggctgatgtagttgtcagaggctatggtggatacaacacaagatgggctcttttcttagtacatcacatctttccgctggatggtttagcaccccctcttgcaaccactattttctttggagcaaatgacgcagccctgttaggaagaactggcgagcgacaacatgttccagtttcagaatataaaaataatctcaaaatgattgttaatcatttgaaggattgttctaattccatggttattgtgcttattacgccacctccaattgatgaagaaggaagagaaagatttgcacggtcactttatggacagaatgcgaggaagctacctgaaaggacaaatgaaatggctggggtctatgctggttattgcgtcgaactagctagagaaatgtgtataccctgtgttaatatctggtcaaagatgcaggagacagaaggatggcagaaactttacctaagggcccaagggggcggcgacaaggagcagcagtaag

SEQ ID NO: 20811 - DNA, 910 bp, Zea Mays
gagaatggagactggagccgtctcctcctgtcctcccgagacccgactcaactttttctctgcacgccactgccaattccccgccagcagcagaaatcacactccgcttcatcttccgctggatccctagtctacgccggcctaacgccttgggacctccgctgctgttctctcgccggtcatttttggttcaggggctgatcgcttgatcggatcggtgtcgcagccctatacatcatacatgacgacgcccggctcctgtcctgcgacaaccgccgccacccaccctcccatgtgcgccgctagcgccgcaggtggatcgcaaaaaatggtgcgtccgcgactagtgctcttcggggactccatcaccgagcagtccttccgccccggtggctggggtgccgcactggctgatacctactcgcgcaaggctgatgtagttgtcagaggctatggtggatacaacacaagatgggctcttttcttagtacatcacatctttccgctggatggtttagcaccccctcttgcaaccactattttctttggagcaaatgacgcagccctgttaggaagaactggcgagcgacaacatgttccagtttcagaatataaaaataatctcaaaatgattgttaatcatttgaaggattgttctaattccatggttattgtgcttattacgccacctccaattgatgaagaaggaagagaaagatttgcacgaatgcgaggaagctacctgaaaggacaaatgaaatggctggggtctatgctggttattgcgtcgaactagctagagaaatgtgtataccctgtgttaatatctggtcaaagatgcaggagacagaaggatggcagaaactttacctaagggcccaagggggcggcgacaaggagcagcagtaag

SEQ ID NO: 20812 - DNA, 1107 bp, Zea Mays
gagaatggagactggagccgtctcctcctgtcctcccgagacccgactcaactttttctctgcacgccactgccaattccccgccagcagcagaaatcacactccgcttcatcttccgctggatccctagtctacgccggcctaacgccttgggacctccgctgctgttctctcgccggtcatttttggttcaggggctgatcgcttgatcggatcggtgtcgcagccctatacatcatacatgacgacgcccggctcctgtcctgcgacaaccgccgccacccaccctcccatgtgcgccgctagcgccgcaggtggatcgcaaaaaatggtgcgtccgcgactagtgctcttcggggactccatcaccgagcagtccttccgccccggtggctggggtgccgcactggctgatacctactcgcgcaaggctgatgtagttgtcagaggctatggtggatacaacacaagatgggctcttttcttagtacatcacatctttccgctggatggtttagcaccccctcttgcaaccactattttctttggagcaaatgacgcagccctgttaggaagaactggcgagcgacaacatgttccagtttcagaatataaaaataatctcaaaatgattgttaatcatttgaaggattgttctaattccatggttattgtgcttattacgccacctccaattgatgaagaaggaagagaaagatttgcacggtcactttatggacagaatgcgaggaagctacctgaaaggacaaatgaaatggctggggtctatgctggttattgcgtcgaactagctagagaaatgtgtataccctgtgttaatatctggtcaaagatgcaggagacagaaggatggcagaaactttacctaagagtagcttgattatttggtcttgcgcgaagagaacattgtttttgtgaaccctatacatttcattgtttcaaggtaatgcaagtttctgcaattacgattgcccagatcttgttcttgtttaaacgtaattctatttattgtacttcaaatctagaaactgttgctaaacctccaacatagctgtaatctcggacaccatttactttccatgcttt

SEQ ID NO: 20813 - DNA, 1445 bp, Zea Mays
gagaatggagactggagccgtctcctcctgtcctcccgagacccgactcaactttttctctgcacgccactgccaattccccgccagcagcagaaatcacactccgcttcatcttccgctggatccctagtctacgccggcctaacgccttgggacctccgctgctgttctctcgccggtcatttttggttcaggggctgatcgcttgatcggatcggtgtcgcagccctatacatcatacatgacgacgcccggctcctgtcctgcgacaaccgccgccacccaccctcccatgtgcgccgctagcgccgcaggtggatcgcaaaaaatggtgcgtccgcgactagtgctcttcggggactccatcaccgagcagtccttccgccccggtggctggggtgccgcactggctgatacctactcgcgcaaggctgatgtagttgtcagaggctatggtggatacaacacaagatgggctcttttcttagtacatcacatctttccgctggatggtttagcaccccctcttgcaaccactattttctttggagcaaatgacgcagccctgttaggaagaactggcgagcgacaacatgttccagtttcagaatataaaaataatctcaaaatgattgttaatcatttgaaggattgttctaattccatggttattgtgcttattacgccacctccaattgatgaagaaggaagagaaagatttgcacgaatgcgaggaagctacctgaaaggacaaatgaaatggctggggtctatgctggttattgcgtcgaactagctagagaaatgtgtataccctgtgttaatatctggtcaaagatgcaggagacagaaggatggcagaaactttacctaagtgacgttttgatcctgcagtgacggtctgcatctgacacaggaaggaaacgcagttgtccacaaggaggttgtcgaagcattgagaaatgctggtttcaaagctgaacagatgccgtacgactttcctcatcactccaaaatagatggcagttgtccagaaaaggccttccaatgaaatgatttcgagttgtgtgatgttttggagttttggatcctgcattgaagattacgataacgtccaatgacatgagcttgagctgttacattttgggagtttgaaatcttgcgtatattttggagtttgagatcctgcattgaagattgtaatttcctccgtgcaaaattaaggacctaggcttctccaagatgctggtgttgcttcttctacacttacattttctggattaagacatgttagcttccatttctcgttattgtggtggatggtttggatattgaacgaattgaatattcggatatcatggtgttctgaagataccggatacagatctggatgactggatacagaaacggatactgatatgtagatagttgattagttgtcactt

SEQ ID NO: 20814 - DNA, 1426 bp, Zea Mays
gagaatggagactggagccgtctcctcctgtcctcccgagacccgactcaactttttctctgcacgccactgccaattccccgccagcagcagaaatcacactccgcttcatcttccgctggatccctagtctacgccggcctaacgccttgggacctccgctgctgttctctcgccggtcatttttggttcaggggctgatcgcttgatcggatcggtgtcgcagccctatacatcatacatgacgacgcccggctcctgtcctgcgacaaccgccgccacccaccctcccatgtgcgccgctagcgccgcaggtggatcgcaaaaaatggtgcgtccgcgactagtgctcttcggggactccatcaccgagcagtccttccgccccggtggctggggtgccgcactggctgatacctactcgcgcaaggctgatgtagttgtcagaggctatggtggatacaacacaagatgggctcttttcttagtacatcacatctttccgctggatggtttagcaccccctcttgcaaccactattttctttggagcaaatgacgcagccctgttaggaagaactggcgagcgacaacatgttccagtttcagaatataaaaataatctcaaaatgattgttaatcatttgaaggattgttctaattccatggttattgtgcttattacgccacctccaattgatgaagaaggaagagaaagatttgcacgaatgcgaggaagctacctgaaaggacaaatgaaatggctggggtctatgctggttattgcgtcgaactagctagagaaatgtgtataccctgtgttaatatctggtcaaagatgcaggagacagaaggatggcagaaactttacctaagtgacggtctgcatctgacacaggaaggaaacgcagttgtccacaaggaggttgtcgaagcattgagaaatgctggtttcaaagctgaacagatgccgtacgactttcctcatcactccaaaatagatggcagttgtccagaaaaggccttccaatgaaatgatttcgagttgtgtgatgttttggagttttggatcctgcattgaagattacgataacgtccaatgacatgagcttgagctgttacattttgggagtttgaaatcttgcgtatattttggagtttgagatcctgcattgaagattgtaatttcctccgtgcaaaattaaggacctaggcttctccaagatgctggtgttgcttcttctacacttacattttctggattaagacatgttagcttccatttctcgttattgtggtggatggtttggatattgaacgaattgaatattcggatatcatggtgttctgaagataccggatacagatctggatgactggatacagaaacggatactgatatgtagatagttgattagttgtcactt

SEQ ID NO: 20815 - DNA, 1279 bp, Zea Mays
gagaatggagactggagccgtctcctcctgtcctcccgagacccgactcaactttttctctgcacgccactgccaattccccgccagcagcagaaatcacactccgcttcatcttccgctggatccctagtctacgccggcctaacgccttgggacctccgctgctgttctctcgccggtcatttttggttcaggggctgatcgcttgatcggatcggtgtcgcagccctatacatcatacatgacgacgcccggctcctgtcctgcgacaaccgccgccacccaccctcccatgtgcgccgctagcgccgcaggtggatcgcaaaaaatggtgcgtccgcgactagtgctcttcggggactccatcaccgagcagtccttccgccccggtggctggggtgccgcactggctgatacctactcgcgcaaggctgatgtagttgtcagaggctatggtggatacaacacaagatgggctcttttcttagtacatcacatctttccgctggattgttctaattccatggttattgtgcttattacgccacctccaattgatgaagaaggaagagaaagatttgcacggtcactttatggacagaatgcgaggaagctacctgaaaggacaaatgaaatggctggggtctatgctggttattgcgtcgaactagctagagaaatgtgtataccctgtgttaatatctggtcaaagatgcaggagacagaaggatggcagaaactttacctaaggaaggaaacgcagttgtccacaaggaggttgtcgaagcattgagaaatgctggtttcaaagctgaacagatgccgtacgactttcctcatcactccaaaatagatggcagttgtccagaaaaggccttccaatgaaatgatttcgagttgtgtgatgttttggagttttggatcctgcattgaagattacgataacgtccaatgacatgagcttgagctgttacattttgggagtttgaaatcttgcgtatattttggagtttgagatcctgcattgaagattgtaatttcctccgtgcaaaattaaggacctaggcttctccaagatgctggtgttgcttcttctacacttacattttctggattaagacatgttagcttccatttctcgttattgtggtggatggtttggatattgaacgaattgaatattcggatatcatggtgttctgaagataccggatacagatctggatgactggatacagaaacggatactgatatgtagatagttgattagttgtcactt

SEQ ID NO: 20816 - DNA, 2195 bp, Zea Mays
cgtgccttcatctcccagccgacggaagcctggaggcttcatctgctcacgacacctccctctgcgctcagctcccgacaaatcttgcctccctccgcaatcggctgctggagcttctctctgcgcctctccctggagttgagtccctcacgctcggcctcttctccaccttcctcagctcgcccaaccgagctcccggcgttggatcccctacgagctcccctacagctcgtccccatcttccatggccgcgcgcgaggctcctctgcttggccgcgctctctgctggctcgcgctctgtcgagctcctccccgaactccgccccgctatggcgctggccgccgcgcccttgccggttctctgctcggccatggaaatcgcgacccccagcttcctctgccgagtccggccggagctccctcctgctttgcttgtcggccgcgcgagctcgccggcgtgctcctgctccagccttaacgcgcgcgcctgctccctctgtccggccaccctcgccccacctctctcctttgccggtgctctgcccagtctccaccatggccgcgcctgctcccttgtccactcagttctttgctcgccggttgctgctcccggttgctgcgagctccagctcggattcagccctgcgcgccgtctctgctccctcgccatggtcgccgtgtttcctgcgtgcgacgcgcgctctcactagccgtgaagttcccatggcacgtctctgcgtccttgctccttcggtgcccctgctgctcagccttggacgctggatctcgcgcgcttctgcgccatggtaccttgggttctgcattcttgcattagcgccgcgcctgatcgtcgaccttgttgccatcttcctattccagaagctttgctgcagtcctatgttgatttcgtcgaatacctgtggtgtggtcccttgcttgtgtttgggagagaagttcttggtgtgggcggcgaagacagcgaaagccaactgtgacgcctgccaagtactcgacgtaaagcctgaaccacggtctcatcattgttcgtgtgaagttcaagccaattataattttgaaaggagatttggtgctgaagtcgaagccagtagcccctttattcttcgtcgtcaacccacaccgcgtcgcgacgtgcccgtcgatcccgacgctctatctgccagttgtgtgccacttgtattgagctctgaagcccctgtcgagctcttcccctgtaagccgccttcgaacacaacccttgctaagtgtttgataggaagcctgaaccaatactcatcgttgttctacgattattaaatcgttccggtcatggtaagccgatgaattattcagaatagttcaatcgtttaataaattaatgtactagtgtgatgttcactaggtgctcgataaattgcgtgagtcacggaactctcgtcgactctcgtcgacttagcggttcttgcgattatcgagccagatttagttataacgagttatttcgctattacagtcaattagctgaattgatggaccgagtagaatattagtaggcatgtgtgatgatgctttacttgatagattaagtataatgtgatgttttattagttaggatattttaaggattaattcaaaatagtggtttaaatagttagttaagttgtttcggtccatacttcgagtttcgtgtcccaaaataatgagtctaagtaattagtctttcagtattatgctttaatcaaatagaaaggtggaactcatatggtctattgttttcctaataaatgaatgtaggtttgatagtcttctggtgttgggccttagctaaggaaagtagacgtgcatataatctattgttccttgatgtttgagttaaatctagtaaaactagaaaatcatgattgttgtgttcagtgagttataggtgtctagtgcttacgtaggattgtgtcgatgtcttgccgctaagtattcgattttcttttctgtatcatccagttactttatgctcatacatgtgaattgtgcatctcatgaggtacgataattaattgtgtgatgcggaagacgacccaagtcgaccccaaccgcgggctactccgcatggtgatgctgatggacgaacctgcctgatcaagtgctaggacaaggatgatcgtcaagtggacatcgtctaacaacactaacctagtgttatc

SEQ ID NO: 20817 - DNA, 2508 bp, Zea Mays
tgccatttcgcctccaccaaaaatgccaggcatatgtcataccactgttaaatgagaattacttagaagttaaatgatagaacaatatattagtcaatcaccaatgatggcttcttagtttgagggtagctattaggatttagatggctagagagggtgaatagcctataaaacctttctacaaaaacataatttggttagtgcatagtggttagtatataacatgatcctaactaccttttattttgcactagctatatgtcactacaagaaagccccctaatctattctagtagcttggtctctaagtctacgtgtttcaaacaaacatgctacactaataagaaatacctacaactagcaaagctactcaaaaagagtaactaaggtaattacaactacgctggtagctactcaaacaactagcacactaacaagtaaagctaataaaatatatacaagtatgatagtgaacaaaccaaatggaacaatagaggtgaaacaatatttatgtctgaggttcagttgcttgtcgatatcctacatcattgttgtggtgagtgacaacttgatggtttgtgtgctaattggccacctcaaataccaagcccacgacatgtgtgcttcaagaactggccacggttccactagacatgttcttcataaatctccaatggggatgcactcaatatcccctcggaattaattgatcggagccgatgacagttagtaaagtcgctcaacaatctcacaaagctcctagccgactaggtgatgagaatcacaagagtaacaagagagccaccaactaatatgcctcaactagtgccactagataaaagaacgatgattcaagtgcattaagggctatctaatctcactcaattgatgaatcaaagatgcaagtgagtggagggtgtgtatgagctctgaagggctttgcataatagttatagggtataagagagtgtccatggcagtctactaaatctatttataagcttactcaaagaatccaacagttatctcttgaatcaaccgctacaagggcactagatattttttatgcaccattgatgcacacaccgaacaagttaggtgccactccaataggtcaaacctacccattatcatgtgtcatatgttccatgctcataacaaacatgacagtagacacatctagtgcttgttataagtgattgactaatttgctgtggcattttttgatgtggcatctagcgctcacactagacacgtctgaactctaagaaggttgcaacatgtattggagaaggccataagacactgcatgtatccaatggtgcatcagacatcacaacagatacctaatctttaacaagtagcaatggctagaataccaatgactagctgacatggattcatcgtacatgtttgttgggtgcaccatacatgtcttgtgcttttgtagaatggttgtgcacccttcaatgactagttttagagttggggccatatatacccctttggctaaggatttgaaaggtgtatgagctgagcaacagatcaatggatttgagactcatctctattagatctagactcctaagtgattaaagaatcacccaatgattagagtaggtgctttgcaaagtgcttaggctaattagttcaccacttaggtgcttgctcttggtctagactaaatgtttagtgagtttgttaaatctcttacccttgttccttgtgtgcaccattgttgtaatcaaaggggcttgtagtcttatgagatcacactatctaagtttatggtgtggccaccaccatatactagagggaatgagtcctacgaaattttagctagaagttagatagtgaaaatgacagggagtagtccaggaaaagatattttagagacccactttgcaggtggtgacggatcatgggttatccacaaagttacctagcaaggaatttgttcctcatgtaggcatccttgtggtgggctccaatgagaactagggaaagcatgatcttcttgatatctcagtaaaaatatcagagccattattgggagtttgcatctctatctcaattaagcttccatactttatttcttacttaggatatgtgcttactttccttatttagctttctaggctaatgataggattggagcctaggttgcataactcttttgtagtagagatagtaacacatctagcaaaaccatagtttcacatctagatgaattacttttttgcataggttttgattaggtggaaattagaggcgatagatacaagtaaaatataagcttcccaattcaaccccctttaaggtgtcatggtccctacactatggttgccatcctttatcaataccagatgtggactttacctatctcatacacaacactagagtaaaggttagtccactaattgtcttaattaccaaaaccaaatatagggatttcagtagttcaccgatttttgtagaagataatgcatactacaaccatgtttcttc

SEQ ID NO: 20818 - DNA, 3374 bp, Zea Mays
agttaaatgatagaacaatatattagtcaatcaccaatgatggcttcttagtttgagggtagctattaggatttagatggctagagagggtgaatagcctataaaacctttctacaaaaacataatttggttagtgcatagtggttagtatataacatgatcctaactaccttttattttgcactagctatatgtcactacaagaaagccccctaatctattctagtagcttggtctctaagtctacgtgtttcaaacaaacatgctacactaataagaaatacctacaactagcaaagctactcaaaaagagtaactaaggtaattacaactacgctggtagctactcaaacaactagcacactaacaagtaaagctaataaaatatatacaagtatgatagtgaacaaaccaaatggaacaatagaggtgaaacaatatttatgtctgaggttcagttgcttgtcgatatcctacatcattgttgtggtgagtgacaacttgatggtttgtgtgctaattggccacctcaaataccaagcccacgacatgtgtgcttcaagaactggccacggttccactagacatgttcttcataaatctccaatggggatgcactcaatatcccctcggaattaattgatcggagccgatgacagttagtaaagtcgctcaacaatctcacaaagctcctagccgactaggtgatgagaatcacaagagtaacaagagagccaccaactaatatgcctcaactagtgccactagataaaagaacgatgattcaagtgcattaagggctatctaatctcactcaattgatgaatcaaagatgcaagtgagtggagggtgtgtatgagctctgaagggctttgcataatagttatagggtataagagagtgtccatggcagtctactaaatctatttataagcttactcaaagaatccaacagttatctcttgaatcaaccgctacaagggcactagatattttttatgcaccattgatgcacacaccgaacaagttaggtgccactccaataggtcaaacctacccattatcatgtgtcatatgttccatgctcataacaaacatgacagtagacacatctagtgcttgttataagtgattgactaatttgctgtggcattttttgatgtggcatctagcgctcacactagacacgtctggtgagtgttctgcgctcttaggttgcttgttttccaaaatagctcttatctagtatgttgtccggtacggcaccggacacctttgttgaaccaacttgaggttcttgcacatggctaggataatactgttagccatctagtgaacactagactgcaaggtgttcggctgaaaactatattgtgtgtgagaacaagccatgtgtctagtgcacgactaaacatagctaatgcatgtaaaatagacgtaccaagagcactctcatctcctaacacgagttccaactctttaatgttttccaaacatttagatcatagctaacattttcctagtgttttccaaaatatttttggttgttctctaatgtgtgtcactaggcctaaatgaacatgcatgtaaatccaacacctagttgtacaagacgaccaaattcgctaatagatctcccctcttaatagtgcgaccttcgatcatgaactcgatcaaacactctaatgcatcttgactaaaaaaatcccagctatacctttgcattgagcccatgcactttgttagcacttgatcaacacttttggccatcaccatcatctcttttgtaaggaaaattgacctcatcccattatatttttttgtgttttatgaagaacaagaccattcaaactaatggacattgctagtgtaatgcatagtggacttggacatagccaaatgagtgatccgaatgatgaacacctcaaacaaggcattagaagacatgttgatgactgactagtaaatgcaaggatctaatacataagttgaaaaaatactagaaaagacacactaaaaaatgaagaggaacatgtgctactcgatagcaccggatactccgataatccactagatataccattggacaacattggtactattgcgaagaagggcaattgcaaccatggacatcagacatgcaggtgtgcatggatcctaggaattggatgtggccggtgatgcaccaaatccctcaccaagtagagaactctaagaaggttgcaacatgtattggagaaggccataagacactgcatgtatccaatggtgcatcagacatcacaacagatacctaatctttaacaagtagcaatggctagaataccaatgactagctgacatggattcatcgtacatgtttgttgggtgcaccatacatgtcttgtgcttttgtagaatggttgtgcacccttcaatgactagttttagagttggggccatatatacccctttggctaaggatttgaaaggtgtatgagctgagcaacagatcaatggatttgagactcatctctattagatctagactcctaagtgattaaagaatcacccaatgattagagtaggtgctttgcaaagtgcttaggctaattagttcaccacttaggtgcttgctcttggtctagactaaatgtttagtgagtttgttaaatctcttacccttgttccttgtgtgcaccattgttgtaatcaaaggggcttgtagtcttatgagatcacactatctaagtttatggtgtggccaccaccatatactagagggaatgagtcctacgaaattttagctagaagttagatagtgaaaatgacagggagtagtccaggaaaagatattttagagacccactttgcaggtggtgacggatcatgggttatccacaaagttacctagcaaggaatttgttcctcatgtaggcatccttgtggtgggctccaatgagaactagggaaagcatgatcttcttgatatctcagtaaaaatatcagagccattattgggagtttgcatctctatctcaattaagcttccatactttatttcttacttaggatatgtgcttactttccttatttagctttctaggctaatgataggattggagcctaggttgcataactcttttgtagtagagatagtaacacatctagcaaaaccatagtttcacatctagatgaattacttttttgcataggttttgattaggtggaaattagaggcgatagatacaagtaaaatataagcttcccaattcaaccccctttaaggtgtcatggtccctacactatggttgccatcctttatcaataccagatgtggactttacctatctcatacacaacactagagtaaaggttagtccactaattgtctt

SEQ ID NO: 20819 - DNA, 1252 bp, Zea Mays
tctaattcctttctattctagccactaatccgtcttctctggcggccatcagctggttcccttgctggctccgctggctctggactggagagcatacagacgcctgtctcctcgccatcctcggcccagcaacctcgattcctgcccaaggcttggtttggtccaaccaatcttgttgtgattgtaaccactgtagtcggagggctctgccaaatttatccaggtctgttattcctagacctccaatctcctttggcctggtcaggttcaatatttaatacgggtagaaaatgaatggtgaatgttcttgaataattttaatcagattcatatatgagtatatcacattgtacagatgggagccacttaatgcttagtagaaccatcaggtaccctctttgtagttcaagtgaactgggtaacacaaatctagaatagtggtgctctacatgtcagcatgatgcctttggttatgcattgtaccagatagatgctaaatcacaagcttttagttttgcagcatcttcttgctgtcagtgaccaccatttggttttgttgtaatgcctatagcatggccttctgcaatcattccctcaagtatccaacctttttatcagatggataatgacacatatgtctcgtttggttgccatatacctctagcctagcctgtattaggccagattgtgtggatacatacagtagcagtttgttttgttgtatgtcttaattaagagtggccattatgtatcctacctctttagaacatggataaggaaacatgtttcattttgttgccatacacctctaatctatcctgtataggcgagaccgtgtggatgcagttgcagtttgcttcattagctgaattaattaagaatggtcataaaggatggttttttttgcccgtataaatacatgctgcatgatatgaaggttgaaaccatgtgtaacttagtatattgtttgtaaagacactgaccattagtttatgggatatttcatccccgttgaggtatcatcatagccaagatccacttcctctgcttgacatgtcatggctgtagagagaaaatgtgagtgacaagagtaaaggacattcatattatgccatcgctcttcatatgttaattgtagaatttctggaggaacttaacttacctatcattttgatgcctcgacttctggatggggctaagtattttaactggctcagctgtcagcctactaatgtgcttctgcagttctttc

SEQ ID NO: 20820 - DNA, 257 bp, Zea Mays
aattcctttctattctagccactaatccgtcttctctggcggccatcagctggttcccttgctggctccgctggctctggactggagagcatacagacgcctgtctcctcgccatcctcggcccaacgagcaagtcattgaggatcctggtgcccagcaggtagaagttgctgagtaggagctcgttgaaggcaagttgtgcccttgatcacttcctttttacccagtcatgttcttattaaatataatgatctgca

SEQ ID NO: 20821 - DNA, 946 bp, Zea Mays
tttctattctagccactaatccgtcttctctggcggccatcagctggttcccttgctggctccgctggctctggactggagagcatacagacgcctgtctcctcgccatcctcggcccagcaacctcgattcctgcccaaggcttggtttggtccaaccaatcttgttgtgattgtaaccactgtagtcggagggctctgccaaatttatccagcatcttcttgctgtcagtgaccaccatttggttttgttgtaatgcctatagcatggccttctgcaatcattccctcaagtatccaacctttttatcagatggataatgacacatatgtctcgtttggttgccatatacctctagcctagcctgtattaggccagattgtgtggatacatacagtagcagtttgttttgttgtatgtcttaattaagagtggccattatgtatcctacctctttagaacatggataaggaaacatgtttcattttgttgccatacacctctaatctatcctgtataggcgagaccgtgtggatgcagttgcagtttgcttcattagctgaattaattaagaatggtcataaaggatggttttttttgcccgtataaatacatgctgcatgatatgaaggttgaaaccatgtgtaacttagtatattgtttgtaaagacactgaccattagtttatgggatatttcatccccgttgaggtatcatcatagccaagatccacttcctctgcttgacatgtcatggctgtagagagaaaatgtgagtgacaagagtaaaggacattcatattatgccatcgctcttcatatgttaattgtagaatttctggaggaacttaacttacctatcattttgatgcctcgacttctggatggggctaagtattttaactggctcagctgtcagcctactaatgtgcttctgcagttctttc

SEQ ID NO: 20822 - DNA, 2880 bp, Zea Mays
ctcattcttatctcacgtacagctatgcaccgttcttcatctgactctctcacggccacacgtactcggtctcatcctgagccgttctctacgtgcactctttgctctctctgaccaacaagccatgtctcctccgcgtttggttcctgctgtacgcgcctcctccttgttgtccgtccatggagctcgctccggcctcctgctccctcagtcggcactgtgctcggcttccagctcatcaagctcagcccccatggccgagcgccctcccagccatgacccccccggtgtttggccctagtcgctcgccctcaactgtgctgcgccaacgctccagccatggagtccctacgcgcacacctccactcggatttcgccaaggctcgtgctgttccctggcgcttcttcctgcgccgcgcccctggctcctctgttggccgcgcggccgtctcctgctccctgctcgccgagctccttgtgcaggccgcattcctctactcggccacggatgtcacattgtcggccgcggctttctctctctacttcacctccctgtgcgtggtagtgcccctctgctcgccacggcgcgtcgaactctcgcgccgagtccttttcctgctcggccgcccgtgttgctgttctttgcatgtgcgcagctccctgtgcgtcgctgtcctccctccccaactccctctggtccgcgctttcttcagttcggccagacaggacatcgttccctgctgcagttcgttgttgaatcgcctgctcgttgtctgtgccatcgaaactttccgagctgtgcgctcctctgtccggaccaccagcctacaattccagtattctcgccattgaagaatagtcgccgcactctgcgtcctcgccgtgttcgtgaagctgtcgtggagttgttgtcatttttcttcgcgtcgtgtgcacaccacgccgccgccttcgtatttttggcaagccccaacgtgcgctcacgctcatcatcccctgttcgaccttgtcgtcgagcttcgtctcagccttagcttgtcggtcacgctcgccagatgttcgatcgaggacttcagctgaaggccgtcgtcgttcaggcaactaccaaatcaaattgagatgtggtacgtgaattaaccacatgatgcggagaaccagaactgagtcgaccacaagatggtgctgatgaacggaactgaagatggacagacgaaacaagtatcagaacaaaagatggtcgtcaagtgatcgacgtctaacaaacactaacctagtgttacccaggcaagacccggtgcatgcaacccctttcttatgtttttaaaagatttttatacactttaagtctagtgaaatgtgcattaagtttataggagttgcttggaaactattggatgcattgcctaccttaatatccatacctttataaatacttctgatgaagtatcaaaatatgatttacaaaaatgcctagccctgcttaaatcttgtggatagaggttgtcttttgcattaatgcctagctcaggggttatcctaaggaaggacggcttctacctgcaagaatattttcattgggagcatggtgggatcttactgcaaagttccctataatgctcttttcatcctaaggaacacaaacaatcctaaggatggaagtacataaatcgggacttgggctaggaacaggtgatgttctacccaggttaattaaggattggatgtgtatgtaggcctgttgatcaaggactatcttaactagccacatgccctggatatggcacagggtaagcttgaacccagctattccatacatgaaaagacaatcgcgcactgggagtagagagatggcgagagtggcacgtaccctcctggcaaaggatcgcctaaaaggggtggtgtgctctcgggtggcgcggacctattcatgcagtggaggatccgtggtaatggtagacatatgcaagagttacgagaaacatatgtcgtgtggttagagatcctcagctgagtaaatcgattcggatcgccgttatatccccgaagagtggagacttgatctccgacctacaacctaagtcaggatgtaaacattatgagtaaaaaatgatgttgtattgatgagatggtgaaattagactaggtgcaaccagagtctattaatatttaatctggcgttaaaatattgaaagtaaggactcactttagtaagctagttctgcaaaagtatctaagttgattcttgctaagagcctcttcttgattcctaaatccagcatatccttgagagtctttttccttagttggataagacttgcgaaagtacacttcgtactcagggctttgtcccatgttgttttaggtgaagagcctgcggagctttgctacttttgtgcaaaggtggttcccaagtagaaggaagaaccgaaaatagaagtgtgttgctgtggatggtgctaagtgccggtgggctcggtcttcttataagtctaagtacctcttctatacttcttattaaggatggtcacttaagctagcatatatttaaaacttacaagtagtttataacatttcaaagtttatttctttgaatcactttgtaatcactccgataaacataatgtaaagttgatgtaacttgtaaccttttgtaataaagaaattccgctgcaaaatgttggtgtgtgatttgtgtttacttaatcttgcggttctggttgtaagtgtttgatccggggtccttgggacactcggacggatcctgttaagttatttggtgcacatgcatagccgtctgaggtctttgagacaaggataggtgcatgtgggcccaataacttaggaggttctgccacagctggtatcagagcaggattaagt

SEQ ID NO: 20823 - DNA, 831 bp, Zea Mays
gtatgcctttcgtgcagaataaagggggggctggacaggggagtcttcgtcctcgcttgcaactcagcacaaaagagaatgggaggagagagagagaggagttaggctctgctttggcggtactccatctggtgctgggacgctagtctggtgacgagccacatttccctaggcgctggactccggagaagaaaaggcggtcgaagaggagctgcctaactctgaggctttcgacttgatctagatggcgtctcctagtcagctttgtggcgctagggactaatatttagttcgctttattttatcatttatttttgtaagacttccgctatgtaataagtacatttatgatatttatgacatttatctctatgcactctattattatatgtgttgtcttctctagcgcatatatgagatgcacccgcctttgttccttaaatccgggtgtgacagggttgccgaaggtatcaactactacgacaacgactcctagaaagaggagaatggctagtgttttggatgctgttttacaatttactaagacgccaacttctgcttttgccggagcttttgacaagaagactgaagatgcaagagaagtgaccactgcaagcgccacttctattcatgttgaaacagggccttcgggggctgcgccagtagagatgatgaaagaaagtcttccagtaaaacccacgtcacctattcccgaagtacctctccagggtgatttggactatattattcaacatgctttagggaagcgactatctgaagagcagattgccgaagtgcaacactatgctaaggaactaaaatacccccaag

SEQ ID NO: 20824 - DNA, 3027 bp, Zea Mays
gtatgcctttcgtgcagaataaagggggggctggacaggggagtcttcgtcctcgcttgcaactcagcacaaaagagaatgggaggagagagagagaggagttaggctctgctttggcggtactccatctggtgctgggacgctagtctggtgacgagccacatttccctaggcgctggactccggtgagttttgccctcgttcctcgacgcgtaatccagggaccgtagtagtcgtcttggtaactcggcgcggttggggcatcggtgcctccgggattccatggagtatggcggcggcatgggactctggccttggacgcagtcggttgtgcccggttgtcgcgggttggacgacaccgataggtccgtagagccgagtacctgggcatggggactgaccttggggcagctggggccaccgctgtagagtgcgagtgcagggtagaagatgacagggcgtcccttgatctcacgatgtacggcgaggattagaggaacgggatgaagaaaaccgggaccgtaggatggtgagcggagggggtagattaaatcttgcgtacccattcgtatcgtggaatttgggcggttagattgtgatcgtgtggcccagatctgggtgggatttcataaagcgtggatctaatcgtgactatagatcttgaatcagacagccaggatagatccataccccttcgcggttctaaattgtacttgagcccctcggtttatgtcaaaataacccgcggtccatatccctgtaccctttgtcttataacttttagcaccaaggcccctggtctttctgaaaatcgacgcccagtccagaggatactaaaaaccgagaaataattatagaaattagtttttaatgcaaaaacaattctagaaacttgtaaaatgcatagaaaattcatttttaatccaaattgatccattccaatttctaaattttgtaatattaatgtctatcacctagaatctctgttttagaatggaaacagtaagaaaatttatttctcatttaatcctatttcaagcacataaaacctttggaaattcatatcttaaaatctataactccaaaattaatgattcctgttcctaggtccttattttaatgtgtatattattattgtgtattttatttaaatgtttgctgtgatgttaatttttgctatactatgtatgtattgtgttgatgcgagtagacgagcaagccactgtggatcctgaggttcagcaggtagaagttgctgagcaggagctcattgaaggcaagttttgccattgatcacttactttttcctagccattttcttattaattataatgatctgcatagggtaattttgatgggatccaataggttaccccagttttggctatctttataccttgtggccaattaatatttttgggtagtacatgctattgcttattgtggttttgggtatggagatacactattcatgatttcatctttattatctatttattattactgttcatgttaagatcattatgttaatgggaacatggagcgaccatccgggaaaacagtgctaccacaagggtttaatgggacgcccttggctgattaactaggaaagctagtggatgacttccttacccgaaaggggcaagggcagtaggggagtggtcagtgtagggaggtccttgggttgattttgctgcgatggcggtcaggcgagggattcctgcactagagtttcctataaactatagcgggatttctgaagctagtggaactttataaaggcctcgtagtgttaccctgcctcgcctcctcggtagaggtgtatgggattggctgtctcttggcagatgggtaacatgacttgtgggtaaagatgcgcaacctctgtagagtgtaaagctggtatactagtcgtgctcacggtcatgagcagctcgaacactcacatgattaatctatggaattaaaactcaatttgacatttgcatcacatttggtattattttattattaattttatttattattactaaggtttggtattaacttatacttagtaattgctaattaaattttgaccaacttataaaagcaatgctcagcttcagcctttattttgttgatcagccttacacttcacatgaactcccacctttggtgagttcatgccacattattccccacaacttgttgagctatgattgtatgtgagctcactcttgctgtctcacaacccccccacaggagaagaaaaggcggtcgaagaggagctgcctaactctgaggctttcgacttgatctagatggcgtctcctagtcagctttgtggcgctagggactaatatttagttcgctttattttatcatttatttttgtaagacttccgctatgtaataagtacatttatgatatttatgacatttatctctatgcactctattattatatgtgttgtcttctctagcgcatatatgagatgcacccgcctttgttccttaaatccgggtgtgacagggttgccgaaggtatcaactactacgacaacgactcctagaaagaggagaatggctagtgttttggatgctgttttacaatttactaagacgccaacttctgcttttgccggagcttttgacaagaagactgaagatgcaagagaagtgaccactgcaagcgccacttctattcatgttgaaacagggccttcgggggctgcgccagtagagatgatgaaagaaagtcttccagtaaaacccacgtcacctattcccgaagtacctctccagggtgatttggactatattattcaacatgctttagggaagcgactatctgaagagcagattgccgaagtgcaacactatgctaaggaactaaaatacccccaagggtccttggtatacggaggagacaacgaagatgacttcttttactgtctaccagatagtaaggacatcagtatttgccatgagatgatggacaacatgggttatccgaagcttgagcgtggtctgtctatgatgacg

SEQ ID NO: 20825 - DNA, 639 bp, Zea Mays
caaagagtgagagcctccaactcgcaactccgccgcagcagagcacgcacgcagagaagctcatcagtgcccatcccctgctccagtgaggagagagatagagagtcgccgccgccgccgctgccgccatgaagatcctagtcgcggtgaagcgggtggtggactacgccgtcaaggtgcgcgtgaggccggaccggacgggcgtggagacggccaacgtcaagatgtcgatgaaccccttctgcgaaatcgccgtcgaggaggcgctccggctccgcgaggccggcgctgctgctgaggtcgtcgcggccactgtgggccccgcccagtccgctgaaacgctccgcaccgcgctcgccaatggtgcggaccgcgccatccacgtgctccacgatccggaccccgcgcggcccctcctcccgctcaccgtcgccaagatcctccgcgctgtcgcgctccaggagaagcctggcctcgtcatcctcggcaagcaggcgattgatgatgattgcaaccaaacaggacaaatgctagctggattgcttcagtggccacaaggaacctttgcctccaagactgtgcagcgactagcgacaagccgacaacataatgtcttctcgaaatgaagctccatcttct

SEQ ID NO: 20826 - DNA, 592 bp, Zea Mays
caaagagtgagagcctccaactcgcaactccgccgcagcagagcacgcacgcagagaagctcatcagtgcccatcccctgctccagtgaggagagagatagagagtcgccgccgccgccgctgccgccatgaagatcctagtcgcggtgaagcgggtggtggactacgccgtcaaggtgcgcgtgaggccggaccggacgggcgtggagacggccaacgtcaagatgtcgatgaaccccttctgcgaaatcgccgtcgaggaggcgctccggctccgcgaggccggcgctgctgctgaggtcgtcgcggccactgtgggccccgcccagtccgctgaaacgctccgcaccgcgctcgccaatggtgcggaccgcgccatccacgtgctccacgatccggaccccgcgcggcccctcctcccgctcaccgtcgccaagatcctccgcgctgtcgcgctccaggagaagcctggcctcgtcatcctcggcaagcaggcgattgatgatgattgcaaccaaacaggacaaatgctagctggattgcttcagtggccacaaggaacctttgcctccaagttgagtggtggcgttcg

SEQ ID NO: 20827 - DNA, 1005 bp, Zea Mays
caaagagtgagagcctccaactcgcaactccgccgcagcagagcacgcacgcagagaagctcatcagtgcccatcccctgctccagtgaggagagagatagagagtcgccgccgccgccgctgccgccatgaagatcctagtcgcggtgaagcgggtggtggactacgccgtcaaggtgcgcgtgaggccggaccggacgggcgtggagacggccaacgtcaagatgtcgatgaaccccttctgcgaaatcgccgtcgaggaggcgctccggctccgcgaggccggcgctgctgctgaggtcgtcgcggccactgtgggccccgcccagtccgctgaaacgctccgcaccgcgctcgccaatggtgcggaccgcgccatccacgtgctccacgatccggaccccgcgcggcccctcctcccgctcaccgtcgccaagatcctccgcgctgtcgcgctccaggagaagcctggcctcgtcatcctcggcaagcaggacaaatgctagctggattgcttcagtggccacaaggaacctttgcctccaaggttatattggacaccgagaaacaaaaagctactgttgagcgagaagttgatggtggaattgaaaccatatgccttgatttgccagcagtgatcaccacggatttgagacttaaccagccaaggtatgcaactttgccgaacataatgaaggcaaagtccaaagttattaagaaagttgtccctaaagacctcggtgtagacattagatcagacatggaggttattgaggtcaacgaaccaccaaaacggaaggcaggggtgattctttcgtctgtcgacgagctcattgacaggttgaaaaatgaagcacgtgtcttgtaacaatttgtatattattccgactgaatatggtctgacgttcatttatgtaagttataataaaagcgttctccaaatgttcagaccatatttacaaataagagaagtgtttctacaaaccagtcaagatgctattccag

SEQ ID NO: 20828 - DNA, 547 bp, Zea Mays
caaagagtgagagcctccaactcgcaactccgccgcagcagagcacgcacgcagagaagctcatcagtgcccatcccctgctccagtgaggagagagatagagagtcgccgccgccgccgctgccgccatgaagatcctagtcgcggtgaagcgggtggtggactacgccgtcaaggtgcgcgtgaggccggaccggacgggcgtggagacggccaacgtcaagatgtcgatgaaccccttctgcgaaatcgccgtcgaggaggcgctccggctccgcgaggccggcgctgctgctgaggtcgtcgcggccactgtgggccccgcccagtccgctgaaacgctccgcaccgcgctcgccaatggtgcggaccgcgccatccacgtgctccacgatccggaccccgcgcggcccctcctcccgctcaccgtcgccaagatcctccgcgctgtcgcgctccaggagaagcctggcctcgtcatcctcggcaagcaggacaaatgctagctggattgcttcagtggccacaaggaacctttgcctccaag

SEQ ID NO: 20829 - DNA, 1218 bp, Zea Mays
atttaaacaaaatgacttacatgacatgacaatacattcttcaatttataatcattctaggtaccacatttttaataatttgaaagaaaaaatacatatacatatatttaataacattataattaatataatatagataagtgtcactcatatctcataaataagcattgtaaaataactcatacacaagtgtcctctaaatccaaaatgaaatactaattgaaaaacttagtcattaactgtttgtgctaacgttgagcataaataagtatatatgaattcaagtctccacacttgtgcggccacaaaaatttgagttccattccatcttttcctgtacaaaaactaaacagccatgctaggtttagttatatgaagctccttcaaccctgcatgatccaccaatgtctatcatctcattcaccaagaagtcgaacaaccgttctcgaacatttgctatctcatcaaacaatagctggaccaatatcatgatccaaactttccaagaaatgttcccatgaaacatttcaagaaatgagcaatagttggaccaatatcatgatccaaactttgcctctgtgtatcccgagacaagtgctccagcaaaccagacatcttttgcttacaggtggacacattatttagttcattgatactactttgttattatcatgtgaatttgaaagactgctataatttttcaataaataggtaatgctaggaaggcagctatccggactaaaaatcatagatatgtgatttttttatatgacattatcattctttcgaaaccacaacacatttcttgaaaaccatcaaatgacatgtcaagctattttgggtaaaataggtgacaataaaagttaccggttggttgcaaaccaacaactagaaaccggcagaagcaccaaaatgctcctcttccaatgctacaggaaaattgcaacacatattccacggctaccctgtaaatagtataatagtaataaaaatatacgagtactatgctgattttgtttcttcaaaagaagaggttttggaatcaacatccaaggtacagacactaaagcaagcagaaatataacaagctgcgatggagaaggcgagtggttaggcatgatagatcagtctgcttcacagaagggaacttatcaacaaggaatatagacctgcacagtcttctggccactaaacaaacatcactaaagtcatatgttg

SEQ ID NO: 20830 - DNA, 598 bp, Zea Mays
gtttggttctctggctcatacaactgaattcaccatcaacccaaatgtcgtcttcaggagtcccacagtgtgtggttgttttcatccctctttttctacatacggcaagaacaaacaagctgaacacaattactgcgactttgttgtttgacactgcaagcaggcatgattgccaaagtggagcccaaaccgtcaaatatcaacacactttttttattcatttggaagaaattagatcaaagcttacgaccataaccaagcaaagacatatacataaggtgcaacgtagaatgaagggagttgctgaaggttcttgtttaagacaataagtaacagtagtctactatttgtgaaggaataagtcaagacatgcatatctgaacaaacagatttggagcgataaggttggtactttcagccgtcaagggtatatggtttgtcagatgacaagcttgaatgtgaatttggggcaagctagatattagctaatttgaaactaatgatgaactatttgttttttcatatttcttttccatgctttatgctaccctataatgcgataaatcaaggtatagaatatttgtcaataaacatgttt

SEQ ID NO: 20831 - DNA, 2750 bp, Zea Mays
cactcctccatctaggcagccacacccgtcgatggggccatccaacgaatatacggaagcagtttctagttttcttcagttcgccgctgcagtttctagtttccagcggttcccaccagttgtctaataacttattgttgttgtacgtgaggttgcttttgtcgtatttgccaggttgcttttgttgtatttgccaggttgacacacttggtgttgtaaatcattgctatttttgggtcatgacttgtttttattgaaatcaattggctgccaagggtacactaaatctttgatgcaacataataggatcaccatgctgtcttcttcagagacttgccagcttggttctagttctagcaaccctgtcatggatcagcagaatttacttcccaacaactctaacgtggatgaacagattttactcccaaatgcattagagcatgaggactacccacactatttgctcaatagtcatgaggtgggaatgccaagtggaagcctgattggtcagcaaaatacaagcttgagcttgtgggaaccagctggatctagctcaatggagtgcttagttgatcatgacaactttttccaggcaaaaagagaacatcttgcctcttctcggtctattggtgccccgttaagtatagagaggaggagacatgaaggcactagttcattgccttcacacaacctaaacatagacctcaacattaatcaggctgatcaatttggctctgatgatgttgatcttgcacatggtaatggacaaccaagagcaaatactgtcacagcccacaggggctctttcataactgagcatattctgcatcatggagtttcttcggatgctataggaaattcttccaggaatgcagagtgttttgttggtgcagcaggccaagacagtcatcatgcagcctttaagagaaagtatcttgatggatgtcatgcagagtcttctgctaacggaagctcacgcaatcgtcaccagaataatagtactctgctacctcctccgaccacctgtgaaagttttactatacccaccgcaacaaattttagtgttccgtaccatcctgtggagcagctaaaccagagtactaatattgctgcaagctctactttgtctgatcactattcttcatacagtgatccacgtggaaacgaattcgtgcgaaatacacggatgcgaataaaccctagtgattatgatcaatcgctgcccagtctattacctgaggggagtttcaggtgctcggcttaccaatctacacagcagcagtcatcatttattccagcgcaacctagacaagttagctcttcttctggttctcatagtcgatctcatgtgcctgctgttactcagttttcacaaaatcttcgccgtccatcaactgttagttttgggtcaagaattgggaattcttccacttctggttctacaataccaatacctgcttcacaagatcctggtacaagcttgttgggaagcgattatcctgagccacttttgttaggttctttgtttacagctgattcaacaaatttcttatctgcatctggaagcataagtaaccagcaaaattctggatccagctctagttccatgctcaggcctgctgttaatgttggaacacaagtccctgagttcaacgtatctcagccaagtacaactttaagaggttcatctgatgtgttcaggaggtccttaatttctgctggcatttctcattctagaagttcaagcatcccattgcagcaccgtggaaattcatccacatcacatgagattaggaatcatcagccaggatcaagctctcgtgcacatcagcagcaccccttaagacccggtcattcctctgtagacaggcagagctctggttacttggaccttcagtcttttatgcagaccatagcttcaagggaaggaggcagaccaatgtcagagatccgcaatgtcttcgatcagattcgtcaggggagaaatgcacgattggaggatttgcttctcattgaccggtcacttattatgagacgagctaatttgattgatagacatcgggatatgaggcttgatgtggataatatgtcctatgaggaattgctggcactaggtgaacgcattgggtacgtaaacacaggacttactgaagaaaagattttgagtaacttgaaacaatggaaatgtgtcttaaaatcattggatgatcctccaacaagtgttgaaccatgctgtatttgccaggaagactatgtggaaggcgaggacctgggcaggctggattgtggtcatgacttccacaccgcatgtatcaaacaatggctggttataaaaaacctgtgcccaatctgcaagaaaacagcactggacacctaaaaacatggctgcctttttccttaggaaaaagccggtagcggcagggcaagtggttgccatctaaccacaccctcccatgactagcaaagtatgttacacctttcccatcatcaacatacatgtgggaatctatactataggtggtacatggcacttgcctgaagccaatggctgtagaccatggagttttatcctttgtttttttcaatcttagatttgggatttaaaatttattcaatgacatttgatttacttgggcaatctgcgatatttgctatcatcatcgatcgcttatcatctcagattttgttgtttgatttgtgctgtgactagcagcttgtaattcgttcacctcgattcttgaacacgctgt

SEQ ID NO: 20832 - DNA, 2820 bp, Zea Mays
gccacccgcccctcccagaaaaacgccgcaacccctctctcattttcttcctcgtctacacctccttctctcctcctcgatacattcgagcacgcccggacgcggtcagaagggagaaagcagcaagcggcgccgggttccccctcccttcgtcgcccccgatcgacgccgatcggggccgactgctcgtgggggacgccgaccgaagcccgggcggcgctgcttcaatatacggaagcagtttctagttttcttcagttcgccgctgcagtttctagtttccagcggttcccaccagttgtctaataacttattgttgttgtacgtgaggttgcttttgtcgtatttgccaggttgcttttgttgtatttgccaggatcaccatgctgtcttcttcagagacttgccagcttggttctagttctagcaaccctgtcatggatcagcagaatttacttcccaacaactctaacgtggatgaacagattttactcccaaatgcattagagcatgaggactacccacactatttgctcaatagtcatgaggtgggaatgccaagtggaagcctgattggtcagcaaaatacaagcttgagcttgtgggaaccagctggatctagctcaatggagtgcttagttgatcatgacaactttttccaggcaaaaagagaacatcttgcctcttctcggtctattggtgccccgttaagtatagagaggaggagacatgaaggcactagttcattgccttcacacaacctaaacatagacctcaacattaatcaggctgatcaatttggctctgatgatgttgatcttgcacatggtaatggacaaccaagagcaaatactgtcacagcccacaggggctctttcataactgagcatattctgcatcatggagtttcttcggatgctataggaaattcttccaggaatgcagagtgttttgttggtgcagcaggccaagacagtcatcatgcagcctttaagagaaagtatcttgatggatgtcatgcagagtcttctgctaacggaagctcacgcaatcgtcaccagaataatagtactctgctacctcctccgaccacctgtgaaagttttactatacccaccgcaacaaattttagtgttccgtaccatcctgtggagcagctaaaccagagtactaatattgctgcaagctctactttgtctgatcactattcttcatacagtgatccacgtggaaacgaattcgtgcgaaatacacggatgcgaataaaccctagtgattatgatcaatcgctgcccagtctattacctgaggggagtttcaggtgctcggcttaccaatctacacagcagcagtcatcatttattccagcgcaacctagacaagttagctcttcttctggttctcatagtcgatctcatgtgcctgctgttactcagttttcacaaaatcttcgccgtccatcaactgttagttttgggtcaagaattgggaattcttccacttctggttctacaataccaatacctgcttcacaagatcctggtacaagcttgttgggaagcgattatcctgagccacttttgttaggttctttgtttacagctgattcaacaaatttcttatctgcatctggaagcataagtaaccagcaaaattctggatccagctctagttccatgctcaggcctgctgttaatgttggaacacaagtccctgagttcaacgtatctcagccaagtacaactttaagaggttcatctgatgtgttcaggaggtccttaatttctgctggcatttctcattctagaagttcaagcatcccattgcagcaccgtggaaattcatccacatcacatgagattaggaatcatcagccaggatcaagctctcgtgcacatcagcagcaccccttaagacccggtcattcctctgtagacaggcagagctctggttacttggaccttcagtcttttatgcagaccatagcttcaagggaaggaggcagaccaatgtcagagatccgcaatgtcttcgatcagattcgtcaggggagaaatgcacgattggaggatttgcttctcattgaccggtcacttattatgagacgagctaatttgattgatagacatcgggatatgaggcttgatgtggataatatgtcctatgaggaattgctggcactaggtgaacgcattgggtacgtaaacacaggacttactgaagaaaagattttgagtaacttgaaacaatggaaatgtgtcttaaaatcattggatgatcctccaacaagtgttgaaccatgctgtatttgccaggaagactatgtggaaggcgaggacctgggcaggctggattgtggtcatgacttccacaccgcatgtatcaaacaatggctggttataaaaaacctgtgcccaatctgcaagaaaacagcactggacacctaaaaacatggctgcctttttccttaggaaaaagccggtagcggcagggcaagtggttgccatctaaccacaccctcccatgactagcaaagtatgttacacctttcccatcatcaacatacatgtgggaatctatactataggtggtacatggcacttgcctgaagccaatggctgtagaccatggagttttatcctttgtttttttcaatcttagatttgggatttaaaatttattcaatgacatttgatttacttgggcaatctgcgatatttgctatcatcatcgatcgcttatcatctcagattttgttgtttgatttgtgctgtgactagcagcttgtaattcgttcacctcgattcttgaacacgctgt

SEQ ID NO: 20833 - DNA, 2882 bp, Zea Mays
ccacccgcccctcccagaaaaacgccgcaacccctctctcattttcttcctcgtctacacctccttctctcctcctcgatacattcgagcacgcccggacgcggtcagaagggagaaagcagcaagcggcgccgggttccccctcccttcgtcgcccccgatcgacgccgatcggggccgactgctcgtgggggacgccgaccgaagcccgggcggcgctgcttcaatatacggaagcagtttctagttttcttcagttcgccgctgcagtttctagtttccagcggttcccaccagttgtctaataacttattgttgttgtacgtgaggttgacacacttggtgttgtaaatcattgctatttttgggtcatgacttgtttttattgaaatcaattggctgccaagggtacactaaatctttgatgcaacataataggatcaccatgctgtcttcttcagagacttgccagcttggttctagttctagcaaccctgtcatggatcagcagaatttacttcccaacaactctaacgtggatgaacagattttactcccaaatgcattagagcatgaggactacccacactatttgctcaatagtcatgaggtgggaatgccaagtggaagcctgattggtcagcaaaatacaagcttgagcttgtgggaaccagctggatctagctcaatggagtgcttagttgatcatgacaactttttccaggcaaaaagagaacatcttgcctcttctcggtctattggtgccccgttaagtatagagaggaggagacatgaaggcactagttcattgccttcacacaacctaaacatagacctcaacattaatcaggctgatcaatttggctctgatgatgttgatcttgcacatggtaatggacaaccaagagcaaatactgtcacagcccacaggggctctttcataactgagcatattctgcatcatggagtttcttcggatgctataggaaattcttccaggaatgcagagtgttttgttggtgcagcaggccaagacagtcatcatgcagcctttaagagaaagtatcttgatggatgtcatgcagagtcttctgctaacggaagctcacgcaatcgtcaccagaataatagtactctgctacctcctccgaccacctgtgaaagttttactatacccaccgcaacaaattttagtgttccgtaccatcctgtggagcagctaaaccagagtactaatattgctgcaagctctactttgtctgatcactattcttcatacagtgatccacgtggaaacgaattcgtgcgaaatacacggatgcgaataaaccctagtgattatgatcaatcgctgcccagtctattacctgaggggagtttcaggtgctcggcttaccaatctacacagcagcagtcatcatttattccagcgcaacctagacaagttagctcttcttctggttctcatagtcgatctcatgtgcctgctgttactcagttttcacaaaatcttcgccgtccatcaactgttagttttgggtcaagaattgggaattcttccacttctggttctacaataccaatacctgcttcacaagatcctggtacaagcttgttgggaagcgattatcctgagccacttttgttaggttctttgtttacagctgattcaacaaatttcttatctgcatctggaagcataagtaaccagcaaaattctggatccagctctagttccatgctcaggcctgctgttaatgttggaacacaagtccctgagttcaacgtatctcagccaagtacaactttaagaggttcatctgatgtgttcaggaggtccttaatttctgctggcatttctcattctagaagttcaagcatcccattgcagcaccgtggaaattcatccacatcacatgagattaggaatcatcagccaggatcaagctctcgtgcacatcagcagcaccccttaagacccggtcattcctctgtagacaggcagagctctggttacttggaccttcagtcttttatgcagaccatagcttcaagggaaggaggcagaccaatgtcagagatccgcaatgtcttcgatcagattcgtcaggggagaaatgcacgattggaggatttgcttctcattgaccggtcacttattatgagacgagctaatttgattgatagacatcgggatatgaggcttgatgtggataatatgtcctatgaggaattgctggcactaggtgaacgcattgggtacgtaaacacaggacttactgaagaaaagattttgagtaacttgaaacaatggaaatgtgtcttaaaatcattggatgatcctccaacaagtgttgaaccatgctgtatttgccaggaagactatgtggaaggcgaggacctgggcaggctggattgtggtcatgacttccacaccgcatgtatcaaacaatggctggttataaaaaacctgtgcccaatctgcaagaaaacagcactggacacctaaaaacatggctgcctttttccttaggaaaaagccggtagcggcagggcaagtggttgccatctaaccacaccctcccatgactagcaaagtatgttacacctttcccatcatcaacatacatgtgggaatctatactataggtggtacatggcacttgcctgaagccaatggctgtagaccatggagttttatcctttgtttttttcaatcttagatttgggatttaaaatttattcaatgacatttgatttacttgggcaatctgcgatatttgctatcatcatcgatcgcttatcatctcagattttgttgtttgatttgtgctgtgactagcagcttgtaattcgttcacctcgattcttgaacacgctgt

SEQ ID NO: 20834 - DNA, 3462 bp, Zea Mays
aagtatgtcgtagcagcaagccaaacagatacaaatcagtacgtcgcctaagtatagctttgtgagcagcaggtgactcgtagccaagagtcgttacagaaatggcacacgatcacaaggtgctggacgcgctggacgcagccaagacacagtggtaccacttcacggcggtggtggtcgccggcatgggcttcttcaccgatgcgtacgacctcttctccatctccctcgtcaccaagctcctcggccgcatctactactcggaccccagctccaagacccccggctccctcccgcccaacgtctccgcagccgtcaacggcgtcgccttctgcggcacgctcgccgggcagctcttcttcggctggctcggcgacaagatgggccgcaagaaggtgtacgggatgacgctcatgctcatggccatctgctgcctcgcctccggcctctcgttcgggtccacgcccaaggacgtcatggtcacgctctgcttcttccgcttctggctcggcgtcggcatcggcggcgactacccgctgtccgcgaccatcatgtccgagtacgccaacaaacggacgcgcggcgcattcatcgcggccgtcttcgccatgcagggcttcggcaacctcgccggcggcatcgtcgccattgccgtctcggcggcgtttaagtcccgcttcgacgcgccggcgtacaaggacgaccccgccggctccacggtgccacaggccgactacgtgtggcgcatcgtcctcatgttcggcgccgtcccggctctgctcacctactactggcgcatgaagatgcccgagacggcgcggtacaccgcgctggtcgccaagaacgccaagcaggccacgtccgacatggcgcgtgtgctcgacgtcgacctggccgaggagcggcagaagccggtagaggagttggagcgccgccgcgaggagttcggtctcttctcccgccagttcgcgaagcggcatggcctccacctgctgggcacgacggtgtgctggttcacgctggacatcgccttctactcgcagaacctgttccagaaggacatgtacgccgccgtgaactggctgccgagggcggacaccatgaacgccctggaggagatgttcaggatctcccgcgcgcagacgctcgtcgcgctgtgcggcaccatcccgggctactggttcaccgtcttcttcatcgacatcgtcggccgcttcgccatccagctcggcggcttcttcttcatgacggcgttcatgctgggcctcgccatcccgtaccaccactggacgaccccagggcaccacgtcggcttcgtcgtcatgtacgccctcactttcttcttcgccaacttcgggcccaactccaccaccttcatcgtgccggcggagatcttcccagcaaggctgcggtccacctgccacggtatttcttcagctgcaggaaagtgtggcgccattgtcgggtcatttgggttcctgtacgcggcgcagagcacggatcccaccaagacggactccgggtacccgccgggcatcggagtgcgcaactcgctgttcatgctcaccggatgcaatgttatcggtttcctgttcacgttcctggtgccggagtccaagggaaaatcgctggaagagctctccggcgagaacgacgaggaggcagcaccgcagcaacagcagaccgtgccgacagatttgagtgaataaaacagagaaacagtacactcctactactacttgtcaatgtcttgtatttctgtagaactttcttttagtttcaggacgactattgtattgaactggcatgtttgaaggaaccgacgacagatctaaaagaccataattctaatcgaaataaagtaaatgctaaggatgtgtcaaaagggtttgggataacgagtggtagtaataaaaaatataaatttttgtttattatcgtaagctataaaattgtgctaccgctacggcaaattgaaatgaagtgaatctagtataatgagtttatcaaaaagttgagtattattgcaaataacatcacatctattgtatatctagaatccacataaatcttgatatactctgtaatttattgtatttctgcttgttgtctttagattcatagcccttgtacttcattaattctacgacgaaacaatacattctcagtctggatatttggtattacatatcattgaactcagttaataattaattcaaaatgatatattgaccaagtgttaggggctccctttggtcgaaggtccttaaaaatttaactcgtcagttattcctaagtctttttcaggtataacaggataactgccaaaggataccttcgtttggagatggtgtgtgtgtcaatcacaatcgtgaagacgaaactagaagcttcggttgagtgacgtaaaagcataacgaatgaaagagctagcaaaagcaagagaaaatcttcaaggcttgatcaacaagactacaaggagaaaagatgataataatcagctcgacttacggcaccagggaggccaacagctttccgaagaagatatatcagagttgaaagaatttgttgtgtctggcggttctagcctagatccgttctctttggcggcatagacgaagaaatcttgggatgcatccttgatcgtgctggagcaaaaattatgaataccctggccaagagtatcggatttcggaagcttgaaagggacgttagcaattatagaagacaacatatcgttggcaacttgttttattcaaattttaaggtacaattttctgctgttcctccttcgttcaattagctttagtgttttaagaatgaaaatctaatacaacttcgtcttttgccacatagtctgcttttgagcaaatcatagaaattcgagcaagataatgaagataaaaagaacgagtttatcatcagcgatttggagaaaaagattgagaatcttgaaaattctttgaaggaaaaaatactctctattgagtattgctgaagctcgtcttcataacgagaagcaaagcattcaaatttcagatcaagaagcgagaattgaaaggttgagtaaagagctgaaagaaacgaaaacaactttagaagacagtataagccgattcaatcgtgaatccgaagctttaagtatgaaagtcaaagatgaagctgaaaagaactttaaacttagcgaaacactaaaaactcttcgagacatatgctttggctttggacgcagtcctcctctcggttgaagggcattttcaactctgttggggcaacatccgaggaagttaatcactcagtcgaagatattccaagggcactcaaatggaaaagaaattgaaaatctcaatgaagttatagtcggccacggtgacttctgtgccctagtggctgcccgtggaatggccgctgttttcgccaaggctggatgcaaccacctcaaaactgtcaataaaccaacct

SEQ ID NO: 20835 - DNA, 236 bp, Zea Mays
caatagattcatcactcaaatctggatgaagggtggccgggaagttgctggagacaaagctcggtcactaattaacaagggcaaaactgatgaagattgagaagccaaagcttatcccaatagccctgaaggatgcttctgaggctatcttgtaattctgccagtagtcctggaagatgcttttagagctttttttgtaaatgaaaaacattatatccggcaaaaaatgtcgaaga

SEQ ID NO: 20836 - DNA, 430 bp, Zea Mays
tttcggttcaactaattttctcaggtctcatcagttggatcttacggcacaactgtgtcagcgtcaccgaggcaaatccgagtacttaccgccgcaactgatggaagaaatggacctcccagcaatgatcaccagtgcccgctcgggacctaccccaattgttaagcaatggatgtatcaaaacactgaggaacagctcaaatacgttcacgaaaattacacccgtctgtgctgttaggggagcatgaatatcatgaacatggatagctgtattgccatcccacacagtacttgtttttattcttgtgtacacgtcactctcttatatatacttaagaaagatgtattaaatacattgaattcactactgtaatccggctttttgccgagtatcaaacaaaaaatgataggagaaaacactcgataaaag

SEQ ID NO: 20837 - DNA, 1114 bp, Zea Mays
ggatcagctcattccgggccttattccaggtggaaccaatggacctggtttggaatttggtacagcccattaaaagtgttcgtttcggcccgaactggaatcgaaactggcccggattaaaattttccttcacgccacggcctggaaccaacccttgtgtcgtaccctccggatcgaatcctggacgacgcgaccggcacggcggcggcgcacagccccgacgacgaccctccccgctgccttctccccgatctctacgacaccaattatagatggggaaggtgaacctcctccctcttgggatccggcaccaactccaaaagttctacactcagatgagacaggcgaggttaaggttcgacgactcctcgagggacatgccaagaactatcaagttacattgttgtttattttccctgtcttattgggaagcaaagtattggaaaaaaactgcatttagttgatgatccactagaagtttaggctatgtcccactcgagtctttatactgtggtgttgtctcttgttatgcaatgttccctgcatgatttttgtttttggcatgtctacaactggttcagctgttcggctgctcattatggttgcagtcaaccataagattgttgtcttagcacctttgatatgtcgtagcaaaaactgctagttcactctttgatatgtctagattgaaccagtccactctttaatatgtcttagcattgaacttgttttagatttaacaaatattcttgtcacggtgccagcagtatattaaatccgcattgtgcaatatattgtcaaacaagacttgggttgctagctttaactgcatggaatggaattagtccaggctgaaacaaacaggctttagtggccatcaggttttattccagagccggatctataacagaccaggtttcagtgaaccagccggatccactctatttggaccaggaataaatacatgcctgttttcgaaccaaagcaaacgaacgcggccttaagagtatagcacctagtagaagaatttgaagcggaagtggaagaggagcctactcccacatctgaaacttcaccaattgaaattgtctctgaaggtcctccagaaggtgcc

SEQ ID NO: 20838 - DNA, 1176 bp, Zea Mays
gtaagtcatggtggacgaccatttgccgccctgggtctttacctcagtgagcgccacgaaagtcgagctcctgtgactcaccctttcatcaacatgagctcccattcatccaaatttggagcaaccatacccggcctttataaattgagcattccccttgctccgtatctcagttatgaacccagcgcaccactcctcgcctcagatcatccaccatagctcgcgaattccaaattttccccaaatcgaccggaacaccgccgtgaggcatcgcgccgtgtccagccgttctcagaacacgaagaagaaaccgaagtagaggaagaagtagtctcccaaactgagaaccctccaatggacaacaacttttacttcgacatctgcagtgtggaaacataacctcatgcaacacaaggcaagccccagtgcattatcccttttttccttattgttttaaaatctttatcaccttatatgatgcattaggtgatagaaattgtatgataaacagttgatgcatttccttccttggaagattggttaacattccttgtttgcatgttttatttaaacaagttttcgaatgcttagtcttgctattggaaacaaaaggttttgttttgaaaaaaggtgatgcttcacatgggatgggaatttttacaaagaaaaggctgatgatggtgaatccatcatggccatgatggattcaacatctggaaagaagtacctctatcaggtaccaaactttggggttaaatgataaagacgagatcgggcgggtcacttgcacgagaaggaagtctcaatgtagtgtgcttgtctgagtcgtttaaggaccgagctgatgtagtcctgctgatcgaggactttttaactggccatatgcctcgtcaagggtaagctttacctcggtcggaccagtactagaaaggctaccacacaacgagagtggagagatggcgagagtagagtgtaccgtccgtggcaagaggctggacaatggagtatttgtgctatcggttggcgtgaacccattctggtcttaagaaacccgggtgcgagttgacatatggaagggttaagtgctacatatgtcgtgtgctggagatctccagctaggtattaatcgattctcatcaccgttaattcttgatatgaggacttggtcactgacct

SEQ ID NO: 20839 - DNA, 444 bp, Zea Mays
ggtggacgaccatttgccgccctgggtctttacctcagtgagcgccacgaaagtcgagctcctgtgactcaccctttcatcaacatgagctcccattcatccaaatttggagcaaccatacccggcctttataaattgagcattccccttgctccgtatctcagttatgaacccagcgcaccactcctcgcctcagatcatccaccatagctcgcgaattccaaattttccccaaatcgaccggaacaccgccgtgaggcatcgcgccgtgtccagccgttctcaggtttgcgcgagctccattgtcccagaaggtcactgatttgttccaagtccctggattgaacgcgaccgacttaggtaaaccagaacgggctcacgggagcgcttgttctgtggttgccacgaacagacatggcttaatggcaaaccgatcaaattaag

SEQ ID NO: 20840 - DNA, 1508 bp, Zea Mays
gtgcgtccctctccgtaatcttctcccacacgtctgtgtgtccctctccatgcgttcctcttctcacgcagcctctcctcgcgccaccacctaccatcgcgccaccacttgccatcgcgccgccaccttccctctccctctcaccgctccacggtgacgagccccgccaccccgcgcctaccgccgacgagcagtgccactccgtgctaggtctattcaacaacaggcagaacagacacctctccaacaccccagatcttctattcaagaacttgctccaggctagaggacatgaaccaatcagagagctcaagtgttgctcggggaagagggaaaacaaaaggatctggacttattatgaggatgaggagttaattaaagcactatatgagatatcttttgatccaaagtggaaaagtgagggaggttttaagaatgggtattgttatgttctagaaaatgaactcaaagcaaggctaccagggtgtggtctcagtgctattccacacattgagtctagagtgaggcattttaggaccaagtatggtgctattgaggtcatgcttgctaaagagtggttttaattgggatgacaacagaaaaatggtgcaatgtgagaaacatcaatatgaagcccattgtaaggataatcctgatgcaaagggactttatggtgttgcatttccatattttgataccttggctgctatatatggcaaggacatagctactggagaaggggccgaggggcttggtgaggctataactaacatggagaaagaaatagctatgggagaagattgtccagtagtggaagaggatatgatttctatggatacaccacaacggtctatggataataggaactcagatcattcaacttcatcgagcagcaaaagaaggaagaaacacaaagatagtatgtcaagtgacccattcttggatctagcaagtggaatccgtggtgatcttaacaaagcctcacaacactttggaaggatggcagaagtgatggagatggaagcaaaaaaggatcaaatgcaagagttacaagagaagtctgttgttgagttgactagacttggttttgggggtagtgaactcctcaaagccgctactatttttgtgaagatgaagctcaaaggaagtgacttgtcaaattatcaatgaagaatgtcaggagcatttggtgaagagtgattggcatatgaacttctggaagttgaattttcaagacgtttgaagtcctaagacatttctagatcatgaaaattatgaattcttaagactagctttattgcctggctgtgttgttaactgtgtgtgaaaataaactgttgtttgaaacctattatgtttgctagcacaaagctggtagttttatttgatgttcagcaagacaaataaagctgctaactttattggttgtttgtgttgtcaactgtttgtgaaaataaccagtataaagttgttgtttagaacatgttatttgtgctagcacaaagctg

SEQ ID NO: 20841 - DNA, 938 bp, Zea Mays
gtaatcttctcccacacgtctgtgtgtccctctccatgcgttcctcttctcacgcagcctctcctcgcgccaccacctaccatcgcgccaccacttgccatcgcgccgccaccttccctctccctctcaccggtgagcctcctctctctccctccctctccctctcatcgggtacgccaccgtttgtttctccacgcggacgcgccgcaccaccagcctcccgcctgccacgtggacggacgcgtcgtcggctgcttcgcgccgcccgacaaggccggcagcgtcgacctcgacttcctcgagcctctcgacgaagggctcggccactccttcgacttccttgcgatgcagctccgaaaccctctctccctcctttctctccctccctctccctctcatcctaacctcctgcgatgtagctccacggtgacgagccccgccaccccgcgcctaccgccgacgagcagtgccactccgtgctaggtctattcaacaacaggcagaacagacacctctccaacaccccagatcttctattcaagaacttgctccaggctagagatgaagctcaaaggaagtgacttgtcaaattatcaatgaagaatgtcaggagcatttggtgaagagtgattggcatatgaacttctggaagttgaattttcaagacgtttgaagtcctaagacatttctagatcatgaaaattatgaattcttaagactagctttattgcctggctgtgttgttaactgtgtgtgaaaataaactgttgtttgaaacctattatgtttgctagcacaaagctggtagttttatttgatgttcagcaagacaaataaagctgctaactttattggttgtttgtgttgtcaactgtttgtgaaaataaccagtataaagttgttgtttagaacatgttatttgtgctagcacaaagctg

SEQ ID NO: 20842 - DNA, 2622 bp, Zea Mays
gtaatcttctcccacacgtctgtgtgtccctctccatgcgttcctcttctcacgcagcctctcctcgcgccaccacctaccatcgcgccaccacttgccatcgcgccgccaccttccctctccctctcaccgctccacggtgacgagccccgccaccccgcgcctaccgccgacgagcagtgccactccgtgctaggtctattcaacaacaggcagaacagacacctctccaacaccccagatcttctattcaagaacttgctccaggctagaggtaatctactcgtatccgtctgatctattaaacaaaatacctgcagtgtgcatccatacagattatcagttttgtctgtgcgagctgtgaacaaataattatcagttttgtctgggcgagctattgtttacacgagtacagtagggactagggagccgatgaacagctagtataattatcagaacaactagtataattatcagaatacctactgataatagtataattatcagaacagctagtataattatcacatttgtaagtttagtcactagtttgatttttctaatatgatttttctacactatccttgaacaacagtatgacccatcttcctttatctacacgaacgcggaagagaaatttgacacttagaaatgtaacatttgccattatgcttatgtattattatatcttggctttattagtattatcacataagtggaagagttggaagatagaaaggaggataaagattaaagaacttagaagtcaatgtatgtaccatctaatctgtgagagcaatgttaagtgtataaatgaccttcgcatcgataggaaaatatttcatatattgtgtgagatgcttagagatgttggtggtttgaggggtacaagaaatgcaccattggaatagatagtagccgcattcttacacacactggctcatcatgtgaagaatagaacaatagggggtttcttcttaaggagtggtgagacagtgagcagaaacttcaatgcatgcctcctagcagtattgaagcttcaccaattgctccttaagaaaccagaacctatacctgagggctgcacagactttaggtggaagcacttcaaggtaccaaacttgtcaatagaaatctatctactagattatactaataggtgaaaaatattaatactatttgttatttggattataatagagttgcttgggtgcattggatggcacacatgtaaaggtgattgtcccaactaagctgaaggggagatataggtcaagaaaaagagaaattgtgacaaatgtgttgggttgctattatcttgttgatgctggttacacaaatgcaaatggtttcttagcaccatatcgaggacagaggtatcatctaggaggtttcactactcgacatgaaccaatcagagagctcaagtgttgctcggggaagagggaaaacaaaaggatctggacttattatgaggatgaggagttaattaaagcactatatgagatatcttttgatccaaagtggaaaagtgagggaggttttaagaatgggtattgttatgttctagaaaatgaactcaaagcaaggctaccagggtgtggtctcagtgctattccacacattgagtctagagtgaggcattttaggaccaagtatggtgctattgaggtcatgcttgctaaagagtggttttaattgggatgacaacagaaaaatggtgcaatgtgagaaacatcaatatgaagcccattgtaaggataatcctgatgcaaagggactttatggtgttgcatttccatattttgataccttggctgctatatatggcaaggacatagctactggagaaggggccgaggggcttggtgaggctataactaacatggagaaagaaatagctatgggagaagattgtccagtagtggaagaggatatgatttctatggatacaccacaacggtctatggataataggaactcagatcattcaacttcatcgagcagcaaaagaaggaagaaacacaaagatagtatgtcaagtgacccattcttggatctagcaagtggaatccgtggtgatcttaacaaagcctcacaacactttggaaggatggcagaagtgatggagatggaagcaaaaaaggatcaaatgcaagagttacaagagaagtctgttgttgagttgactagacttggttttgggggtagtgaactcctcaaagccgctactatttttgtgaagatgaagctcaaaggaagtgacttgtcaaattatcaatgaagaatgtcaggagcatttggtgaagagtgattggcatatgaacttctggaagttgaattttcaagacgtttgaagtcctaagacatttctagatcatgaaaattatgaattcttaagactagctttattgcctggctgtgttgttaactgtgtgtgaaaataaactgttgtttgaaacctattatgtttgctagcacaaagctggtagttttatttgatgttcagcaagacaaataaagctgctaactttattggttgtttgtgttgtcaactgtttgtgaaaataaccagtataaagttgttgtttagaacatgttatttgtgctagcacaaagctg

SEQ ID NO: 20843 - DNA, 1853 bp, Zea Mays
gatctgattcctcgtggtttttttcctccatattggaggggatttttccacgtaaatcttcgttttatttcctaacaagtggtatcaaagctagggtgacacattgtttttatccacattgtggctgccgccgccaccgagttttgcctttgtcgatctacagtagtcgccgctccgaacttcaacaaatcagtttgtcgcgccgctgtgatccatgtccggatctgcgtcgtcactggattcttccccaggctcatcagtggttgcgctagttcatcgtcgacacacatgatgtctctgtcggtgcttgatcgatctgcaacagctctcaacgagggagtcacacccacgtgcacctgctgtggtggattcttggtggattctctcaccgaagaacaaggacgttatcatttctcttgtttccaagcaccttggcattagtccatcacaagttctcaaattcagatgaaggctgttcttacccagttggttgttcaaaaggcattgcagatgcgacctgctgacatgaatgatgaaaagtggcaagatattgataagagagctttgttcgccatacaactcagtttatcttttcatgttctgcgtgaagtaatgcatgaaaaattcgtagcaacattgtggaagaaattagagaagctgtatatgaccaagagtcttacaaacaagctacgtctcaaggagtgtatttacactattcgcatgtcagaaagtacatctatgcagtcacctcttaatgaatttaattcaattattgtggaccttgagagtcttgatgtgaagataagacaattttgttggtagtctcattgccccttctttaaagcattttaagaaaattatgctttatggtaatcatacttcactgtcctttgagaatgttaagtcaaatttgttgtccaaggaaaaaattgatgtttattctcgttctgaacccaaaagtgaaggtttaattgttcgaggatctagagatcataaatccaacctttattgccgttattgcagaaacaatactaatcatatttctcagtgcctcaaagtgagaaataaagaggagagaaagaaaaaagaattggataagtcttctgctaagccagttttgctgaaactttggatagtggagaagctctgtttgttgcctctgttgaaaagtgttcttcttgggttctcaatttcgcttgcacttttcatatttgttcgcatagagattggttttctgattatgtgcagtctcatgctagtgagattgttattggagatggatccacatgtgagattatcagaatcggctctatttatatttaaattcatgatggcagttttaagaaacttatcaatgtccgttttgttcctaaattgaagagaaatattatttctttgagcactttagaagcaattggattcaattttgttgctattgatgatattcttaaggtttctcatggcaatcgtattatcttgaatcgcaaccgtttaaataatctctattacttgcaatgttcaacagttgatgttgaagctgtttgtattgcgttccaggagagaagttattttgatggtacgaagctgtgctccagttccaagtctaatgattccttagacttgattgatattcaaatttagcatcctagtggtgtttggtaaatagttctatggatttagagttaaggggagatttgttggaatatgcctctaattctttttatatatttttaatatgccttggaatatgcttttctgtacgcttataaatatatgccctccctgtaacttatactttgcagttgatagtggatctgtttcctcgtggttgtttactcctccatattggagag

SEQ ID NO: 20844 - DNA, 2065 bp, Zea Mays
tctgattcctcgtggtttttttcctccatattggaggggatttttccacgtaaatcttcgttttatttcctaacaagtggtatcaaagctagggtgacacattgtttttatccacattgtggctgccgccgccaccgagttttgcctttgtcgatctacagtagtcgccgctccgaacttcaacaaatcagtttgtcgcgccgctgtgatccatgtccggatctgcgtcgtcactggattcttccccaggctcatcagtggttgcgctagttcatcgtcgacacacatgatgtctctgtcggtgcttgatcgatctgcaacagctctcaacgagggagtcacacccacgtgcacctgctgtggtggattcttggtggattctctcaccgaagaacaaggacgttatcatttctcttgtttccaagcaccttggcattagtccatcacaagttctcaagtaagtgtgcacacgtgaattaagccattattatcagtaagtttggttttttgctaggtgcaccaaggagacaagatatctagctaacccatcagattgatcacggttttttgttcttcgatttcgttgacttcggaattttttatctcacattatgtcgactaaatttgatattccgaagtttgatagcataattagttttggtatttggcagattcagatgaaggctgttcttacccagttggttgttcaaaaggcattgcagatgcgacctgctgacatgaatgatgaaaagtggcaagatattgataagagagctttgttcgccatacaactcagtttatcttttcatgttctgcgtgaagtaatgcatgaaaaattcgtagcaacattgtggaagaaattagagaagctgtatatgaccaagagtcttacaaacaagctacgtctcaaggagtgtatttacactattcgcatgtcagaaagtacatctatgcagtcacctcttaatgaatttaattcaattattgtggaccttgagagtcttgatgtgaagataagacaattttgttggtagtctcattgccccttctttaaagcattttaagaaaattatgctttatggtaatcatacttcactgtcctttgagaatgttaagtcaaatttgttgtccaaggaaaaaattgatgtttattctcgttctgaacccaaaagtgaaggtttaattgttcgaggatctagagatcataaatccaacctttattgccgttattgcagaaacaatactaatcatatttctcagtgcctcaaagtgagaaataaagaggagagaaagaaaaaagaattggataagtcttctgctaagccagttttgctgaaactttggatagtggagaagctctgtttgttgcctctgttgaaaagtgttcttcttgggttctcaatttcgcttgcacttttcatatttgttcgcatagagattggttttctgattatgtgcagtctcatgctagtgagattgttattggagatggatccacatgtgagattatcagaatcggctctatttatatttaaattcatgatggcagttttaagaaacttatcaatgtccgttttgttcctaaattgaagagaaatattatttctttgagcactttagaagcaattggattcaattttgttgctattgatgatattcttaaggtttctcatggcaatcgtattatcttgaatcgcaaccgtttaaataatctctattacttgcaatgttcaacagttgatgttgaagctgtttgtattgcgttccaggagagaagttattttgatggtacgaagctgtgctccagttccaagtctaatgattccttagacttgattgatattcaaatttagcatcctagtggtgtttggtaaatagttctatggatttagagttaaggggagatttgttggaatatgcctctaattctttttatatatttttaatatgccttggaatatgcttttctgtacgcttataaatatatgccctccctgtaacttatactttgcagttgatagtggatctgtttcctcgtggttgtttactcctccatattggagag

SEQ ID NO: 20845 - DNA, 1989 bp, Zea Mays
ccccgtctctctctctctcttgagtcttctcctccaccccgccggcccctccaccacctcgatctcatccgatgccctagctaggcgagcttcgcatggattcacctgcggctgcgtcgccttcgctgctccgggacgactcgtgccgccgccgctctccgtccaccgcgtgaccgcaccaccgcccgctgatgaccagcgccggcgtcaacgtaccgggcgacgacggggtcgggaacccggccgccgcgtccgggtccgcctccgccccagaatgccggacgatgcagcgcaggcggcggcgcctcgagccacaaggatccggcgacgccgccgcggggccgagctgggtgcgccggctccgcccggccgcctcccggttctcgccgtcgccgtcgcagggctctgcggacaggcccaacgacgaggagcaggaagaggatgacccggacgtgcaggagatggagctcgtcccgctcccgccggcggggccgcaggagctccagcctgccgacgtccccgcgcaggtgtggcccgtggcgttcggctccctgtccatggcggggcggatgcgcatgatggaggacaccatctcgctccacccggacctgtgcacctgggccgacggctcgcccgtgcacttcttcgcggtcttcgacggccacggcggctcccatgtgtccgcgctgtgccgcgaccggatgcacgagttcgtggcggaggagctgggcaaggagggggccgccttccttcggcggcggcaggagtggctggcgtggggcgacggcgccggcgccgagacgagcgccgcggcgttcgtcagggggccccgcggcgcgtggccggagcgcgaggaggaggagcgcgcgtggcgctcggcgctgcggaggagcttccgtcgcgccgacgcgatggcggcgctggcgtgcgcgtgcgggcgcgtggcgcgcccgagctgccgctgcccgctttccagcgtcgtctccggcatcgtcgggtccacggccgtggtggcgctcctcgtccgcggccgcctcgtcgtcgccaactgcggcgactcccgcgccgtgctctgccgcgggcccgccggcacgccgcccgtcccgctctcctccgaccacaagccaaaccggccggacgagagggcgcggatcgaggcggccggcggcctggtggtgttcaacaacggccaccgcgtgcgtgggatcctcgccatgtcacgcgcgctaggctgctgaggcctgaagtgatcgcggagccggagatcaccgtgacggagcggacggcggaggacgagtgcatgatcctggcgaccgacgggatgtgggacgtgatcgccaacgacgtcgcctgcaacgtcgcccgccactgcctggaggacgggaacccgcctccagccgccaccgccgccgccgccaccgccggccgcgaggaggagccgcggtgcgtccgcgccacctcgctcctggccaggctcgccatcggcagggagaccctggataacgtcagcatcatcgtcgttgacctcaagcacagggagtgaatgactgagtgcctgcctgcctcgcttgcttgctctgtcgccgtgcatcagcagcttagtcgatctaggagtgaactggtaccgtgagaggaggtgtgatcgtctagacctggcatttccttcgttctttcgattcgaagataagattctagctgtttccttttttttggagagaaagaaagtggatggaagattgccgtccttaattaaatgaagacaacaacaacaacaaaaaaagagaggaaaaagagagcaattgtacagagtatgatatggtgcgacatttctgtgcattagtgaacttgcttccattttctcaaggacaatagttcggctggtgtctctctgcttgcttggctgtcgttctctatcgtctgctgggtctgtgggatgaatttttactgcagcagctttgggggagcggcagcactgcttgcagggtgctc

SEQ ID NO: 20846 - DNA, 1602 bp, Zea Mays
gtaacttctcttatactgacggtcaagtttaaaagttatgccatccaaaagctgcaaaagtattttctgtaagccacaattcatcaggatttttcattcgaatctctcggaaaagatgatgttgcctgctaggtttgtgaaagattacgtcagtgaagagtgcctaaacagccggatagccatcattttcagccccattgccaaattttggcgtgttgagcttaagaacgatcaatcaggcatcttcttcacaggtggctggtcacagtttctagacttccatggaataaagaatggtgaagttttgctcttgaaatacgaagggaacatggttttcaaattcaaagcatttggacttagtggatgccagaaagatttcaagaaccagaatgctgggattcaactaaatactaaaaaacaacaggaaacacctcccatcaggaaacgtaaaagcaatgatgagaagtcaagcagtgaagaaaacaagaggctaaaaactccagtgacttctccatcaccttctgatccgtcactggaaaaaccctatcagattgggacatcatcttggataaagaaaaggatcaacacctatgcacttgagcaatttcttgcgttatcagtgaagttctgcaactcgattgggttccggatggcttgcacaatcacccttaagacagcaacgaacagcaccagatcatggcaggtgcgtggtactgcatacaagtggcatcgctacatcatcggagtgggctggaagagcttctgccaggataacagactcaaggcaggcgacctgtgcaccttcaacatcatcgagaccacgctgtggcatgttactatcacgcgctcagcattagcagcagatacttttaataagcaaaaaaagccaccttgttcatccagtagggacaagaagggcagttcaagcagagaaggagcaaagaggccgaaaccttccatggcacatttcagcaaggttcaggttccgccatcgtacgcaagacgatgtgcctacgacgttggaccgccgccctggatacggaagcagatgaatgccagcacaataagaaatcgtcttgtaaggatggtcattctcgcgtttgattctaggaagttagtgataggggttaagatcatccaaaatacatatgaacctgtctggcaccggccttctgcaatcagattgagttgcggcgacgctgcgagatcgtgctcaagacctcgatcaacagcaatcattcttggcgggttggtggtctctcgcagaagaagggtagttacattattgggcccggttggaaaaaattctgcacggagaacagagttaaggttggtgatgtctgcaccttcaatgtcatcgaaacccagctgtggcatgtcgtcatcacacgccgttgctaagctatggctgttgcaaccagcatagcttgggtttgttgtaactagtatgttcgtttgactttaatccgtaccagcttttactggttctacggtgtttttacctcttcttagggaattggctgcacttgcatgtttcgaaacactagtttgacactatgcgtgaaattaaactagctcacgttaacaaatctccttttttta

SEQ ID NO: 20847 - DNA, 1101 bp, Zea Mays
cttttttctgcatggttgagaaatagaaactagcatgcatatgcataacaaacaaacaacaacaaagtcttttagtgtcaagcaagttgaagtagactagagttataacccatcagaagccacaaatcaaggttcaaacatggataattgtttttcattctcacctattcaaggctaaatctttaggcgttatcagtgaagttctgcaactcgattgggttccggatggcttgcacaatcacccttaagacagcaacgaacagcaccagatcatggcaggtgcgtggtactgcatacaagtggcatcgctacatcatcggagtgggctggaagagcttctgccaggataacagactcaaggcaggcgacctgtgcaccttcaacatcatcgagaccacgctgtggcatgttactatcacgcgctcagcattagcagcagatacttttaataagcaaaaaaagccaccttgttcatccagtagggacaagaagggcagttcaagcagagaaggagcaaagaggccgaaaccttccatggcacatttcagcaaggttcaggttccgccatcgtacgcaagacgatgtgcctacgacgttggaccgccgccctggatacggaagcagatgaatgccagcacaataagaaatcgtctttgtctggcaccggccttctgcaatcagattgagttgcggcgacgctgcgagatcgtgctcaagacctcgatcaacagcaatcattcttggcgggttggtggtctctcgcagaagaagggtagttacattattgggcccggttggaaaaaattctgcacggagaacagagttaaggttggtgatgtctgcaccttcaatgtcatcgaaacccagctgtggcatgtcgtcatcacacgccgttgctaagctatggctgttgcaaccagcatagcttgggtttgttgtaactagtatgttcgtttgactttaatccgtaccagcttttactggttctacggtgtttttacctcttcttagggaattggctgcacttgcatgtttcgaaacactagtttgacactatgcgtgaaattaaactagctcacgttaacaaatctccttttttta

SEQ ID NO: 20848 - DNA, 1093 bp, Zea Mays
gttgaagtagactagagttataacccatcagaagccacaaatcaaggttcaaacatggataattgtttttcattctcacctattcaaggctaaatctttaggcgttatcagtgaagttctgcaactcgattgggttccggatggcttgcacaatcacccttaagacagcaacgaacagcaccagatcatggcaggtgcgtggtactgcatacaagtggcatcgctacatcatcggagtgggctggaagagcttctgccaggataacagactcaaggcaggcgacctgtgcaccttcaacatcatcgagaccacgctgtggcatgttactatcacgcgctcagcattagcagcagatacttttaataagcaaaaaaagccaccttgttcatccagtagggacaagaagggcagttcaagcagagaaggagcaaagaggccgaaaccttccatggcacatttcagcaaggttcaggttccgccatcgtacgcaagacgatgtgcctacgacgttggaccgccgccctggatacggaagcagatgaatgccagcacaataagaaatcgtcttgtaaggatggtcattctcgcgtttgattctaggaagttagtgataggggttaagatcatccaaaatacatatgaacctgtctggcaccggccttctgcaatcagattgagttgcggcgacgctgcgagatcgtgctcaagacctcgatcaacagcaatcattcttggcgggttggtggtctctcgcagaagaagggtagttacattattgggcccggttggaaaaaattctgcacggagaacagagttaaggttggtgatgtctgcaccttcaatgtcatcgaaacccagctgtggcatgtcgtcatcacacgccgttgctaagctatggctgttgcaaccagcatagcttgggtttgttgtaactagtatgttcgtttgactttaatccgtaccagcttttactggttctacggtgtttttacctcttcttagggaattggctgcacttgcatgtttcgaaacactagtttgacactatgcgtgaaattaaactagctcacgttaacaaatctccttttttta

SEQ ID NO: 20849 - DNA, 768 bp, Zea Mays
ggtgcaacaaccaccttctcaccctttccaatggatctagagcgtagagaagggattctaactactgtagtaggctgaaaatgttcaggtttctctacttgacaacgttgctccaccagttccattgaactgtcatgagcagcaacaagatcggcaaaatcagaatctgcttctattaattcatcatactttcctgattgtgcaatcataccatctctcatgacctgcggatttttgcatgtacaaaaaggataaaaaaaagtcactgacatattgggaactctactattgttcccttttacaagaagaagatggccaatccaaaaatctctatcatattcatacatactcatctagaggccctaccgcatacaagtgtcgttataactggaatagatactaatgaactgaaattataagtgtgatagttagtttgctggattaactccaacctttagacctatgatatgctctgaaattgctatggttttattggttgtatcaaatagtagttggaagtttgttttttaccttttaaaaaaaaagaaagattgttttcttgctagatactatcagaattcataacatgttcattattttttttaaactaccagaacatgttcggatcttgtactaataaagcttgctatacaaaatagttttgctaaaagaaagagtattgcctgataagtaactgcaatggtgtagcatctaacttacaaatatgttttccacattgtgcaagaaatccatttggtgtgtaacaag

SEQ ID NO: 20850 - DNA, 277 bp, Zea Mays
tggcaagtggcccgtggtggtacctcacatttgggtttgggtgcgacgaggcgggaggccgtggcgaagttctgtcggagaggacaggacctcagtagtcagtatagcagcaccgcaagcggagaagaaagcaattacctagtcctagtgagcgttggtgaacggcgactggtcaaggaacgtaacgcggcggcgcggaatactctgcgactgtgaacgccaacgccggtgcggacggggcgaggggcgccgacgatatcgaagtagaaaatttggc

SEQ ID NO: 20851 - DNA, 3070 bp, Zea Mays
cccaacccccctgctcgacccgctgaactgccgaagcatcgcctactcttcctactcagctccgctggtccggtcgtcgcgtagcgccctcacccccagccacccccaccacgaaggccgcgcgctccccgccttccgacgtcgctctctccgcccagctcaagcgcccagcggtgagggaagggaaggaaaaacagacctttttttttcttctcggcggcctcgtgactatggatccgccgagctccggtctcccgccggtgccgaggtttcctggctcgatccgtgaccggcccacgtggagacggtgctggtgctagtaccggtgcctccaccgtgtttcttggcgaccttactacctcctctcctcctctggaagattgctgctgcagcctgcaggaaagatggccgaacgccgaaggagcgtcggcgcgtgcagtgtggaatcgacgccgagcgcctccagtcggtgcaggaatgcgcaaatgcacgtctgaatgaagcctggttggtggtagagccgatggtggtgggaacggcgccgtgcggggtctccgtctcctccgtgtggatcctcctgctcctttcctccctgctcctctcgccgtcggcggcgtccgtcgatttcggccactgcggctgcgacgacgccgacgacggcgccctctcgagcacctacaacatcctgcaatgccagaagttcggcgccttcatcgtgctctgcggcctcacgcacctcatcaccgtgttcacctacgacccgcactccttccacctcgtgctcgccctcaccgtcgccaagttcatgacggcactagtctccttcgccacagccatcacgctgctgacactgataccgcagctcctgagggtgaaggtcagggaaaacttcctggtgaacaaggcacgtgagctggaccgggaggtggggatgatgaaaatgaaagaagaggcgagctggcatgtgcgtatgctcacacaggagatccgcaagtcgctcgacaggcacaccatcttgtacaccaccatggttgagctctcgaaagcgctggaactgcagaattgtgctgtctggatgcccgatgaaaccaggagcgagatgatcttaactcatcagccaagggaaagggatataatggaccagcagaactgctcgattcctattgatgatccagatgttcaagaaataaaggctaccaaggacgcaaaagttcttgggccagattcggcactaggggttgctacccgcaagcttgacgtggggcctgtggctgcaataaggatgccgatgttaagggtgtcaaatttcaaaggagggactccagaagtgatgcagacgagctatgctatcttggttctggttttgcctaatgatggttcattggggtggggtagaagagagttggagattgttgaagtagttgctgaccaagttgcggtcgctttgtcacatgctgcactcctagaggagtctcagctgatgcgagagaaacttgctgagcagtatagggacttgctgcaggcaaagcatgaagccatgagggcaggggaagctcggaattccttccagactgcaatgtacgacggaatgcgaaggccaatgcactcaatccttggtcttgtctcaatgatgcaacaggagagcatgaatccagagcaaagggttgtgatggatgccattgccaagacaagcagtgttgcgtccacactgatgaatgatgtgatgcaaacatcgacaatgaactgtgagcacttgtctttggtgaggaggccgttcaatcttcattcttttattaaagaagctgttggagtggtcagatgtctaactggttgcaagggtgtagagtttgagtttcaagtggataattctttgccagaaaggatcattggtgatgagaagagagtcttccacattgtcctgcacatgatgatgaacggcaacatttggtcagtatcagattctaaaagcgttggagaaaccatcatgctggtcctccagttccagctgcagcctctgactgcggtctcctccgcggcgtcttcagacttgagccgatcgtccgcaatccccaacttcaacgggctcagagtcctcctggcggacagcgacgacaccaacagagcagtaacacacaggctcctggagaagctcggctgccgggtcctttcggtcgcctccggtgtccaatgcacgagctccttcgccgccgagccgtccttccagctggtggtcctggacctcgccttgcagaggacggacgggctcgaagtggcccgcgcgatcaggaagttcagtagcaatagctggctgccgctgatcgtcgccctagctgcgaggatcgatgacaaggtccgagacggatgccagaggtcggggataagcggcctgatccagaaaccggccacgttagctgcgctgggagatgagctgtatagggtccttcagaacagttgaaagtgccgcctgatggttctcattgctttcagaattctcaatagaccgctgtagcttggttagatccatacattcacaaaacatttgggggcaggcgaagggaaatgtataggaaaagctggaagaccgctgcttctcgcttggttcctcagtagtgaaggacgacggtgacaggaaggtacagaattttggagagatcatactggtagagcttagactcattcatttgtaaaaccctcggataatccaaggtttagattcttgcactagcactaaccacggtataaatagtttggacgaaatccatggatgggttcagtgaatgctggcatagtagatgcctaaagggggcaaggaacttttgttatcggttagacatgctgaaaagcaggccggatgagattgcggacaggaaggcagctgatacggccgatgctgaccttgtatcttgttgaagattaaatactatggtagtagtacttgcagtcttgatctggtgggtagtgctggtgctcctgctgcatttcttacttgcttggcctgcttctggccagcaaactcctgcttgccatcttcttagcactgattcctatggtttttttaatagggtatcct

SEQ ID NO: 20852 - DNA, 1564 bp, Zea Mays
cccaacccccctgctcgacccgctgaactgccgaagcatcgcctactcttcctactcagctccgctggtccggtcgtcgcgtagcgccctcacccccagccacccccaccacgaaggccgcgcgctccccgccttccgacgtcgctctctccgcccagctcaagcgcccagcggtgagggaagggaaggaaaaacagacctttttttttcttctcggcggcctcgtgactatggatccgccgagctccggtctcccgccggtgccgaggtttcctggctcgatccgtgaccggcccacgtggagacggtgctggtgctagtaccggtgcctccaccgtgtttcttggcgaccttactacctcctctcctcctctggaagattgctgctgcagcctgcaggaaagatggccgaacgccgaagatgatgaacggcaacatttggtcagtatcagattctaaaagcgttggagaaaccatcatgctggtcctccagttccagctgcagcctctgactgcggtctcctccgcggcgtcttcagacttgagccgatcgtccgcaatccccaacttcaacgggctcagagtcctcctggcggacagcgacgacaccaacagagcagtaacacacaggctcctggagaagctcggctgccgggtcctttcggtcgcctccggtgtccaatgcacgagctccttcgccgccgagccgtccttccagctggtggtcctggacctcgccttgcagaggacggacgggctcgaagtggcccgcgcgatcaggaagttcagtagcaatagctggctgccgctgatcgtcgccctagctgcgaggatcgatgacaaggtccgagacggatgccagaggtcggggataagcggcctgatccagaaaccggccacgttagctgcgctgggagatgagctgtatagggtccttcagaacagttgaaagtgccgcctgatggttctcattgctttcagaattctcaatagaccgctgtagcttggttagatccatacattcacaaaacatttgggggcaggcgaagggaaatgtataggaaaagctggaagaccgctgcttctcgcttggttcctcagtagtgaaggacgacggtgacaggaaggtacagaattttggagagatcatactggtagagcttagactcattcatttgtaaaaccctcggataatccaaggtttagattcttgcactagcactaaccacggtataaatagtttggacgaaatccatggatgggttcagtgaatgctggcatagtagatgcctaaagggggcaaggaacttttgttatcggttagacatgctgaaaagcaggccggatgagattgcggacaggaaggcagctgatacggccgatgctgaccttgtatcttgttgaagattaaatactatggtagtagtacttgcagtcttgatctggtgggtagtgctggtgctcctgctgcatttcttacttgcttggcctgcttctggccagcaaactcctgcttgccatcttcttagcactgattcctatggtttttttaatagggtatcct

SEQ ID NO: 20853 - DNA, 3093 bp, Zea Mays
cggatttgggctgttctaaatctcctacctactctggcccatatttttaccttctggagtacgtgtataacaagatccatggtggactgatggattcggttttgaccgatacatgtatttcgatgctattttttggaaggattaaatcttcaacacgtgcccaagcccaaccgcccaaaggagcgtcggcgcgtgcagtgtggaatcgacgccgagcgcctccagtcggtgcaggaatgcgcaaatgcacgtctgaatgaagcctggttggtggtagagccgatggtggtgggaacggcgccgtgcggggtctccgtctcctccgtgtggatcctcctgctcctttcctccctgctcctctcgccgtcggcggcgtccgtcgatttcggccactgcggctgcgacgacgccgacgacggcgccctctcgagcacctacaacatcctgcaatgccagaagttcggcgccttcatcgtgctctgcggcctcacgcacctcatcaccgtgttcacctacgacccgcactccttccacctcgtgctcgccctcaccgtcgccaagttcatgacggcactagtctccttcgccacagccatcacgctgctgacactgataccgcagctcctgagggtgaaggtcagggaaaacttcctggtgaacaaggcacgtgagctggaccgggaggtggggatgatgaaaatgaaagaagaggcgagctggcatgtgcgtatgctcacacaggagatccgcaagtcgctcgacaggcacaccatcttgtacaccaccatggttgagctctcgaaagcgctggaactgcagaattgtgctgtctggatgcccgatgaaaccaggagcgagatgatcttaactcatcagccaagggaaagggatataatggaccagcagaactgctcgattcctattgatgatccagatgttcaagaaataaaggctaccaaggacgcaaaagttcttgggccagattcggcactaggggttgctacccgcaagcttgacgtggggcctgtggctgcaataaggatgccgatgttaagggtgtcaaatttcaaaggagggactccagaagtgatgcagacgagctatgctatcttggttctggttttgcctaatgatggttcattggggtggggtagaagagagttggagattgttgaagtagttgctgaccaagttgcggtcgctttgtcacatgctgcactcctagaggagtctcagctgatgcgagagaaacttgctgagcagtatagggacttgctgcaggcaaagcatgaagccatgagggcaggggaagctcggaattccttccagactgcaatgtacgacggaatgcgaaggccaatgcactcaatccttggtcttgtctcaatgatgcaacaggagagcatgaatccagagcaaagggttgtgatggatgccattgccaagacaagcagtgttgcgtccacactgatgaatgatgtgatgcaaacatcgacaatgaactgtgagcacttgtctttggtgaggaggccgttcaatcttcattcttttattaaagaagctgttggagtggtcagatgtctaactggttgcaagggtgtagagtttgagtttcaagtggataattctttgccagaaaggatcattggtgatgagaagagagtcttccacattgtcctgcacatggtaggcaccctaataaaccgatgtaatgtcggctgtatctcgttatatgtcaatggtcataatgaggttgaagagaggcataatcatgactggatgctgcggagaacaaacttctctgggggctatgtttgtgtgaaatttgagattaggattagaaaatccaaggactatcttttgagttcaaacggtcagataagtcatgggtccaaaccaaacaattctgagatggggcttagcttcaatatgtgcaagaagattgtgcagatgatgaacggcaacatttggtcagtatcagattctaaaagcgttggagaaaccatcatgctggtcctccagttccagctgcagcctctgactgcggtctcctccgcggcgtcttcagacttgagccgatcgtccgcaatccccaacttcaacgggctcagagtcctcctggcggacagcgacgacaccaacagagcagtaacacacaggctcctggagaagctcggctgccgggtcctttcggtcgcctccggtgtccaatgcacgagctccttcgccgccgagccgtccttccagctggtggtcctggacctcgccttgcagaggacggacgggctcgaagtggcccgcgcgatcaggaagttcagtagcaatagctggctgccgctgatcgtcgccctagctgcgaggatcgatgacaaggtccgagacggatgccagaggtcggggataagcggcctgatccagaaaccggccacgttagctgcgctgggagatgagctgtatagggtccttcagaacagttgaaagtgccgcctgatggttctcattgctttcagaattctcaatagaccgctgtagcttggttagatccatacattcacaaaacatttgggggcaggcgaagggaaatgtataggaaaagctggaagaccgctgcttctcgcttggttcctcagtagtgaaggacgacggtgacaggaaggtacagaattttggagagatcatactggtagagcttagactcattcatttgtaaaaccctcggataatccaaggtttagattcttgcactagcactaaccacggtataaatagtttggacgaaatccatggatgggttcagtgaatgctggcatagtagatgcctaaagggggcaaggaacttttgttatcggttagacatgctgaaaagcaggccggatgagattgcggacaggaaggcagctgatacggccgatgctgaccttgtatcttgttgaagattaaatactatggtagtagtacttgcagtcttgatctggtgggtagtgctggtgctcctgctgcatttcttacttgcttggcctgcttctggccagcaaactcctgcttgccatcttcttagcactgattcctatggtttttttaatagggtatcct

SEQ ID NO: 20854 - DNA, 2220 bp, Zea Mays
cttcggctgcttgcttttgttgccttcctcccgctccaatttaatgccaccacaccagccaggagttggggccgcgcatcaatggcgtcacctctcgcatccagatctcacacctcgtcgtagctactaccttcgtctcactcctcctcgtccccttgctgtcgttcgttcgttccttctacctccatctccacttctccaccttggggttcttggcgcaccatccgagaaatgctgttctcctttttcggttttccattctacaagtgccagccttgccttgtctcggagtgttgacatctctacgtgctctggcccgccattaattccctcctccctcacactgctgctgctgctgaccgagggcgcctagccagtcacgcacgaaatcccagcgttccaattcaaacacacccttccttcttggctactcctctcgacgacgcgaccggagcggagggagtcatggtggcggagccgctggtgcacaaggtgctctccatggcgacgtcgtcgtcctcctcctccaagaaggcgcggccggcggcggcgagcgccaacaagggcggcgcggctgcggcgggcgacggcaggctgggcatcctgtccctggaggtggccaacgccatgtcgcgcgcggcgaacctgtaccgctcgctctccgacgccgaggcggcgcgcctgctcgggccgctctgcctcggctcccgcgccgtgcgcgcgctggtcccgggcgacgacgcgcgcctcctggcgctcgcgctggccgagaagctcgacgcgctgaaccgcgtcgcggccgtggcctcgcgcctcggccgccgttgcacggcgccgccgctcgtgggcttcgaccacgtctacgctgacctcctcgccggccgctccggcgccaccggcgcgctcttcgccgtggcctccgcgtccgacgccgcgtcgctcgtgcgcaggctcgaccgcctcgcggccgccaccgcggctctctacgccgcgctcgaggcgctcaccgagctggagcagtcggcgcggaagctgcccaccgacgaggcccgccgcgcgctggagcagcgggcgcggtggcgccgccacgacgtgcgccgcctcagggacgcctcgctctggaactggacctacgacaaggccgtgctcctgctcgcgcgcgccgcctgcgccatctacgcccgcatccgcctcgtgttcggcgaccccatgctggggctcgacctgctgctggccacgccgtccagcgagtcgtcgaggcaatgcgaccagagccggcggctctccggtccaataacagcaaactcaggccccgtccgaagcgatctcagtgattgcggcaactcagggccggtttccagagtcgatccggacatgtcgcggccagtgaatcttcggtcaggctgtggagcgagcccggggaagatgctcatggagtgcttgagcctgagcagctcggcgtcatggaacgatgggttcgaggacgagttcctggaagattccagccgcatcagcacgatcagatcagggatgctggtgccattcagcagcgagcaggggctgtcgacaacgacgacgatgacgacaacgccaccatccaagagtggcaggattaccagaaaggcggcgcggttcgggcccaagagcacggtgacatcactggcgccgccgtccacagtcggcggctccgctctcgcgctgcactacgcgaacgtcgtcatcatcatcgagaagctgctccggtacccgcacctcgtcggcgaggaggcgcgggacgacctgtaccagatgctgccgtcgagcctgaaggcggcgctgcggaggagcctgaagacgcacgcgaagagcgtggcgatctacgacgcgttcctggcgcacgactggcgggaggcgctggagaagacgctggcgtggctggctccgatggcgcacgacacggtccgatggcaggccgagaggaacttcgagcagcagcagatcgtgatgaaggggaacgtgctgctgctgcagaccctgtatttcgctgaccgggagacgacggaggcggtgctctgcgagctgctcgttggcctgaattacatctgccggtacgagcagcagcagaacgccctgctcgactgctccagcagcctcgacttggatgactgtgtggagtggcaagttcagtagggaagacgatcgttttaaaattcttggcgcttggggctttgcagaaagcac

SEQ ID NO: 20855 - DNA, 4339 bp, Zea Mays
cttctttccctgagttccttgcagcgtgtggtccctatgccttcaggttcgtgtagcttctcctttccccagccatcattgtgctctatccagagctgcacgcgccaaactcctatgagttgtgaccacgcctaccaatttgtcacctcgccgtggccaggctaactcagagcgcaccgccgcagactgacaccgtgaacagctccgccgtcgcccgaccgacttgcttcgtcctcggccggttttccgcgagcataggaatctaggtatgtcactgatgctacccgtggtgtttggttaaactttactatagaggtggctcaagtacgtggtcgccgtacttagctcgctgtcatggccgtcggcggcataggtccagtgcagtagtggttcgattcttgaagtatatttgacgggtatacctcagggtcggagttagggtgctggtcctcgctgaggaactcaccggcgacgggatcgggtgagcacggccaggtgttcaacctgtgctaaccgttggagtggagtcatggccgagaccttgtgaatagaacaaaaccaaggggtttaagtgtggtagtcactgactctggtgaacagtgggggaagcttggattggtttaactagaccgcggggtcttttgtgcaaaagccgggcgcgcgggctccccagccacgggccagatctgcccgatgttgggccagctgggctggtcgtggtccaatactgttcatagtttggtcttttctttaacacagaacttataaattgtgccataagttgtagaaaaatccaaaaatagcaagacaaattttgttggatgtctaaattcatgtgctctctggtaaagttggatttaggatttttagggcaattataaaacattaagtgaattaaaggtgctctgggaaggactgtttgaattttagaaataagaatatagcaccagaaattgtgaaaattcttggagaatctagttattagaagctgaaactgtgggcaaaaatttggaactattaggatgtgatttgcttagtaaactaattattgcccaaaaagaaaaggacttcacctatggaatgaggacacctaatagtttagtgaagtgatgaagttgcttaagaagttttaagcttttggatgagatctaagataggttagttctctggtttgtctaagtaattcaatttggtcacttttagcaagtgttggtggtgtagaaccatgtgtatgcttgtcatgtgttttagtttgtggtgtttatgttccccacctctccttgtgagagtttgcatttcatatcattgcataagcatacatgtatttgtaattgacttgtagaacacctagaagaagtggtgtttgaaggaggagtctactccagtgtctgttgatcaagtggaggagccatctaactgggtatttgatagagggatctagaaccacttcactgcaacaaaggcaagccccggtgcatgcaacctttcttgtgtttttaaatgatttttacacactttaagtctagtgaaatgtgcattaggtttataggagttgcttggaaaccctttgatgcattggctaccttgaaatccactcctttatagatactgctaatgaagtatcaaaatacgatttaaaaaaatgcttagccctgcttagatcttgtggatagaagttgtcttttgcaataatgcctagctcaagggttatcctgagaaggatggcttctacctgcaagaatattttcattgggagcatggcgggatcttactgcaaagttccctatattgatctttccatccttaggaacacaaaacaatcctgagggtggaagtacttaactcgagacttgggctaggaacaggtgatgctccacccaggttaattaaggattggatacttatgtaggcctgtatgatcaaggactatcttaactggccacataccctgaatatgggacagggtaaacttgaacccggttattccatatgtgaaaagacaacggtgcactgggcgtaggagatggtgggagtagcgtgtaccctactggatagaggctggacgaaggagtattgtgctcccgggtagcgcagaccggttcacattgtggaggatctgtgggaatggttgacatatgcaagggttaagtgctacatatgtcgtgtggttagagatcctcagctgagtaaatcgattcggatcgccattatatccccggacagtggagacttgatctctgacctgcaacctaggtcaggatgtaaacattatgaataaaaatgatgttgtattgatgagatggtgaaattagactagatgcaactagagtctattaatatttaatctggtgttaaaatattgaaagtaaggactcactttaataagctattaccgcaaaagtatctaagttgattcttgctaaagccttttccttgattcctatttaaccagcatatccttgaaagtcatttttgcttagtcaggtaatacttgcgaaagtacactccgtactcagggttttcgaacccatgttgttgtaggtgatgaggagtactctaggtgttcctgaggctagagggcgtttccagttctagaggaagattagttaggcttgtgtataagctttggagggttcctaccttcctgctattgtaataagttatgcactttgagtatatcaggacttgtaataaatgtaactcttcctacgtaataaccttcagttttagaaataaaaagaatgttttgtaaagtcttccgctcttatctctgaagtgtgtgtctatcgaatgtgattactttaatatgcatgtatggtgggagatccttgggatgatgagttcaagttgttgaactcgtgatagccttgttaagttacctggtacacgtgcatagccatctgaggccatcaagccaaggattggtgcatgtggacccgataacttgggagtgctgccacagcttcatcaaagatttgttgacggtgttcagcatccttaggcaccactatgtggtctttaaaccataacactccttgatcatctttcctaaaactagtagctttgccggcttccattttcttgcggatatacttcatacccttatcaatcctctgagcatcaataatcctttgttgaataaccgactcaagcttcaagtgcatcaaggctccttgttgcactatccccagatttaatctttccatttcctgacataaggtggtgtcaggcaatcccacaatgaggcaatgacaaaaggctttacgacttagaacatcagccaccacattagcctttcctggatgataatgaatctctaggtcatagtccttgattaactcgagccatcttctctgttgaaagggaaatgtgcctttgggccatttctaagtattttggtgattgagtgccaacacaagtgcttaaatgtgaatctatgcccatggatgaacaaagtgcaaatcacaagtaaaggtatgtttataatccttagtacattggttttgtgtactaatatatttgtctaagtgttagaaacagagagaagaagaaaaggagaatgttggctgtgtacaaccaacaggctgtttcggtctggggcaccggactgtccggtggtgcaccggacagtgtccggtgcgccaggctgcctcgacctgaagacgcctctctcgggaatttgccgacggcgtacggctaaaattcaccggactgtccggtgtgcaccggactatccggtgagccaacggtcggccgagccaacggtcggccgcggaatctgcgcgcgacacgtggtctggccaacggtcggaaggaggcaccggactgtccgatgtgcaccggacatgtccggtgcgccagatctgcaacggtcggcaacggtcggctgcgctgtttaaggaaataaatcgagcaccggacagtgtccggtgtgcaccggactgtccggtgcgcccgacgacagaaggcaaggatggccttccagatttgttctcaacggctcctagctgccttggggctataaaagggacccctaggcgcatggaggagtacaccaagcattcctacaacattcctaagcaccaagacatcgatcttgcgcattcgtttcattgtgatagcatatagagctctagtggagttgtgaactctttgagttgtgttgcgagctcttgttgctacttgtgtgcgtgttgttgctctgatcttttgaagtcttgtgtgcgttgctcattcccccccttgctctgtgtttctttgtgaacttcaattgtaagggcgagaggctccaagttgtggagattcctcgcaaacgggattgagaaaaagtaagcaaaac

SEQ ID NO: 20856 - DNA, 3233 bp, Zea Mays
gtccctatgccttcaggttcgtgtagcttctcctttccccagccatcattgtgctctatccagagctgcacgcgccaaactcctatgagttgtgaccacgcctaccaatttgtcacctcgccgtggccaggctaactcagagcgcaccgccgcagactgacaccgtgaacagctccgccgtcgcccgaccgacttgcttcgtcctcggccggttttccgcgagcataggaatctagaacacctagaagaagtggtgtttgaaggaggagtctactccagtgtctgttgatcaagtggaggagccatctaactgggtatttgatagagggatctagaaccacttcactgcaacaaaggcaagccccggtgcatgcaacctttcttgtgtttttaaatgatttttacacactttaagtctagtgaaatgtgcattaggtttataggagttgcttggaaaccctttgatgcattggctaccttgaaatccactcctttatagatactgctaatgaagtatcaaaatacgatttaaaaaaatgcttagccctgcttagatcttgtggatagaagttgtcttttgcaataatgcctagctcaagggttatcctgagaaggatggcttctacctgcaagaatattttcattgggagcatggcgggatcttactgcaaagttccctatattgatctttccatccttaggaacacaaaacaatcctgagggtggaagtacttaactcgagacttgggctaggaacaggtgatgctccacccaggttaattaaggattggatacttatgtaggcctgtatgatcaaggactatcttaactggccacataccctgaatatgggacagggtaaacttgaacccggttattccatatgtgaaaagacaacggtgcactgggcgtaggagatggtgggagtagcgtgtaccctactggatagaggctggacgaaggagtattgtgctcccgggtagcgcagaccggttcacattgtggaggatctgtgggaatggttgacatatgcaagggttaagtgctacatatgtcgtgtggttagagatcctcagctgagtaaatcgattcggatcgccattatatccccggacagtggagacttgatctctgacctgcaacctaggtcaggatgtaaacattatgaataaaaatgatgttgtattgatgagatggtgaaattagactagatgcaactagagtctattaatatttaatctggtgttaaaatattgaaagtaaggactcactttaataagctattaccgcaaaagtatctaagttgattcttgctaaagccttttccttgattcctatttaaccagcatatccttgaaagtcatttttgcttagtcaggtaatacttgcgaaagtacactccgtactcagggttttcgaacccatgttgttgtaggtgatgaggagtactctaggtgttcctgaggctagagggcgtttccagttctagaggaagattagttaggcttgtgtataagctttggagggttcctaccttcctgctattgtaataagttatgcactttgagtatatcaggacttgtaataaatgtaactcttcctacgtaataaccttcagttttagaaataaaaagaatgttttgtaaagtcttccgctcttatctctgaagtgtgtgtctatcgaatgtgattactttaatatgcatgtatggtgggagatccttgggatgatgagttcaagttgttgaactcgtgatagccttgttaagttacctggtacacgtgcatagccatctgaggccatcaagccaaggattggtgcatgtggacccgataacttgggagtgctgccacagcttcatcaaagatttgttgacggtgttcagcatccttaggcaccactatgtggtctttaaaccataacactccttgatcatctttcctaaaactagtagctttgccggcttccattttcttgcggatatacttcatacccttatcaatcctctgagcatcaataatcctttgttgaataaccgactcaagcttcaagtgcatcaaggctccttgttgcactatccccagatttaatctttccatttcctgacataaggtggtgtcaggcaatcccacaatgaggcaatgacaaaaggctttacgacttagaacatcagccaccacattagcctttcctggatgataatgaatctctaggtcatagtccttgattaactcgagccatcttctctgttgaaagggaaatgtgcctttgggccatttctaagtattttggtgattgagtgccaacacaagtgcttaaatgtgaatctatgcccatggatgaacaaagtgcaaatcacaagtaaaggtatgtttataatccttagtacattggttttgtgtactaatatatttgtctaagtgttagaaacagagagaagaagaaaaggagaatgttggctgtgtacaaccaacaggctgtttcggtctggggcaccggactgtccggtggtgcaccggacagtgtccggtgcgccaggctgcctcgacctgaagacgcctctctcgggaatttgccgacggcgtacggctaaaattcaccggactgtccggtgtgcaccggactatccggtgagccaacggtcggccgagccaacggtcggccgcggaatctgcgcgcgacacgtggtctggccaacggtcggaaggaggcaccggactgtccgatgtgcaccggacatgtccggtgcgccagatctgcaacggtcggcaacggtcggctgcgctgtttaaggaaataaatcgagcaccggacagtgtccggtgtgcaccggactgtccggtgcgcccgacgacagaaggcaaggatggccttccagatttgttctcaacggctcctagctgccttggggctataaaagggacccctaggcgcatggaggagtacaccaagcattcctacaacattcctaagcaccaagacatcgatcttgcgcattcgtttcattgtgatagcatatagagctctagtggagttgtgaactctttgagttgtgttgcgagctcttgttgctacttgtgtgcgtgttgttgctctgatcttttgaagtcttgtgtgcgttgctcattcccccccttgctctgtgtttctttgtgaacttcaattgtaagggcgagaggctccaagttgtggagattcctcgcaaacgggattgagaaaaagtaagcaaaac

SEQ ID NO: 20857 - DNA, 1512 bp, Zea Mays
cgcaagcctagctccatggccttgcccttctcccgatgttgtatggcgacattccgatccgtgttgtatttgaggttttcccatcctgaatttttttgttgcatattggagttttttttgcatgttgtctaccacacatccgacaatggagatccatgaagtatatgtatcctcgtgctgctaagacacacaaggcagacttcgtagttctctgcatcgggaggttcagcggcgttcccaacacgcctacattccctccaggcgaaggtccagaagcgttcgacgggcaggtgatccactccatggactacgccaagatgggcaccaagaaagccagggagatgatcaaaggcaagcgcgtcactgtcgtcggctacctgaaatcagcggtcgacattgccgccgaatgcgctgaagtgaacggcgctgatcatccatgcacaatggtggtccggacgaagcactggatcataccagactacttcgcttggggagtccacatatcgctgctattcctaaaccgcttcgcagagctactgatccacaagccgggcgaaggcttcctcctttgcctcctcgccaccctgctggcgcctttgagatggctgttctcgaagttcgccgagagctactacgccatcccgatgaggaagcacggcatggtgccggaccacagcctgttccaggcgctggccacgtgcctgatcgcgatccagccgaaggggttctacgagaggctggaagaaggcagcatcgttctcaagaggtcgaagacgttcagcttctgcagggaaggcgtcgtcgtggaaggcgaggtgtcgtcgtcgtcgctggtggagagcgacgtggtgatctacgcgaccgggttcagaggcgacctcaagatcaaggacatgttcgcgtcggagtacttccggagcgtcgcagttgggtcagcttgcactactgtgcctctctacagggagtgcatccaccctaagataccgcagctcgcagtgctcggttactcggagagcatcgcgaatctgtacacctcggagatccgggccaagtggctggcccatttcatggacggcggcttcaggatgccgagcgtcgctgcgatgcagaaggacgtcctcgagtgggagaagtgcatgaagaggtacgccggcggcaggtacttccgcaggtcctgtatagggctccttcacatctggtacaatgatcagctgtgccgggacatggggtgtgatccgaggaggaagaagggctttcttgaggaactgttcggagtctatggccctgctgattatgctgaccttcaccccgaccgcaagaaagacgactagaccttctgaggcggcactcgtaatctagaccttcattataaagtgggtattgtgggtaccaacgttcacagctcctgttaatgtccatatcatatggatgctgaatatataaagtgggtattattgtgcctattaatatcgcaaaccgaataataaaaatggtcgaacaggtcgattacat

SEQ ID NO: 20858 - DNA, 2149 bp, Zea Mays
atgtatcctcgtgctgctaagtgaaaatttcttggccgaaagcttcaaatcgatggagggcagagggcaggatgggactcttggcttggtgtttttccatgatgtgggtgggggctgtgcatgggctccatgtgcacattgcgtgtcctcccgcttctgtgtgcatctgcggcatgcggacaaagaaatgaaccaagaaatcagctgatgatgacgtgcggagcacagcaacgagtcgctctacggatacagttgcactgcctgccttagagataagatattttccgctcaagaaacatcgccatcgccatcgcatcgctgatatataccaaccacccagcaagcagcagtacacgctacgacctcgcttccggcgccatggagacgaagcgggtggccatcatcggcgccggcgtgagcgggctggcggcgtgcaagcacctgctggagcgcggctgccggcccgtggtgttcgaggccggcaccgtcgtgggcggcgtgtgggcgcgcgtgccagacagcacggcgctgcacacgccgcggcccatgtaccagtactccgacttcccgtggccggacaccgtcaccgaggtgttccccgaccaccggcaggtcatgtcctacctggacgcctacgcgcgccacttcggcgtgttggactgcgtccgcttcggccgccgcgtgctcgggatggagtaccacggcgtcgccgaggacgacgtggcggcgtgggaggagtggggcggaaacggccaggcgttcggctgcgccggcgctggcgagtggcgcctcaaggtggccgacgccgagggacgcattgagacacacaaggcagacttcgtagttctctgcatcgggaggttcagcggcgttcccaacacgcctacattccctccaggcgaaggtccagaagcgttcgacgggcaggtgatccactccatggactacgccaagatgggcaccaagaaagccagggagatgatcaaaggcaagcgcgtcactgtcgtcggctacctgaaatcagcggtcgacattgccgccgaatgcgctgaagtgaacggcgctgatcatccatgcacaatggtggtccggacgaagcactggatcataccagactacttcgcttggggagtccacatatcgctgctattcctaaaccgcttcgcagagctactgatccacaagccgggcgaaggcttcctcctttgcctcctcgccaccctgctggcgcctttgagatggctgttctcgaagttcgccgagagctactacgccatcccgatgaggaagcacggcatggtgccggaccacagcctgttccaggcgctggccacgtgcctgatcgcgatccagccgaaggggttctacgagaggctggaagaaggcagcatcgttctcaagaggtcgaagacgttcagcttctgcagggaaggcgtcgtcgtggaaggcgaggtgtcgtcgtcgtcgctggtggagagcgacgtggtgatctacgcgaccgggttcagaggcgacctcaagatcaaggacatgttcgcgtcggagtacttccggagcgtcgcagttgggtcagcttgcactactgtgcctctctacagggagtgcatccaccctaagataccgcagctcgcagtgctcggttactcggagagcatcgcgaatctgtacacctcggagatccgggccaagtggctggcccatttcatggacggcggcttcaggatgccgagcgtcgctgcgatgcagaaggacgtcctcgagtgggagaagtgcatgaagaggtacgccggcggcaggtacttccgcaggtcctgtatagggctccttcacatctggtacaatgatcagctgtgccgggacatggggtgtgatccgaggaggaagaagggctttcttgaggaactgttcggagtctatggccctgctgattatgctgaccttcaccccgaccgcaagaaagacgactagaccttctgaggcggcactcgtaatctagaccttcattataaagtgggtattgtgggtaccaacgttcacagctcctgttaatgtccatatcatatggatgctgaatatataaagtgggtattattgtgcctattaatatcgcaaaccgaataataaaaatggtcgaacaggtcgattacat

SEQ ID NO: 20859 - DNA, 2608 bp, Zea Mays
cagcaacgagtcgctctacggatacagttgcactgcctgccttagagataagatattttccgctcaagaaacatcgccatcgccatcgcatcgctgatatataccaaccacccagcaagcagcagtacacgctacgacctcgcttccggcgccatggagacgaagcgggtggccatcatcggcgccggcgtgagcgggctggcggcgtgcaagcacctgctggagcgcggctgccggcccgtggtgttcgaggccggcaccgtcgtgggcggcgtgtgggcgcgcgtgccagacagcacggcgctgcacacgccgcggcccatgtaccagtactccgacttcccgtggccggacaccgtcaccgaggtgttccccgaccaccggcaggtcatgtcctacctggacgcctacgcgcgccacttcggcgtgttggactgcgtccgcttcggccgccgcgtgctcgggatggagtaccacggcgtcgccgaggacgacgtggcggcgtgggaggagtggggcggaaacggccaggcgttcggctgcgccggcgctggcgagtggcgcctcaaggtggccgacgccgagggacgcattgagatttcatcccctagaagcccgagcctgtaggccggatcagcgctggccggtatggacaggggacgtggtacgaccattagttattaatgagactgatagagtgaagtttgaaaatatgataggaaatagaaatagaataggtaaactgttagagacaatctgaccaatgtggctttgatggcgggtgtttggatcagtcggttaggctatcggttaggctatcatccgcatgtttggtatcgaccctcaacgaccgaacacggtcggtatcgattgagcctccaacaatctacgcttttatcatagaagtcccttccaccgacacttctccataaaatttttgcttatccatatcctccttagtactcgtatagatatccatatgatcctcctccttatagattgtatggtgcttctccttgttatgcccctccttttggtgcttctcatgcgttccctctcctaacggtggtcctcctcgtgcttcttttcgttctccgccaggtaagatagtgccaccaaacagtcacaactatggggccttcaaccacttcgcgtatctagtgaatcactgttctaacaacgacaagactagactaaaatgataaaggacttgtaagtacatgtatatctttgtgtgttacatattttttaagtcaagaatatttttgaagtttgtaaagtggttagtgcactttgaccttgttgagggcaacggtaaaaaggtataccgcttttggggtcaaatagcggtataactccatcaacaaacctcatcgctaccataccaccaaacagacagcttaaggatcctggtccatatgagcaaccaaaaaaattaccctcttaattgacatctatcgccccttgtccacgttctagcctagcgttgcttgaagcagcaaataggagtttccaggttacgtagaaaaccgcctgaaaatctgattgggacaagtctggcttgactaggatagttgtacgtagtaaggccatctatattagggcttattcggttggctctcaatccatatggattgagtgggatgggtttgcttggtcggtatcgatcatggtgagagtgggctagttggtactgaccaaataatgatgcttactactgagcctctaaaaactagtgcttctaccactaaagcctcttccatcgattctaccactaaagcctcttccatcgatgctctttatctaccatcttttcttatctgtatcctatatacccatgcggatatccatacagtcctcctccgtatagatcgtagggtgctcctcctccttatgttcttctttgtggtccttatccttcgttttctctcctttatggtggtccttttatatatggtgctcatgctcctttttgccctttcctagacaagatagtgccactaagcaaccacatcgaagtggcctccaactagtttgtgtactctggtggattgcagttccaacggcaacgggactagactaagacgaaggatgaaactcttataaatatgtatacctttatgaatttcgcatgtttttaaatcaagaacaattttaagttcttaagtttttaggtacatatgtggttactacactccattaaccccgttgagggcaacagaagaaagtgataagccttttgggccaaatggcggtcacgtacaactctatcatcaaacctcctcactatcgtaccgtcaagcatctcaaggatcggtggttcacgagcatctagaaggtcacccttttcaacgacatctacaaacacttgtctgtggcctagccgagcagattagatgatgctatgccgctcaaagctggagcacaagtggcatgctcttcgtcactagcccaagtggtgtgtgtggcacagtgagtctgactctagcagtgcgagcaaatgagctcatctcaatgtagaggacgattgtagctatgcattgctgcagtgctggaccgacgcatcctattagtcatgatagggaaagacaacactagggtaataagg

SEQ ID NO: 20860 - DNA, 198 bp, Zea Mays
ctcaagttctgtgtcttcatcaagtccctcaacctcttgtaatgtggcgagaacttcggcggaagagggtagctttggaccatcatctttcaatgcagatacatgtcaaacttatcacaccatatagagttaaatgaatcatctgatctttgtctttttaaactactcgaggaagatacagaatatggagcatccttg

SEQ ID NO: 20861 - DNA, 471 bp, Zea Mays
caaactacgcaggggtgctatcgcgactactggagtcctcttactcacggatctggcccacaccgaagctagccacggcaaacagcggccacgagatctgttccactcccgatgaacgcacctaacatgctagggctccaatccctgggtgctctaggtgcaacgcaaaacggagataacaacgaagcatcaaactgtttggggtagtcggggggtttgaggcggttagcgccctgtccgcggcgaaccaagcctctgcggcgaatcacggaagcaacgtcggcagctactcccacgaatttttatggcataacataatggaggtccagcgacctgaaggaaggcggtgatctagtgcgcaggtgaacgaagcaatcgaaacatcaaaaaaggtcgcgacagctactggttttcttccaatggcgcgtaccaaacctgaccgtggccgccttgtgctcgggctcggcggcg

SEQ ID NO: 20862 - DNA, 366 bp, Zea Mays
gatctaagggatgcattgtggttcatatattgttctccaggacttaattacttatgtataatatatttagcaagtttaacaggtcttactcttactgttatggctccaaaaaaaaaggatgttttaaccaaatgttacatcaagaagtgggaaagaaactgcaacactagtgttcagtatccataacttgctgccacagtgtccctaattctcgcgctatcttagcctggaattggtctatcaagatgcaattagaattgcttatggttgcgcctgtcaggcataacataatggaggtccagcgacctgaaggaaggcggtgatctagtgcgcaggtgaacgaagcaatcgaaacatcaaaaaagg

SEQ ID NO: 20863 - DNA, 992 bp, Zea Mays
acctttagcctgcttgctataaaggcagcacacatctgccctgcccaacgacgcacacttcactcacccatccaccgcaaacgccaaacggccggcacacaactacacaagccgctggcaaagatggcctcctccttggtcctcatcgcagcggccctgcttgcgctggcctcgtcgtggcagcaggccatcgcctacgatcctagccccctccaggacttctgtgtcgcagacaagaactcgcctgttcgcgtcaacgggttcccttgcaaggacccgatggcggtcaccccggacgacttcttcaacgcggcgatgatcctcggcttcgtcacgtccaaccccaaccgcctcttctccaaggtggtcaagaagggcgacgtcttcgtcttccccaaggccatgatccacttccagatgaacctcgaccacgacaagcccgccgcggcgctctcgtcgctcagcagccagaaccctggcgtcatcaccatcgccagcgccgtcttcggctccaagccgcccatctcggacgacgtcttggccaaggcgttccaggtggagaagaaactcatcgactggctccagtctcagttctgggataccaactactagctgcctagctagctagtaatatacttgcttgcttatttgttgcatgcatgcaccaccaacacaagccttatattaattacgtacgtacatctatgtataatattgaataaatggccggtatgcatgtggaggagtgaaacttattactgtgcgtgattaataatatttaatgtaaacttttcattattatctaatataaaaaaaagaatacgagttcattgcaagtgtaattaacgatgattggggatgatgctctggattacatatgtacagccgaattcagtccgtcggcatgtacaacctcagagactgcataagcctttagctttgcatcataaatacaattaagagaccgttgagcaccatatgtgccacacaat

SEQ ID NO: 20864 - DNA, 2328 bp, Zea Mays
aatctctcgccgcgtgcgtctctcttatttctaccgtgcgcgcccgccactacctgcccgccgccgccgccctgcgcgcgccccgccgccccaccgcgcgccacccagcacgccaccacccagcgcggcccgccctcaccaccccgcggccccgccgccgccgccagcgcctagccacgcgcgccccaccctcgccaccccgcggccccccgccgccgccagcgcctagccgtgcgcgccccgccgccccatcgcgcacctgctagcgcgccgcccagcacgtcgcccgccctcgccaccccaaccgccgccgcagccgccgcccgatgtgccctcgtgcacgagacctctcgaaccctctcagaaggcggtgcgatccggtttgggtcgccgtgccgagcccaatgtgcccgacgcgcgcgcggctgagtcaaagccgaaactggcgctcggagacgacgatgataggccgccccttgaggagaagcaccgctgcagcggtgagggcggattcatcttcctctgcgcccttgttggacacaccgaggctatcggtgggatttctatgccgtctggttcgaacaagctctactccggcagcgtcgacggatctgttcgcatctgggactacaattccggcaagtgtgttgatgtcatcaagatgggaggcaaggttagctgcatgatcacccatggcccatgggtactcattggaattccaaagtttgtggaggcattgaacacaaagacagggatgaaactaagatttcaagggccttctagtctagtttgttccatggctatcacgaatgagatgttgtttgctggtactggagatggtcgcatcatggcctggagatttcctgctaaggatagtaacactgaaccagtgttgatcctcagtggccatcaacggccagtgatttcactgtctatcttggcaagaagactttactctggctcacttgacaagtccatcaaagcatgggaccttacaactcggcaactctgtcagagtctggaaaccttcaagtcaaatatgcccatgccgaggagaatggtttgcgcacactcttcggcatgcaccgagttgggaagacaccagttctcttctgctccctccacaacagcaattgcgtccgcttgctcgacttgccatcgtttggcggtctgctgctacgcgtagcagctttgcatcgcgtgaatgattggcacgctggatgttgcaggctgcttgattttttttactgatttttttttttacttacgccatgattttaaatttgggagacagtttgaattgaatgtgttccctgcctggcagcagttcgttagatcacatgcccgtcgtctacctcaaaacagtctcatcttttggaccgttcaattcaacttacttagttcaaacccaaggaggacggagggagggagattcagttctgaaatgtttattctgttattagtttaatcgcagcttctggaacaacagctctgtgccttttccctgcttaaattaaacggcaacaagaaatgcaggctgccaagaggcaaacagttgctactggatcaccgaccccagggcgcactgcatgggttggcaagggaacagtaacagcactaatgataatctgcaaaatgaagacgcaaatgatgcttctaggtggccatatccctggtgggcccatatccctggtgctttgttctttgatgttgatggaatatccgacagaacatctagtttaccacacatgctgccatctgaaaaggcattttcagttgctgtatctgctcttggcatctacaacaaagatgggatagtagtttatgatggaaaggggatgttcagtgctgcttgtgtttggtggtggggaggactgcacagttcgcatttggagcatcaaaacaggcgagctaatctttgtgcggagcatggcagacagtcccttcacgacatcttgttggcccaaaagcagccatggcttgtagtccttggctgtttgatgtaaaccacagctgggaagtcagacatcacctagagctagggtgtccattcttgacatgtttctcttagtgataggtggatactgtctaggtaggaacagagtcttgagggattgatgggcgcatgcatcttcaattcctgtgtgttgtattactactggtacaatctccaatgcttgtgaacttatgtgtttggactgtgaatttgtgatatgaacatatatcaatatgtttaaaatctgtattgtttgtgatattctgtgttgcatgtgatattatgtgtgtctaatttttaatttctgtattttttatttttttctggaaaag

SEQ ID NO: 20865 - DNA, 2286 bp, Zea Mays
ctacctgcccgccgccgccgccctgcgcgcgccccgccgccccaccgcgcgccacccagcacgccaccacccagcgcggcccgccctcaccaccccgcggccccgccgccgccgccagcgcctagccacgcgcgccccaccctcgccaccccgcggccccccgccgccgccagcgcctagccgtgcgcgccccgccgccccatcgcgcacctgctagcgcgccgcccagcacgtcgcccgccctcgccaccccaaccgccgccgcagccgccgcccgatgtgccctcgtgcacgagacctctcgaaccctctcagaaggcggtgcgatccggtttgggtcgccgtgccgagcccaatgtgcccgacgcgcgcgcggctgagtcaaagccgaaactggcgctcggagacgacgatgataggccgccccttgaggagaagcaccgctgcagcggtgagggcggattcatcttcctctgcgcccttgttggacacaccgaggctatcggtgggatttctatgccgtctggttcgaacaagctctactccggcagcgtcgacggatctgttcgcatctgggactacaattccggcaagtgtgttgatgtcatcaagatgggaggcaaggttagctgcatgatcacccatggcccatgggtactcattggaattccaaagtttgtggaggtgacattctgattctagtgagagtacacctttattttgtattatgtatggtgacattgaggggtgactttgcttggtacaaggcattgaacacaaagacagggatgaaactaagatttcaagggccttctagtctagtttgttccatggctatcacgaatgagatgttgtttgctggtactggagatggtcgcatcatggcctggagatttcctgctaaggatagtaacactgaaccagtgttgatcctcagtggccatcaacggccagtgatttcactgtctatcttggcaagaagactttactctggctcacttgacaagtccatcaaagcatgggaccttacaactcggcaactctgtcagagtctggaaaccttcaagtcaaatatgcccatgccgaggagaatggtttgcgcacactcttcggcatgcaccgagttgggaagacaccagttctcttctgctccctccacaacagcaattgcgtccgcttgctcgacttgccatcgtgagtgcataaaaatttctatcagtttcatcatcagatagacaaaccgctcgctcagttaccatcgagctctgcatttgcctggttaccatctttcaggtttggcggtctgctgctacgcgtagcagctttgcatcgcgtgaatgattggcacgctggatgttgcaggctgcttgattttttttactgatttttttttttacttacgccatgattttaaatttgggagacagtttgaattgaatgtgttccctgcctggcagcagttcgttagatcacatgcccgtcgtctacctcaaaacagtctcatcttttggaccgttcaattcaacttacttagttcaaacccaaggaggacggagggagggagattcagttctgaaatgtttattctgttattagtttaatcgcagcttctggaacaacagctctgtgccttttccctgcttaaattaaacggcaacaaggtctcagagcacctgccatttttcctgaaaaattgtttgtttaatagatgagagctacatctagttgtaggtgtccgtaggcctcttctttctgaacagatccactagtgtggaacatgcagaaatgcaggctgccaagaggcaaacagttgctactggatcaccgaccccagggcgcactgcatgggttggcaagggaacagtaacagcactaatgataatctgcaaaatgaagacgcaaatgatgcttctaggtggccatatccctggtgctttgttctttgatgttgatggagtatccctagtgcataactgaaagtataatgcggatgttctaatgattcaatcttgtttctaggtggcccatatccctggtgctttgttctttgatgttgatggaatatccgacagaacatctagtttaccacacatgctgccatctgaaaaggcattttcagttgctgtatctgctcttggcatctacaacaaagatgggatagtagtttatgatggaaaggggatgttcagtgctgcttgtgtttggtggttgagttttgatttacagaattgtctgtgtgctagttggttcatatatgtgaagttagcaagattatttcaagggagg

SEQ ID NO: 20866 - DNA, 2443 bp, Zea Mays
ctacctgcccgccgccgccgccctgcgcgcgccccgccgccccaccgcgcgccacccagcacgccaccacccagcgcggcccgccctcaccaccccgcggccccgccgccgccgccagcgcctagccacgcgcgccccaccctcgccaccccgcggccccccgccgccgccagcgcctagccgtgcgcgccccgccgccccatcgcgcacctgctagcgcgccgcccagcacgtcgcccgccctcgccaccccaaccgccgccgcagccgccgcccgatgtgccctcgtgcacgagacctctcgaaccctctcagaaggcggtgcgatccggtttgggtcgccgtgccgagcccaatgtgcccgacgcgcgcgcggctgagtcaaagccgaaactggcgctcggagacgacgatgataggccgccccttgaggagaagcaccgctgcagcggtgagggcggattcatcttcctctgcgcccttgttggacacaccgaggctatcggtgggatttctatgccgtctggttcgaacaagctctactccggcagcgtcgacggatctgttcgcatctgggactacaattccggcaaggctaccaacaatctctttgattatggacgagtaacgggctgcttccacggaggttccagtgaggaggttgtcattgttcgtggtggttcatgtgctgattagcaatgtgtgcaccctatggaaccaaccataaccgaatggtgactcctaattttttctgattggttgtgcctaaatcaccaatcgtcagcggatttcttatgattagttgggtgatcctgtgctcctggtttggattggatgttatctgtcaggctagccttgttgctatatattggaggctcttcgcctgattcggttacccgtttgcctgggatcagtttgtggcgctatctggttggttgtcacttggttgatacatatgattgcatgatctgcaagtgaatcttcagagattacaactatctcattagtggatagtcatgcatttatgtaaaaatatagcaatgagaaaaaggaacaaagtaaagaaaaagagaaaatatagatggagatatgtgggagtatatccaagaggatggaaaaaatataatttgttatcatattacaatttttgttcttaatgtttctgcaatagtgtgttgatgtcatcaagatgggaggcaaggttagctgcatgatcacccatggcccatgggtactcattggaattccaaagtttgtggaggcattgaacacaaagacagggatgaaactaagatttcaagggccttctagtctagtttgttccatggctatcacgaatgagatgttgtttgctggtactggagatggtcgcatcatggcctggagatttcctgctaaggatagtaacactgaaccagtgttgatcctcagtggccatcaacggccagtgatttcactgtctatcttggcaagaagactttactctggctcacttgacaagtccatcaaagcatgggaccttacaactcggcagtgtgtccaaacactctctgagcataaagcttctgtaacatctgtgctttgttgggatgagaagttattatcttgctcccttgacaagactgtaaaactctagactctgtcagagtctggaaaccttcaagtcaaatatgcccatgccgaggagaatggtttgcgcacactcttcggcatgcaccgagttgggaagacaccagttctcttctgctccctccacaacagcaattgcgtccgcttgctcgacttgccatcgtggcccatatccctggtgctttgttctttgatgttgatggaatatccgacagaacatctagtttaccacacatgctgccatctgaaaaggcattttcagttgctgtatctgctcttggcatctacaacaaagatgggatagtagtttatgatggaaaggggatgttcagtgctgcttgtgtttggtggtggggaggactgcacagttcgcatttggagcatcaaaacaggcgagctaatctttgtgcggagcatggcagacagtcccttcacgacatcttgttggcccaaaagcagccatggcttgtagtccttggctgtttgatgtaaaccacagctgggaagtcagacatcacctagagctagggtgtccattcttgacatgtttctcttagtgataggtggatactgtctaggtaggaacagagtcttgagggattgatgggcgcatgcatcttcaattcctgtgtgttgtattactactggtacaatctccaatgcttgtgaacttatgtgtttggactgtgaatttgtgatatgaacatatatcaatatgtttaaaatctgtattgtttgtgatattctgtgttgcatgtgatattatgtgtgtctaatttttaatttctgtattttttatttttttctggaaaag

SEQ ID NO: 20867 - DNA, 2385 bp, Zea Mays
ctacctgcccgccgccgccgccctgcgcgcgccccgccgccccaccgcgcgccacccagcacgccaccacccagcgcggcccgccctcaccaccccgcggccccgccgccgccgccagcgcctagccacgcgcgccccaccctcgccaccccgcggccccccgccgccgccagcgcctagccgtgcgcgccccgccgccccatcgcgcacctgctagcgcgccgcccagcacgtcgcccgccctcgccaccccaaccgccgccgcagccgccgcccgatgtgccctcgtgcacgagacctctcgaaccctctcagaaggcggtgcgatccggtttgggtcgccgtgccgagcccaatgtgcccgacgcgcgcgcggctgagtcaaagccgaaactggcgctcggagacgacgatgataggccgccccttgaggagaagcaccgctgcagcggtgagggcggattcatcttcctctgcgcccttgttggacacaccgaggctatcggtgggatttctatgccgtctggttcgaacaagctctactccggcagcgtcgacggatctgttcgcatctgggactacaattccggcaagtgtgttgatgtcatcaagatgggaggcaaggttagctgcatgatcacccatggcccatgggtactcattggaattccaaagtttgtggaggcattgaacacaaagacagggatgaaactaagatttcaagggccttctagtctagtttgttccatggctatcacgaatgagatgttgtttgctggtactggagatggtcgcatcatggcctggagatttcctgctaaggatagtaacactgaaccagtgttgatcctcagtggccatcaacggccagtgatttcactgtctatcttggcaagaagactttactctggctcacttgacaagtccatcaaagcatgggaccttacaactcggcaactctgtcagagtctggaaaccttcaagtcaaatatgcccatgccgaggagaatggtttgcgcacactcttcggcatgcaccgagttgggaagacaccagttctcttctgctccctccacaacagcaattgcgtccgcttgctcgacttgccatcgtttggcggtctgctgctacgcgtagcagctttgcatcgcgtgaatgattggcacgctggatgttgcaggctgcttgattttttttactgatttttttttttacttacgccatgattttaaatttgggagacagtttgaattgaatgtgttccctgcctggcagcagttcgttagatcacatgcccgtcgtctacctcaaaacagtctcatcttttggaccgttcaattcaacttacttagttcaaacccaaggaggacggagggagggagattcagttctgaaatgtttattctgttattagtttaatcgcagcttctggaacaacagctctgtgccttttccctgcttaaattaaacggcaacaaggtctcagagcacctgccatttttcctgaaaaattgtttgtttaatagatgagagctacatctagttgtaggtgtccgtaggcctcttctttctgaacagatccactagtgtggaacatgcagaaatgcaggctgccaagaggcaaacagttgctactggatcaccgaccccagggcgcactgcatgggttggcaagggaacagtaacagcactaatgataatctgcaaaatgaagacgcaaatgatgcttctaggtggcccatatccctggtgctttgttctttgatgttgatggaatatccgacagaacatctagtttaccacacatgctgccatctgaaaaggcattttcagttgctgtatctgctcttggcatctacaacaaagatgggatagtagtttatgatggaaaggggatgttcagtgctgcttgtgtttggtggtggggaggactgcacagttcgcatttggagcatcaaaacaggcgagctaatctttgtgcggagcatggcagacagtcccttcacgacatcttgttggcccaaaagcagccatggcttgtagtccttggctgtttgatgtaaaccacagctgggaagtcagacatcacctagagctagggtgtccattcttgacatgtttctcttagtgataggtggatactgtctaggtaggaacagagtcttgagggattgatgggcgcatgcatcttcaattcctgtgtgttgtattactactggtacaatctccaatgcttgtgaacttatgtgtttggactgtgaatttgtgatatgaacatatatcaatatgtttaaaatctgtattgtttgtgatattctgtgttgcatgtgatattatgtgtgtctaatttttaatttctgtattttttatttttttctggaaaag

SEQ ID NO: 20868 - DNA, 2754 bp, Zea Mays
ctacctgcccgccgccgccgccctgcgcgcgccccgccgccccaccgcgcgccacccagcacgccaccacccagcgcggcccgccctcaccaccccgcggccccgccgccgccgccagcgcctagccacgcgcgccccaccctcgccaccccgcggccccccgccgccgccagcgcctagccgtgcgcgccccgccgccccatcgcgcacctgctagcgcgccgcccagcacgtcgcccgccctcgccaccccaaccgccgccgcagccgccgcccgatgtgccctcgtgcacgagacctctcgaaccctctcagaaggcggtgcgatccggtttgggtcgccgtgccgagcccaatgtgcccgacgcgcgcgcggctgagtcaaagccgaaactggcgctcggagacgacgatgataggccgccccttgaggagaagcaccgctgcagcggtgagggcggattcatcttcctctgcgcccttgttggacacaccgaggctatcggtgggatttctatgccgtctggttcgaacaagctctactccggcagcgtcgacggatctgttcgcatctgggactacaattccggcaaggctaccaacaatctctttgattatggacgagtaacgggctgcttccacggaggttccagtgaggaggttgtcattgttcgtggtggttcatgtgctgattagcaatgtgtgcaccctatggaaccaaccataaccgaatggtgactcctaattttttctgattggttgtgcctaaatcaccaatcgtcagcggatttcttatgattagttgggtgatcctgtgctcctggtttggattggatgttatctgtcaggctagccttgttgctatatattggaggctcttcgcctgattcggttacccgtttgcctgggatcagtttgtggcgctatctggttggttgtcacttggttgatacatatgattgcatgatctgcaagtgaatcttcagagattacaactatctcattagtggatagtcatgcatttatgtaaaaatatagcaatgagaaaaaggaacaaagtaaagaaaaagagaaaatatagatggagatatgtgggagtatatccaagaggatggaaaaaatataatttgttatcatattacaatttttgttcttaatgtttctgcaatagtgtgttgatgtcatcaagatgggaggcaaggttagctgcatgatcacccatggcccatgggtactcattggaattccaaagtttgtggaggtgacattctgattctagtgagagtacacctttattttgtattatgtatggtgacattgaggggtgactttgcttggtacaaggcattgaacacaaagacagggatgaaactaagatttcaagggccttctagtctagtttgttccatggctatcacgaatgagatgttgtttgctggtactggagatggtcgcatcatggcctggagatttcctgctaaggatagtaacactgaaccagtgttgatcctcagtggccatcaacggccagtgatttcactgtctatcttggcaagaagactttactctggctcacttgacaagtccatcaaagcatgggaccttacaactcggcagtgtgtccaaacactctctgagcataaagcttctgtaacatctgtgctttgttgggatgagaagttattatcttgctcccttgacaagactgtaaaactctagactctgtcagagtctggaaaccttcaagtcaaatatgcccatgccgaggagaatggtttgcgcacactcttcggcatgcaccgagttgggaagacaccagttctcttctgctccctccacaacagcaattgcgtccgcttgctcgacttgccatcgctgccaagaggcaaacagttgctactggatcaccgaccccagggcgcactgcatgggttggcaagggaacagtaacagcactaatgataatctgcaaaatgaagacgcaaatgatgcttctaggtggccatatccctggtgctttgttctttgatgttgatggagtatccctagtgcataactgaaagtataatgcggatgttctaatgattcaatcttgtttctaggtggcccatatccctggtgctttgttctttgatgttgatggaatatccgacagaacatctagtttaccacacatgctgccatctgaaaaggcattttcagttgctgtatctgctcttggcatctacaacaaagatgggatagtagtttatgatggaaaggggatgttcagtgctgcttgtgtttggtggtggggaggactgcacagttcgcatttggagcatcaaaacaggcgagctaatctttgtgcggagcatggcagacagtcccttcacgacatcttgttggcccaaaagcagccatggcttgtagtccttggctgtttgatgtaaaccacagctgggaagtcagacatcacctagagctagggtgtccattcttgacatgtttctcttagtgataggtggatactgtctaggtaggaacagagtcttgagggattgatgggcgcatgcatcttcaattcctgtgtgttgtattactactggtacaatctccaatgcttgtgaacttatgtgtttggactgtgaatttgtgatatgaacatatatcaatatgtttaaaatctgtattgtttgtgatattctgtgttgcatgtgatattatgtgtgtctaatttttaatttctgtattttttatttttttctggaaaag

SEQ ID NO: 20869 - DNA, 3299 bp, Zea Mays
ctacctgcccgccgccgccgccctgcgcgcgccccgccgccccaccgcgcgccacccagcacgccaccacccagcgcggcccgccctcaccaccccgcggccccgccgccgccgccagcgcctagccacgcgcgccccaccctcgccaccccgcggccccccgccgccgccagcgcctagccgtgcgcgccccgccgccccatcgcgcacctgctagcgcgccgcccagcacgtcgcccgccctcgccaccccaaccgccgccgcagccgccgcccgatgtgccctcgtgcacgagacctctcgaaccctctcagaaggcggtgcgatccggtttgggtcgccgtgccgagcccaatgtgcccgacgcgcgcgcggctgagtcaaagccgaaactggcgctcggagacgacgatgataggccgccccttgaggagaagcaccgctgcagcggtgagggcggattcatcttcctctgcgcccttgttggacacaccgaggctatcggtgggatttctatgccgtctggttcgaacaagctctactccggcagcgtcgacggatctgttcgcatctgggactacaattccggcaaggctaccaacaatctctttgattatggacgagtaacgggctgcttccacggaggttccagtgaggaggttgtcattgttcgtggtggttcatgtgctgattagcaatgtgtgcaccctatggaaccaaccataaccgaatggtgactcctaattttttctgattggttgtgcctaaatcaccaatcgtcagcggatttcttatgattagttgggtgatcctgtgctcctggtttggattggatgttatctgtcaggctagccttgttgctatatattggaggctcttcgcctgattcggttacccgtttgcctgggatcagtttgtggcgctatctggttggttgtcacttggttgatacatatgattgcatgatctgcaagtgaatcttcagagattacaactatctcattagtggatagtcatgcatttatgtaaaaatatagcaatgagaaaaaggaacaaagtaaagaaaaagagaaaatatagatggagatatgtgggagtatatccaagaggatggaaaaaatataatttgttatcatattacaatttttgttcttaatgtttctgcaatagtgtgttgatgtcatcaagatgggaggcaaggttagctgcatgatcacccatggcccatgggtactcattggaattccaaagtttgtggaggtgacattctgattctagtgagagtacacctttattttgtattatgtatggtgacattgaggggtgactttgcttggtacaaggcattgaacacaaagacagggatgaaactaagatttcaagggccttctagtctagtttgttccatggctatcacgaatgagatgttgtttgctggtactggagatggtcgcatcatggcctggagatttcctgctaaggatagtaacactgaaccagtgttgatcctcagtggccatcaacggccagtgatttcactgtctatcttggcaagaagactttactctggctcacttgacaagtccatcaaagtatggatttttcttcaagatattgctcaattggcagttagaagttatgctcattctgacacattcttcaattctctgtatttaccaggcatgggaccttacaactcggcaactctgtcagagtctggaaaccttcaagtcaaatatgcccatgccgaggagaatggtttgcgcacactcttcggcatgcaccgagttgggaagacaccagttctcttctgctccctccacaacagcaattgcgtccgcttgctcgacttgccatcgtgagtgcataaaaatttctatcagtttcatcatcagatagacaaaccgctcgctcagttaccatcgagctctgcatttgcctggttaccatctttcaggtttggcggtctgctgctacgcgtagcagctttgcatcgcgtgaatgattggcacgctggatgttgcaggctgcttgattttttttactgatttttttttttacttacgccatgattttaaatttgggagacagtttgaattgaatgtgttccctgcctggcagcagttcgttagatcacatgcccgtcgtctacctcaaaacagtctcatcttttggaccgttcaattcaacttacttagttcaaacccaaggaggacggagggagggagattcagttctgaaatgtttattctgttattagtttaatcgcagcttctggaacaacagctctgtgccttttccctgcttaaattaaacggcaacaaggtctcagagcacctgccatttttcctgaaaaattgtttgtttaatagatgagagctacatctagttgtaggtgtccgtaggcctcttctttctgaacagatccactagtgtggaacatgcagaaatgcaggctgccaagaggcaaacagttgctactggatcaccgaccccagggcgcactgcatgggttggcaagggaacagtaacagcactaatgataatctgcaaaatgaagacgcaaatgatgcttctaggtggccatatccctggtgctttgttctttgatgttgatggagtatccctagtgcataactgaaagtataatgcggatgttctaatgattcaatcttgtttctaggtggcccatatccctggtgctttgttctttgatgttgatggaatatccgacagaacatctagtttgctgtatctgctcttggcatctacaacaaagatgggatagtagtttatgatggaaaggggatgttcagtgctgcttgtgtttggtggtggggaggactgcacagttcgcatttggagcatcaaaacaggcgagctaatctttgtgcggagcatggcagacagtcccttcacgacatcttgttggcccaaaagcagccatggcttgtagtccttggctgtttgatgtaaaccacagctgggaagtcagacatcacctagagctagggtgtccattcttgacatgtttctcttagtgataggtggatactgtctaggtaggaacagagtcttgagggattgatgggcgcatgcatcttcaattcctgtgtgttgtattactactggtacaatctccaatgcttgtgaacttatgtgtttggactgtgaatttgtgatatgaacatatatcaatatgtttaaaatctgtattgtttgtgatattctgtgttgcatgtgatattatgtgtgtctaatttttaatttctgtattttttatttttttctggaaaag

SEQ ID NO: 20870 - DNA, 2795 bp, Zea Mays
ctacctgcccgccgccgccgccctgcgcgcgccccgccgccccaccgcgcgccacccagcacgccaccacccagcgcggcccgccctcaccaccccgcggccccgccgccgccgccagcgcctagccacgcgcgccccaccctcgccaccccgcggccccccgccgccgccagcgcctagccgtgcgcgccccgccgccccatcgcgcacctgctagcgcgccgcccagcacgtcgcccgccctcgccaccccaaccgccgccgcagccgccgcccgatgtgccctcgtgcacgagacctctcgaaccctctcagaaggcggtgcgatccggtttgggtcgccgtgccgagcccaatgtgcccgacgcgcgcgcggctgagtcaaagccgaaactggcgctcggagacgacgatgataggccgccccttgaggagaagcaccgctgcagcggtgagggcggattcatcttcctctgcgcccttgttggacacaccgaggctatcggtgggatttctatgccgtctggttcgaacaagctctactccggcagcgtcgacggatctgttcgcatctgggactacaattccggcaaggctaccaacaatctctttgattatggacgagtaacgggctgcttccacggaggttccagtgaggaggttgtcattgttcgtggtggttcatgtgctgattagcaatgtgtgcaccctatggaaccaaccataaccgaatggtgactcctaattttttctgattggttgtgcctaaatcaccaatcgtcagcggatttcttatgattagttgggtgatcctgtgctcctggtttggattggatgttatctgtcaggctagccttgttgctatatattggaggctcttcgcctgattcggttacccgtttgcctgggatcagtttgtggcgctatctggttggttgtcacttggttgatacatatgattgcatgatctgcaagtgaatcttcagagattacaactatctcattagtggatagtcatgcatttatgtaaaaatatagcaatgagaaaaaggaacaaagtaaagaaaaagagaaaatatagatggagatatgtgggagtatatccaagaggatggaaaaaatataatttgttatcatattacaatttttgttcttaatgtttctgcaatagtgtgttgatgtcatcaagatgggaggcaaggttagctgcatgatcacccatggcccatgggtactcattggaattccaaagtttgtggaggcattgaacacaaagacagggatgaaactaagatttcaagggccttctagtctagtttgttccatggctatcacgaatgagatgttgtttgctggtactggagatggtcgcatcatggcctggagatttcctgctaaggatagtaacactgaaccagtgttgatcctcagtggccatcaacggccagtgatttcactgtctatcttggcaagaagactttactctggctcacttgacaagtccatcaaagcatgggaccttacaactcggcagtgtgtccaaacactctctgagcataaagcttctgtaacatctgtgctttgttgggatgagaagttattatcttgctcccttgacaagactgtaaaactctagactctgtcagagtctggaaaccttcaagtcaaatatgcccatgccgaggagaatggtttgcgcacactcttcggcatgcaccgagttgggaagacaccagttctcttctgctccctccacaacagcaattgcgtccgcttgctcgacttgccatcaaatgcaggctgccaagaggcaaacagttgctactggatcaccgaccccagggcgcactgcatgggttggcaagggaacagtaacagcactaatgataatctgcaaaatgaagacgcaaatgatgcttctaggtggcccatatccctggtgctttgttctttgatgttgatggaatatccgacagaacatctagtgtaagttgagttctgtagtttgtaccctttattgttgctgatcacaaaatctttttgttgcttgttgatgatactaatatctatttagtacctgcattctttttgttgcatattgatgatactaatactgtctgatataactagttgctttttctctctttggtaagaatctgcaattaaatttgacatccattggttatatatttttttccttgttcagttaccacacatgctgccatctgaaaaggcattttcagttgctgtatctgctcttggcatctacaacaaagatgggatagtagtttatgatggaaaggggatgttcagtgctgcttgtgtttggtggtggggaggactgcacagttcgcatttggagcatcaaaacaggcgagctaatctttgtgcggagcatggcagacagtcccttcacgacatcttgttggcccaaaagcagccatggcttgtagtccttggctgtttgatgtaaaccacagctgggaagtcagacatcacctagagctagggtgtccattcttgacatgtttctcttagtgataggtggatactgtctaggtaggaacagagtcttgagggattgatgggcgcatgcatcttcaattcctgtgtgttgtattactactggtacaatctccaatgcttgtgaacttatgtgtttggactgtgaatttgtgatatgaacatatatcaatatgtttaaaatctgtattgtttgtgatattctgtgttgcatgtgatattatgtgtgtctaatttttaatttctgtattttttatttttttctggaaaag

SEQ ID NO: 20871 - DNA, 3088 bp, Zea Mays
ctacctgcccgccgccgccgccctgcgcgcgccccgccgccccaccgcgcgccacccagcacgccaccacccagcgcggcccgccctcaccaccccgcggccccgccgccgccgccagcgcctagccacgcgcgccccaccctcgccaccccgcggccccccgccgccgccagcgcctagccgtgcgcgccccgccgccccatcgcgcacctgctagcgcgccgcccagcacgtcgcccgccctcgccaccccaaccgccgccgcagccgccgcccgatgtgccctcgtgcacgagacctctcgaaccctctcagaaggcggtgcgatccggtttgggtcgccgtgccgagcccaatgtgcccgacgcgcgcgcggctgagtcaaagccgaaactggcgctcggagacgacgatgataggccgccccttgaggagaagcaccgctgcagcggtgagggcggattcatcttcctctgcgcccttgttggacacaccgaggctatcggtgggatttctatgccgtctggttcgaacaagctctactccggcagcgtcgacggatctgttcgcatctgggactacaattccggcaaggctaccaacaatctctttgattatggacgagtaacgggctgcttccacggaggttccagtgaggaggttgtcattgttcgtggtggttcatgtgctgattagcaatgtgtgcaccctatggaaccaaccataaccgaatggtgactcctaattttttctgattggttgtgcctaaatcaccaatcgtcagcggatttcttatgattagttgggtgatcctgtgctcctggtttggattggatgttatctgtcaggctagccttgttgctatatattggaggctcttcgcctgattcggttacccgtttgcctgggatcagtttgtggcgctatctggttggttgtcacttggttgatacatatgattgcatgatctgcaagtgaatcttcagagattacaactatctcattagtggatagtcatgcatttatgtaaaaatatagcaatgagaaaaaggaacaaagtaaagaaaaagagaaaatatagatggagatatgtgggagtatatccaagaggatggaaaaaatataatttgttatcatattacaatttttgttcttaatgtttctgcaatagtgtgttgatgtcatcaagatgggaggcaaggttagctgcatgatcacccatggcccatgggtactcattggaattccaaagtttgtggaggtgacattctgattctagtgagagtacacctttattttgtattatgtatggtgacattgaggggtgactttgcttggtacaaggcattgaacacaaagacagggatgaaactaagatttcaagggccttctagtctagtttgttccatggctatcacgaatgagatgttgtttgctggtactggagatggtcgcatcatggcctggagatttcctgctaaggatagtaacactgaaccagtgttgatcctcagtggccatcaacggccagtgatttcactgtctatcttggcaagaagactttactctggctcacttgacaagtccatcaaagcatgggaccttacaactcggcagtgtgtccaaacactctctgagcataaagcttctgtaacatctgtgctttgttgggatgagaagttattatcttgctcccttgacaagactgtaaaactctagactctgtcagagtctggaaaccttcaagtcaaatatgcccatgccgaggagaatggtttgcgcacactcttcggcatgcaccgagttgggaagacaccagttctcttctgctccctccacaacagcaattgcgtccgcttgctcgacttgccatccagttcgttagatcacatgcccgtcgtctacctcaaaacagtctcatcttttggaccgttcaattcaacttacttagttcaaacccaaggaggacggagggagggagattcagttctgaaatgtttattctgttattagtttaatcgcagcttctggaacaacagctctgtgccttttccctgcttaaattaaacggcaacaaggtctcagagcacctgccatttttcctgaaaaattgtttgtttaatagatgagagctacatctagttgtaggtgtccgtaggcctcttctttctgaacagatccactagtgtggaacatgcagaaatgcaggctgccaagaggcaaacagttgctactggatcaccgaccccagggcgcactgcatgggttggcaagggaacagtaacagcactaatgataatctgcaaaatgaagacgcaaatgatgcttctaggtggccatatccctggtgctttgttctttgatgttgatggagtatccctagtgcataactgaaagtataatgcggatgttctaatgattcaatcttgtttctaggtggcccatatccctggtgctttgttctttgatgttgatggaatatccgacagaacatctagtttaccacacatgctgccatctgaaaaggcattttcagttgctgtatctgctcttggcatctacaacaaagatgggatagtagtttatgatggaaaggggatgttcagtgctgcttgtgtttggtggtggggaggactgcacagttcgcatttggagcatcaaaacaggcgagctaatctttgtgcggagcatggcagacagtcccttcacgacatcttgttggcccaaaagcagccatggcttgtagtccttggctgtttgatgtaaaccacagctgggaagtcagacatcacctagagctagggtgtccattcttgacatgtttctcttagtgataggtggatactgtctaggtaggaacagagtcttgagggattgatgggcgcatgcatcttcaattcctgtgtgttgtattactactggtacaatctccaatgcttgtgaacttatgtgtttggactgtgaatttgtgatatgaacatatatcaatatgtttaaaatctgtattgtttgtgatattctgtgttgcatgtgatattatgtgtgtctaatttttaatttctgtattttttatttttttctggaaaag

SEQ ID NO: 20872 - DNA, 2014 bp, Zea Mays
ctacctgcccgccgccgccgccctgcgcgcgccccgccgccccaccgcgcgccacccagcacgccaccacccagcgcggcccgccctcaccaccccgcggccccgccgccgccgccagcgcctagccacgcgcgccccaccctcgccaccccgcggccccccgccgccgccagcgcctagccgtgcgcgccccgccgccccatcgcgcacctgctagcgcgccgcccagcacgtcgcccgccctcgccaccccaaccgccgccgcagccgccgcccgatgtgccctcgtgcacgagacctctcgaaccctctcagaaggcggtgcgatccggtttgggtcgccgtgccgagcccaatgtgcccgacgcgcgcgcggctgagtcaaagccgaaactggcgctcggagacgacgatgataggccgccccttgaggagaagcaccgctgcagcggtgagggcggattcatcttcctctgcgcccttgttggacacaccgaggctatcggtgggatttctatgccgtctggttcgaacaagctctactccggcagcgtcgacggatctgttcgcatctgggactacaattccggcaagtgtgttgatgtcatcaagatgggaggcaaggttagctgcatgatcacccatggcccatgggtactcattggaattccaaagtttgtggaggcattgaacacaaagacagggatgaaactaagatttcaagggccttctagtctagtttgttccatggctatcacgaatgagatgttgtttgctggtactggagatggtcgcatcatggcctggagatttcctgctaaggatagtaacactgaaccagtgttgatcctcagtggccatcaacggccagtgatttcactgtctatcttggcaagaagactttactctggctcacttgacaagtccatcaaagcatgggaccttacaactcggcagtgtgtccaaacactctctgagcataaagcttctgtaacatctgtgctttgttgggatgagaagttattatcttgctcccttgacaagactgtaaaactctagactctgtcagagtctggaaaccttcaagtcaaatatgcccatgccgaggagaatggtttgcgcacactcttcggcatgcaccgagttgggaagacaccagttctcttctgctccctccacaacagcaattgcgtccgcttgctcgacttgccatcaaatgcaggctgccaagaggcaaacagttgctactggatcaccgaccccagggcgcactgcatgggttggcaagggaacagtaacagcactaatgataatctgcaaaatgaagacgcaaatgatgcttctaggtggccatatccctggtgggcccatatccctggtgctttgttctttgatgttgatggaatatccgacagaacatctagtttaccacacatgctgccatctgaaaaggcattttcagttgctgtatctgctcttggcatctacaacaaagatgggatagtagtttatgatggaaaggggatgttcagtgctgcttgtgtttggtggtggggaggactgcacagttcgcatttggagcatcaaaacaggcgagctaatctttgtgcggagcatggcagacagtcccttcacgacatcttgttggcccaaaagcagccatggcttgtagtccttggctgtttgatgtaaaccacagctgggaagtcagacatcacctagagctagggtgtccattcttgacatgtttctcttagtgataggtggatactgtctaggtaggaacagagtcttgagggattgatgggcgcatgcatcttcaattcctgtgtgttgtattactactggtacaatctccaatgcttgtgaacttatgtgtttggactgtgaatttgtgatatgaacatatatcaatatgtttaaaatctgtattgtttgtgatattctgtgttgcatgtgatattatgtgtgtctaatttttaatttctgtattttttatttttttctggaaaag

SEQ ID NO: 20873 - DNA, 2688 bp, Zea Mays
ctacctgcccgccgccgccgccctgcgcgcgccccgccgccccaccgcgcgccacccagcacgccaccacccagcgcggcccgccctcaccaccccgcggccccgccgccgccgccagcgcctagccacgcgcgccccaccctcgccaccccgcggccccccgccgccgccagcgcctagccgtgcgcgccccgccgccccatcgcgcacctgctagcgcgccgcccagcacgtcgcccgccctcgccaccccaaccgccgccgcagccgccgcccgatgtgccctcgtgcacgagacctctcgaaccctctcagaaggcggtgcgatccggtttgggtcgccgtgccgagcccaatgtgcccgacgcgcgcgcggctgagtcaaagccgaaactggcgctcggagacgacgatgataggccgccccttgaggagaagcaccgctgcagcggtgagggcggattcatcttcctctgcgcccttgttggacacaccgaggctatcggtgggatttctatgccgtctggttcgaacaagctctactccggcagcgtcgacggatctgttcgcatctgggactacaattccggcaaggctaccaacaatctctttgattatggacgagtaacgggctgcttccacggaggttccagtgaggaggttgtcattgttcgtggtggttcatgtgctgattagcaatgtgtgcaccctatggaaccaaccataaccgaatggtgactcctaattttttctgattggttgtgcctaaatcaccaatcgtcagcggatttcttatgattagttgggtgatcctgtgctcctggtttggattggatgttatctgtcaggctagccttgttgctatatattggaggctcttcgcctgattcggttacccgtttgcctgggatcagtttgtggcgctatctggttggttgtcacttggttgatacatatgattgcatgatctgcaagtgaatcttcagagattacaactatctcattagtggatagtcatgcatttatgtaaaaatatagcaatgagaaaaaggaacaaagtaaagaaaaagagaaaatatagatggagatatgtgggagtatatccaagaggatggaaaaaatataatttgttatcatattacaatttttgttcttaatgtttctgcaatagtgtgttgatgtcatcaagatgggaggcaaggttagctgcatgatcacccatggcccatgggtactcattggaattccaaagtttgtggaggtgacattctgattctagtgagagtacacctttattttgtattatgtatggtgacattgaggggtgactttgcttggtacaaggcattgaacacaaagacagggatgaaactaagatttcaagggccttctagtctagtttgttccatggctatcacgaatgagatgttgtttgctggtactggagatggtcgcatcatggcctggagatttcctgctaaggatagtaacactgaaccagtgttgatcctcagtggccatcaacggccagtgatttcactgtctatcttggcaagaagactttactctggctcacttgacaagtccatcaaagcatgggaccttacaactcggcagtgtgtccaaacactctctgagcataaagcttctgtaacatctgtgctttgttgggatgagaagttattatcttgctcccttgacaagactgtaaaactctagactctgtcagagtctggaaaccttcaagtcaaatatgcccatgccgaggagaatggtttgcgcacactcttcggcatgcaccgagttgggaagacaccagttctcttctgctccctccacaacagcaattgcgtccgcttgctcgacttgccatctgtggaacatgcagaaatgcaggctgccaagaggcaaacagttgctactggatcaccgaccccagggcgcactgcatgggttggcaagggaacagtaacagcactaatgataatctgcaaaatgaagacgcaaatgatgcttctaggtggccatatccctggtgggcccatatccctggtgctttgttctttgatgttgatggaatatccgacagaacatctagtttaccacacatgctgccatctgaaaaggcattttcagttgctgtatctgctcttggcatctacaacaaagatgggatagtagtttatgatggaaaggggatgttcagtgctgcttgtgtttggtggtggggaggactgcacagttcgcatttggagcatcaaaacaggcgagctaatctttgtgcggagcatggcagacagtcccttcacgacatcttgttggcccaaaagcagccatggcttgtagtccttggctgtttgatgtaaaccacagctgggaagtcagacatcacctagagctagggtgtccattcttgacatgtttctcttagtgataggtggatactgtctaggtaggaacagagtcttgagggattgatgggcgcatgcatcttcaattcctgtgtgttgtattactactggtacaatctccaatgcttgtgaacttatgtgtttggactgtgaatttgtgatatgaacatatatcaatatgtttaaaatctgtattgtttgtgatattctgtgttgcatgtgatattatgtgtgtctaatttttaatttctgtattttttatttttttctggaaaag

SEQ ID NO: 20874 - DNA, 2838 bp, Zea Mays
ctacctgcccgccgccgccgccctgcgcgcgccccgccgccccaccgcgcgccacccagcacgccaccacccagcgcggcccgccctcaccaccccgcggccccgccgccgccgccagcgcctagccacgcgcgccccaccctcgccaccccgcggccccccgccgccgccagcgcctagccgtgcgcgccccgccgccccatcgcgcacctgctagcgcgccgcccagcacgtcgcccgccctcgccaccccaaccgccgccgcagccgccgcccgatgtgccctcgtgcacgagacctctcgaaccctctcagaaggcggtgcgatccggtttgggtcgccgtgccgagcccaatgtgcccgacgcgcgcgcggctgagtcaaagccgaaactggcgctcggagacgacgatgataggccgccccttgaggagaagcaccgctgcagcggtgagggcggattcatcttcctctgcgcccttgttggacacaccgaggctatcggtgggatttctatgccgtctggttcgaacaagctctactccggcagcgtcgacggatctgttcgcatctgggactacaattccggcaaggctaccaacaatctctttgattatggacgagtaacgggctgcttccacggaggttccagtgaggaggttgtcattgttcgtggtggttcatgtgctgattagcaatgtgtgcaccctatggaaccaaccataaccgaatggtgactcctaattttttctgattggttgtgcctaaatcaccaatcgtcagcggatttcttatgattagttgggtgatcctgtgctcctggtttggattggatgttatctgtcaggctagccttgttgctatatattggaggctcttcgcctgattcggttacccgtttgcctgggatcagtttgtggcgctatctggttggttgtcacttggttgatacatatgattgcatgatctgcaagtgaatcttcagagattacaactatctcattagtggatagtcatgcatttatgtaaaaatatagcaatgagaaaaaggaacaaagtaaagaaaaagagaaaatatagatggagatatgtgggagtatatccaagaggatggaaaaaatataatttgttatcatattacaatttttgttcttaatgtttctgcaatagtgtgttgatgtcatcaagatgggaggcaaggttagctgcatgatcacccatggcccatgggtactcattggaattccaaagtttgtggaggcattgaacacaaagacagggatgaaactaagatttcaagggccttctagtctagtttgttccatggctatcacgaatgagatgttgtttgctggtactggagatggtcgcatcatggcctggagatttcctgctaaggatagtaacactgaaccagtgttgatcctcagtggccatcaacggccagtgatttcactgtctatcttggcaagaagactttactctggctcacttgacaagtccatcaaagcatgggaccttacaactcggcaactctgtcagagtctggaaaccttcaagtcaaatatgcccatgccgaggagaatggtttgcgcacactcttcggcatgcaccgagttgggaagacaccagttctcttctgctccctccacaacagcaattgcgtccgcttgctcgacttgccatcgtttggcggtctgctgctacgcgtagcagctttgcatcgcgtgaatgattggcacgctggatgttgcaggctgcttgattttttttactgatttttttttttacttacgccatgattttaaatttgggagacagtttgaattgaatgtgttccctgcctggcagcagttcgttagatcacatgcccgtcgtctacctcaaaacagtctcatcttttggaccgttcaattcaacttacttagttcaaacccaaggaggacggagggagggagattcagttctgaaatgtttattctgttattagtttaatcgcagcttctggaacaacagctctgtgccttttccctgcttaaattaaacggcaacaagaaatgcaggctgccaagaggcaaacagttgctactggatcaccgaccccagggcgcactgcatgggttggcaagggaacagtaacagcactaatgataatctgcaaaatgaagacgcaaatgatgcttctagggcccatatccctggtgctttgttctttgatgttgatggaatatccgacagaacatctagtttaccacacatgctgccatctgaaaaggcattttcagttgctgtatctgctcttggcatctacaacaaagatgggatagtagtttatgatggaaaggggatgttcagtgctgcttgtgtttggtggtggggaggactgcacagttcgcatttggagcatcaaaacaggcgagctaatctttgtgcggagcatggcagacagtcccttcacgacatcttgttggcccaaaagcagccatggcttgtagtccttggctgtttgatgtaaaccacagctgggaagtcagacatcacctagagctagggtgtccattcttgacatgtttctcttagtgataggtggatactgtctaggtaggaacagagtcttgagggattgatgggcgcatgcatcttcaattcctgtgtgttgtattactactggtacaatctccaatgcttgtgaacttatgtgtttggactgtgaatttgtgatatgaacatatatcaatatgtttaaaatctgtattgtttgtgatattctgtgttgcatgtgatattatgtgtgtctaatttttaatttctgtattttttatttttttctggaaaag

SEQ ID NO: 20875 - DNA, 2575 bp, Zea Mays
ctacctgcccgccgccgccgccctgcgcgcgccccgccgccccaccgcgcgccacccagcacgccaccacccagcgcggcccgccctcaccaccccgcggccccgccgccgccgccagcgcctagccacgcgcgccccaccctcgccaccccgcggccccccgccgccgccagcgcctagccgtgcgcgccccgccgccccatcgcgcacctgctagcgcgccgcccagcacgtcgcccgccctcgccaccccaaccgccgccgcagccgccgcccgatgtgccctcgtgcacgagacctctcgaaccctctcagaaggcggtgcgatccggtttgggtcgccgtgccgagcccaatgtgcccgacgcgcgcgcggctgagtcaaagccgaaactggcgctcggagacgacgatgataggccgccccttgaggagaagcaccgctgcagcggtgagggcggattcatcttcctctgcgcccttgttggacacaccgaggctatcggtgggatttctatgccgtctggttcgaacaagctctactccggcagcgtcgacggatctgttcgcatctgggactacaattccggcaaggctaccaacaatctctttgattatggacgagtaacgggctgcttccacggaggttccagtgaggaggttgtcattgttcgtggtggttcatgtgctgattagcaatgtgtgcaccctatggaaccaaccataaccgaatggtgactcctaattttttctgattggttgtgcctaaatcaccaatcgtcagcggatttcttatgattagttgggtgatcctgtgctcctggtttggattggatgttatctgtcaggctagccttgttgctatatattggaggctcttcgcctgattcggttacccgtttgcctgggatcagtttgtggcgctatctggttggttgtcacttggttgatacatatgattgcatgatctgcaagtgaatcttcagagattacaactatctcattagtggatagtcatgcatttatgtaaaaatatagcaatgagaaaaaggaacaaagtaaagaaaaagagaaaatatagatggagatatgtgggagtatatccaagaggatggaaaaaatataatttgttatcatattacaatttttgttcttaatgtttctgcaatagtgtgttgatgtcatcaagatgggaggcaaggttagctgcatgatcacccatggcccatgggtactcattggaattccaaagtttgtggaggcattgaacacaaagacagggatgaaactaagatttcaagggccttctagtctagtttgttccatggctatcacgaatgagatgttgtttgctggtactggagatggtcgcatcatggcctggagatttcctgctaaggatagtaacactgaaccagtgttgatcctcagtggccatcaacggccagtgatttcactgtctatcttggcaagaagactttactctggctcacttgacaagtccatcaaagcatgggaccttacaactcggcagtgtgtccaaacactctctgagcataaagcttctgtaacatctgtgctttgttgggatgagaagttattatcttgctcccttgacaagactgtaaaactctagactctgtcagagtctggaaaccttcaagtcaaatatgcccatgccgaggagaatggtttgcgcacactcttcggcatgcaccgagttgggaagacaccagttctcttctgctccctccacaacagcaattgcgtccgcttgctcgacttgccatcaaatgcaggctgccaagaggcaaacagttgctactggatcaccgaccccagggcgcactgcatgggttggcaagggaacagtaacagcactaatgataatctgcaaaatgaagacgcaaatgatgcttctaggtggcccatatccctggtgctttgttctttgatgttgatggaatatccgacagaacatctagtttaccacacatgctgccatctgaaaaggcattttcagttgctgtatctgctcttggcatctacaacaaagatgggatagtagtttatgatggaaaggggatgttcagtgctgcttgtgtttggtggtggggaggactgcacagttcgcatttggagcatcaaaacaggcgagctaatctttgtgcggagcatggcagacagtcccttcacgacatcttgttggcccaaaagcagccatggcttgtagtccttggctgtttgatgtaaaccacagctgggaagtcagacatcacctagagctagggtgtccattcttgacatgtttctcttagtgataggtggatactgtctaggtaggaacagagtcttgagggattgatgggcgcatgcatcttcaattcctgtgtgttgtattactactggtacaatctccaatgcttgtgaacttatgtgtttggactgtgaatttgtgatatgaacatatatcaatatgtttaaaatctgtattgtttgtgatattctgtgttgcatgtgatattatgtgtgtctaatttttaatttctgtattttttatttttttctggaaaag

SEQ ID NO: 20876 - DNA, 2591 bp, Zea Mays
ctacctgcccgccgccgccgccctgcgcgcgccccgccgccccaccgcgcgccacccagcacgccaccacccagcgcggcccgccctcaccaccccgcggccccgccgccgccgccagcgcctagccacgcgcgccccaccctcgccaccccgcggccccccgccgccgccagcgcctagccgtgcgcgccccgccgccccatcgcgcacctgctagcgcgccgcccagcacgtcgcccgccctcgccaccccaaccgccgccgcagccgccgcccgatgtgccctcgtgcacgagacctctcgaaccctctcagaaggcggtgcgatccggtttgggtcgccgtgccgagcccaatgtgcccgacgcgcgcgcggctgagtcaaagccgaaactggcgctcggagacgacgatgataggccgccccttgaggagaagcaccgctgcagcggtgagggcggattcatcttcctctgcgcccttgttggacacaccgaggctatcggtgggatttctatgccgtctggttcgaacaagctctactccggcagcgtcgacggatctgttcgcatctgggactacaattccggcaaggctaccaacaatctctttgattatggacgagtaacgggctgcttccacggaggttccagtgaggaggttgtcattgttcgtggtggttcatgtgctgattagcaatgtgtgcaccctatggaaccaaccataaccgaatggtgactcctaattttttctgattggttgtgcctaaatcaccaatcgtcagcggatttcttatgattagttgggtgatcctgtgctcctggtttggattggatgttatctgtcaggctagccttgttgctatatattggaggctcttcgcctgattcggttacccgtttgcctgggatcagtttgtggcgctatctggttggttgtcacttggttgatacatatgattgcatgatctgcaagtgaatcttcagagattacaactatctcattagtggatagtcatgcatttatgtaaaaatatagcaatgagaaaaaggaacaaagtaaagaaaaagagaaaatatagatggagatatgtgggagtatatccaagaggatggaaaaaatataatttgttatcatattacaatttttgttcttaatgtttctgcaatagtgtgttgatgtcatcaagatgggaggcaaggttagctgcatgatcacccatggcccatgggtactcattggaattccaaagtttgtggaggcattgaacacaaagacagggatgaaactaagatttcaagggccttctagtctagtttgttccatggctatcacgaatgagatgttgtttgctggtactggagatggtcgcatcatggcctggagatttcctgctaaggatagtaacactgaaccagtgttgatcctcagtggccatcaacggccagtgatttcactgtctatcttggcaagaagactttactctggctcacttgacaagtccatcaaagcatgggaccttacaactcggcagtgtgtccaaacactctctgagcataaagcttctgtaacatctgtgctttgttgggatgagaagttattatcttgctcccttgacaagactgtaaaactctagactctgtcagagtctggaaaccttcaagtcaaatatgcccatgccgaggagaatggtttgcgcacactcttcggcatgcaccgagttgggaagacaccagttctcttctgctccctccacaacagcaattgcgtccgcttgctcgacttgccatcaaatgcaggctgccaagaggcaaacagttgctactggatcaccgaccccagggcgcactgcatgggttggcaagggaacagtaacagcactaatgataatctgcaaaatgaagacgcaaatgatgcttctaggtggccatatccctggtgggcccatatccctggtgctttgttctttgatgttgatggaatatccgacagaacatctagtttaccacacatgctgccatctgaaaaggcattttcagttgctgtatctgctcttggcatctacaacaaagatgggatagtagtttatgatggaaaggggatgttcagtgctgcttgtgtttggtggtggggaggactgcacagttcgcatttggagcatcaaaacaggcgagctaatctttgtgcggagcatggcagacagtcccttcacgacatcttgttggcccaaaagcagccatggcttgtagtccttggctgtttgatgtaaaccacagctgggaagtcagacatcacctagagctagggtgtccattcttgacatgtttctcttagtgataggtggatactgtctaggtaggaacagagtcttgagggattgatgggcgcatgcatcttcaattcctgtgtgttgtattactactggtacaatctccaatgcttgtgaacttatgtgtttggactgtgaatttgtgatatgaacatatatcaatatgtttaaaatctgtattgtttgtgatattctgtgttgcatgtgatattatgtgtgtctaatttttaatttctgtattttttatttttttctggaaaag

SEQ ID NO: 20877 - DNA, 1105 bp, Zea Mays
cacaaacccaatacacgtttctttaccctgaacttttcgctactccatcgagggcagagccgccgccgtttcttcaatctcgcagcgccggcgcttcatcttccctcccttttttactcgcgatcggcacgcaggcggcggctgcggcgctcaggctcgggctctgcgactgcgtcagcggcttcccctccggcctctcgccagtcaccgcgcgccctcggccccggtcctctgcacaccggccggtgaccctgcgtgcttgcctttctcctcccgcctccggtggatcgtcaacggcgcccggccccggcggcagcgctgcgcgcgtctcgagggcagcgggagccagcagccgctgctccaccaaggcggaagcattttggaaccctgaactctgggctttaagaagacactactgctgcaaccatgagcaccatgaagttttgtcgcgagtgcaacaacattctgtaccccaaggaggacagggacaggcgcaccctgttctttgcatgtcgcaactgcgagcatcaggtgcaccatactgctggggagcgaacacaggtcttgcaggatgtagcttctgatccaactcttcccagaaccaagactgtccgctgcaatctctgtgggcatggagaggctgttttcttccaggccgcagcaagaggggaggaggggatgaccctgttctttgtgtgctgcagccctgattgtggtcatcggtggagggaatgatgcgatgaaatcttcgctctaatagttgtttcatcagagcatgaaacttaacttgttttgtagttttcttggactatgtatttcgaatctgacctaagattaatgagagaatgtctttccaatattttatttaattctacgcatatatgatatgtagctgcaccacatagtacgtagtctcatatgcttgttctgccccaaaactccgaggaggagcaaagaaggtattcttaatgagttaggaggtgtttggttagctctgcctagagttttcctacggatcaatgccaaacaccccataaattggagactcacatactgctctcctaaatgggagactctttgctttatgtacattttttccctcttc

SEQ ID NO: 20878 - DNA, 801 bp, Zea Mays
agataagtaacttcagcagtggttttaaacccccaggtggaagggagcgacacttggggctttaagaagacactactgctgcaaccatgagcaccatgaagttttgtcgcgagtgcaacaacattctgtaccccaaggaggacagggacaggcgcaccctgttctttgcatgtcgcaactgcgagcatcaggaggtctctgacaataactgtgtctatcggaacgaggtgcaccatactgctggggagcgaacacaggtcttgcaggatgtagcttctgatccaactcttcccagaaccaagactgtccgctgcaatctctgtgggcatggagaggctgttttcttccaggccgcagcaagaggggaggaggggatgaccctgttctttgtgtgctgcagccctgattgtggtcatcggtggagggaatgatgcgatgaaatcttcgctctaatagttgtttcatcagagcatgaaacttaacttgttttgtagttttcttggactatgtatttcgaatctgacctaagattaatgagagaatgtctttccaatattttatttaattctacgcatatatgatatgtagctgcaccacatagtacgtagtctcatatgcttgttctgccccaaaactccgaggaggagcaaagaaggtattcttaatgagttaggaggtgtttggttagctctgcctagagttttcctacggatcaatgccaaacaccccataaattggagactcacatactgctctcctaaatgggagactctttgctttatgtacattttttccctcttc

SEQ ID NO: 20879 - DNA, 1115 bp, Zea Mays
taattctgacaacatactagggtaatcacaatagttaacacacaagtaccaacgatacagaaaactagatttgtggccttagcatgaccattggtccattagctcgacaaaagcatcattaagtaaagtaacaattgcatataacaaaatatgacatctccaaacatagcagcaacagggggctatgctcctgcactatctttcattactgcctaaaaaatgaaaacagcgatatattcatatgtataacattcctggtccatgccgcacgcaaatacacaaaggaaacaatgcatcaagtccaaacaaagtcctttattgacctgagtaacaattggcccagaatttcagaacagcaacgtccagccattttgcattgataaacacttaaaaattacagctcagccattgcacaaatgctaagtccaatgttttcaacatcgcaatcacaacagtttgactccagcttctctgactgaatctataacggccttcactttcccatggtacttttgttctctcttcatgtggatggacactgcaggtattcccttgaggagcaggcgctcgccgagcaactttccaatctttgcagctgctgcgacgtcgcgggtcgactccatgtttggtctcaacagcttctcctgcgagcttgcagaacatgcaacagttgctgttggggtgtggacgacctgagcagatacatacttgtttgagaaatgcatcctcaacaggtagggcttgaggaaacgggtgactctagctgcccttgctggtggagggatcaccatggctcctggtctctccgctgcaagtgaacaggagcaacaaaggcttattggctagagaagcacagcatgactgcatttcctataataaccctgtgggaacaaatacagagtagagaagtacaacagtgtacaaaccagtctcgaagcagtaaattcgtaacacatcatcacggattctgtggctagccgctagcagaccacggggctgcgaggctggccggggacgcggcaggcggcggcgcgacgagggtggagtgacgaatcggagttggagcagggtttgcaaaaggaaatcgttgggctgagccgtagtatcatcacata

SEQ ID NO: 20880 - DNA, 1936 bp, Zea Mays
taattctgacaacatactagggtaatcacaatagttaacacacaagtaccaacgatacagaaaactagatttgtggccttagcatgaccattggtccattagctcgacaaaagcatcattaagtaaagtaacaattgcatataacaaaatatgacatctccaaacatagcagcaacagggggctatgctcctgcactatctttcattactgcctaaaaaatgaaaacagcgatatattcatatgtataacattcctggtccatgccgcacgcaaatacacaaaggaaacaatgcatcaagtccaaacaaagtcctttattgacctgagtaacaattggcccagaatttcagaacagcaacgtccagccattttgcattgataaacacttaaaaattacagctcagccattgcacaaatgctaagtccaatgttttcaacatcgcaatcacaacagtttgactccagcttctctgactgaatctataacggccttcactttcccatggtacttttgttctctcttcatgtggatggacactgcaggtattcccttgaggagcaggcgctcgccgagcaactttccaatctttgcagctgctgcgacgtcgcgggtcgactccatgtttggtctcaacagcttctcctgcgagcttgcagaacatgcaacagttgctgttggggtgtggacgacctgagcagatacatacttgtttgagaaatgcatcctcaacaggtagggcttgaggaaacgggtgactctagctgcccttgctggtggagggatcaccatggctcctggtctctccgcagtctcgaagcagtaaattcgtaacacatcatcacggattctaaaaacaaggatccaaacagtatgtcagtgtgtaggaccaacacaaaaggtgtggagttatttgtttttcaaccctgctgacagggtgaaaatgcatgagaaagttataagctttataggacaaaaaagaaacaattatagcatccaactaaggcacaaatggatatttgatctgaggtagaactaggaaagtctcctgcttaaaatagctagctgactattccacttcaaccggatagataaaaccatctatgaaagaaaacaatatcttttatctgttatatgcaacaacattttctgttatgcaattatttggacaaattgccagggcagtgacctggtaatcaatttaggaggcacagggaagcttatctgatgaatcagccatgtaggaaaataaatcacatgatctaaaacttaatcggccttggactcagcagaacggcgccagccacagcaacaaaatgcacactaaagatcatcactcaccctaaaaatggtgccagatatgtagggtacaaagagagcagatttaatggtatccaacacatggagggagctgaaccttagagtattcgattcatgcatgttacttgtttttcttaagttttagcaagatgaaaaaatatcattccatgaaacagagtattttgaaggtactgagtacagagtacaagaacaatgtgttccagcacttgaaggcttagcggcttctcatccacatgtgttcaagcacttgattcatggcagacaccaccaccattccgcaaagcatgacagactaggaccgaaatcatagagggggtatctcatcttcaaaccaaaccagcaagatcatccatcaatgcattcgattcgattcaaggatttgaataataaactcatgaaccagcgtatctaataagaaacgcaccaagaagaggaggaggcgcccaacctgtggctagccgctagcagaccacggggctgcgaggctggccggggacgcggcaggcggcggcgcgacgagggtggagtgacgaatcggagttggagcagggtttgcaaaaggaaatcgttgggctgagccgtagtatcatcacata

SEQ ID NO: 20881 - DNA, 980 bp, Zea Mays
taattctgacaacatactagggtaatcacaatagttaacacacaagtaccaacgatacagaaaactagatttgtggccttagcatgaccattggtccattagctcgacaaaagcatcattaagtaaagtaacaattgcatataacaaaatatgacatctccaaacatagcagcaacagggggctatgctcctgcactatctttcattactgcctaaaaaatgaaaacagcgatatattcatatgtataacattcctggtccatgccgcacgcaaatacacaaaggaaacaatgcatcaagtccaaacaaagtcctttattgacctgagtaacaattggcccagaatttcagaacagcaacgtccagccattttgcattgataaacacttaaaaattacagctcagccattgcacaaatgctaagtccaatgttttcaacatcgcaatcacaacagtttgactccagcttctctgactgaatctataacggccttcactttcccatggtacttttgttctctcttcatgtggatggacactgcaggtattcccttgaggagcaggcgctcgccgagcaactttccaatctttgcagctgctgcgacgtcgcgggtcgactccatgtttggtctcaacagcttctcctgcgagcttgcagaacatgcaacagttgctgttggggtgtggacgacctgagcagatacatacttgtttgagaaatgcatcctcaacaggtagggcttgaggaaacgggtgactctagctgcccttgctggtggagggatcaccatggctcctggtctctccgcaagaagaggaggaggcgcccaacctgtggctagccgctagcagaccacggggctgcgaggctggccggggacgcggcaggcggcggcgcgacgagggtggagtgacgaatcggagttggagcagggtttgcaaaaggaaatcgttgggctgagccgtagtatcatcacata

SEQ ID NO: 20882 - DNA, 1760 bp, Zea Mays
aaacggaaacccattttagcgtaaacagagtaacaaccgcgagccctacatgtttacgctattccattcttccgtttatacataatagtgatttagcataactactccagccgacccacgttccagaaataaaggaatgagcccactaccccacttcccacgcggtcaaacacttctataccctaacccccgcgcggtcaaccatcctggccgactcgccgcgtttcttcagcggtcgcctgggcgattcttgttcatccgccgccgccagcccgtttcgccgtcctccaccgccgcacgccctcaacattaatcgccgccgccgttgacagcatcgtcgagccgctgccgttgtcaatcttgcgcgccccgcgtcacattggctcacgtccgcggtcgctatgtcgtccggattccaagtgtgaatcgccttcatttgtctccgcgcgaactcaaccctaatcggcgccgccgttgacagtgtcgtcgagccggccgctgctgtcaatcctccgccaccgcgtcctataggttgctgtttcaacaatgtggaaggttgatcaacccccaaccaatccgaagcgtttaatcattgagtcaagtcaagaatgtttcagtgttgacattccacgctcgactgacatggcagaccctacaaatacgccgtctgatggtgatcctccgcagcatagaaagacgggcgttgcagctgctgctaaaaacattgttatgcctaatgtggatgatgatgatgactttgagccacccaaaaagaagtgcaatatctcaatggatgccccaaataagacgcagtgacttatgtgaggctgcccagagatggcacaacaggagcattaacaatgtgtcggcgacgatatatggttgttccatcattgttcttctgtattatttggatcatttgcatcatgctgctgctccaaacaacaaaaatggcactccacgcataaagtattttaataagaatattataagggcgttgtcaatggccgataagcggaagcctcgccagggtggtgaaccatttggtgtttgcccttttcgtagcagcagtgagacatgttacgtctcaaaatcgccaactacttgccagattgagattcagatgcttcctgtacatcaacgccagaagttccaagctacgttgattgattatgacttagaggttggcaaaatatttgcctctatcaagcaatgtttgaatactattggtacaaagcagtccaatctagctgctacatttggagaattgattgatgaggttcttcgggccgatgaatctgttacaccaaatactcaaggtcagacagtggtaggtggcacagttgaaaatgattctggaccagtatttgacaagactcctattgggagtgtttctgcaccaggtctcttcttatctgaattagaatgtgctcgcgctcttcgagcatacttgtgttctaggttcattgaattggacaggtacataattttcaatttctttgacttggcatattttttaattctttttaattctgattgaacaacatcgtggcaatggtattgatactattaagttttattcaatctttgcacccaaatatttagcattgaatagaagcgaaagcaaaatagctatacacatgactgaactttgagttgtagcttctatagaacattgccttgagcatccactttccttctgtcagctccaacagcaggctgtgccagacattccaaagtcaaaaacagcaagtttacat

SEQ ID NO: 20883 - DNA, 1718 bp, Zea Mays
ggtgcattgcacctgcacctgctgcacatgcacatgcacgcagcagggccgaaacgaaacgaaaggaacgtgctgggtcgtctccttctccatttgcctcttggcttccttgggcagcccccctgtccctgcccaccccacgacagcccaaagccccaaacccaaccccggcacacagactgcagcccgctacatacaaaacgagctggtggcttggcctctcctccaccagtggcagtggcagtggctggccacccaatcgtctcgttcgtcatctacctctccctcctccaacccaagctaagctaaacagcttacacagcttgctccgccatcaccgtatcgagagagacagagacaggctagcgagggaatggagaggatgctggccaggctgatgcggcggcggagctccgtccccctgtccggcctcctccaccacggaggagcgcccgccccgctgcaggccgccggcgccactggggcctccccgctgatcttgtcgcaccagcagcagcagcagcacacggccgcctccgccgtcctgccggggctcaagatcagggactccgcgtcccagctgatcgggaggaccccgatggtgtacctgaacaaggtgaccgaggggtgcggcgcccgggtggctgccaagctcgagttcctgcagccgtccttcagcgtcaaagacagaccggcgatctcgatgctggaagacgctgaaaagagggggctcatcactccaggaaagaccacgttgatcgagcccacgtcggggaacatgggcatcgggctggcgttcatggcggcgctcaaggggtacgagctcgtgctcaccatgccgtcctacaccagcctggagaggagggtgacgatgcgggcgttcggcgccaacctggtgctgaccgacccggccaaagggatgggcgggacggtgaggaaggcgacggagctgtacgagagacatcccagcgcgcacatgctccagcagttccagaaccctgccaacgtcaaggtgcactacgacacgacgggaccggagatctgggaggacacgcttggccaggtcgatatcttcgtcatggggatcgggagcggcggcaccgtcacgggagtcggcaagtacctcaaggagaaaaaccctaacgcaaagatctatggagttgaacctgccgaggcaaatgttctgaatggtggaaagccaggacctcacctcatcactggaaacggagtagggttcaagccagatattctggacatggacgtgatggaaaaggtgctcgaggtgaaaggtcgggatatcatcgggagccaacaccgttgctgctctcgagctagccaagaggccggagaacaaggggaagctcatcgtgaccgttcttccgagccttggcgagcggtacctgtcgtccgcgctgttcgatgagctgaggaaggaggcacaagccatggaaccggtcgcggtggattgatctcgccggtcaagctagctagcctgccgggcacgctggagatctggttcctatcgtcacagctgccagccaagccaattgtacttccattcccccctcatccagttttttattttattttaccgtcagtgtgtcacctcatctatgaaccttgcgaaaaggaaaaaaaaagtgcatgaataatgatgggaaaatgttgaaagagagataaggttagtctctagccatttgagatggccattatttctt

SEQ ID NO: 20884 - DNA, 13836 bp, Zea Mays
ttttgtacctttttttgctggatagatcaaatatataaaaaaggatgatatgaaattcagaattgcatggaagcctaaaccatatcaaagcacaagatcgtaactaaccttgtgcccatccagagccgcataataaaggtcaactaatttaatcatgttttccacgattgacttcttctcatcttgatcgactccttctgttaataatcggtccatatgtgctaaccaacagtcaggcgctaaaccttttgtgtaactgtaaggagggacagccaaacatgtattccatcagaccaacataacaaaaccaaaaagattctgcgtgtagaattatgtaatggttaatatattgataggatgtcaaggacttcgatatgtcggcccagcaacaggagaccaatgtgcctgaaggacgcacacatcgtgttcgacgcagcaaccctcgcgtgtatgggccggagtgggtctagagtccagttggtctggtgtaggcacgacctgggatatataatccttgtactgtgcctgaggacggcaagcaaaaacatattccggtaataatagactgcctagcctcctccgtcttcctccgtctctctctctgcttgctgtgtgcttccattctgttagataggctaacatttggtatcagaagtccgtcgatccttggatctcgcatggcgaccacaggcgcagttgatgcccagctcaccctcgcgttggaatctcaaacgcgctccctgctgtctgaattggacaagcgcatccatgccatcgactccaagtgggcaaaccgcgtgggaatcctggagactcaagttgccgattccaccaagcgtttggagtcgttctccagggggatccatgaagacctggaggcccgtttggtgacagccgatgaagccgtggatgatcggatccgctatctggagacgattcgcgccgacatcgcgcagatcgtgacccaacaaccttccaacagccgttccggcgggttcggcgcagccggcatcctcggaacccccagatcggtgattgggcgttcccctgctaccttcgacaacaccgattgctcacgttttgggcccggcgctgcaatctctcaccgggacagtggtattgggtataatcaacccaatttccgctgcccggtcacggttagggggtttgcccaagctttcatttcccaagtttgatggcactagcccaaaattatggcagaaacgatgcgaggattattttgctatgtatgccactgaaatcactgtttgggtcagagtagcgtccatgcactttgagggggttgctgggcgttggtttcagtctattgaaccacaagtgtcttcctggtcatggcaacagttttgtcaagctgtgcacgatcgttttgggcgtgaacagcacgagcttgttattcgcaagctgttccatatccgtcagacatcttcggtccaggattatgttgatcgtttttgtgaacttattgatgtccttgtcacctatgagcacactacagatcctttgtattataccatgaaattcattgatggcctccgtgacgatattaaatctgttatattggttcaacgccccagtactttggatactgcctgcgctcttgctttgttacaggaagaggcagattcatcccggcgtcgtgagcatcgtgggtcggagggtacgttcccagggcgttcatatccgaagttacctgctcctcctcctcccaggtgggataaatcgctgggaggggaaactgtcgccaccaagcctgtggtccctcagccgggttcttctactgacaagctcgcatcccttcgtgcttatcgtcgtgcccgaggaagtatgggatctgttgaatccggaactcaccggatcagaaggtgatttcgaagattccacggatcagttcatgatgttattgtcccgggaggccagttctccaaaaactgcatattctacgttcaaacttcaaggctcctctctgcagggtgtcgcctccctggctcagcccctatcagttagagttgctaatggaaatattataaattgtaccagtcacctctccaatgcggtttggtctgtacagaacattcagtttcagtcagacttcaagattataccgcttcccaactatgacttgattcttggtatggattggcttatccagtatagcccgatgcatgttgactggaaacacaaatggttatccattgaatttcaaggacaatctactgtcattcatggtcttcagccactagttccttcaggagccctgttgcaggtcagacaggtagcagccacacatgtaccctcatctgaattatgtcaagtgtctgaatctgatttgcctgcttcagtgcatcaattactgtgttcatatcaatccttattcgaggaacccaccacattacctccaagccgattttgtgatcacacaattcctttgattccgggtgctcgcccagtcaacatgaggccgtatcgtttttccccagcaatgaaagatgaggtggaagcacaggtcaaggatatgttacgcagtggtcttattcaacctagctctagtgccttttcgtcaccagttatattggttaaaaagaaggatcacagctggcgtttctgtgtggactataggcaccttaatgcacttacagtgaagactaaatacccggtacctgtgattgatgagctcttggatgaactatttggtgcttcctggttttctattcttgacctgcgcgcaggattccaccagattttgctcaaggctggtgaagagcacaagacggcattccaaactcatatgggacattatgaatttcgtgttatggcgtttggcctcaccggtgctccggtgcaaccttggaagaccatcttaaacatttacaacaagtgttcgagctgttgtccagagatgcctggaaggtgaagatgaacaagtgttcttttgcacaaaatcaggtttcttatttgggacatattgtgtctgctgctggtgtcgctacagatcctgccaaaatccaagctatagctgactggccaaaaccagcaaatgtcaaggaattacggagttttctgggccttgctggatactataggaagttcatccgtcactttgggatcatttgccatcccttgcatgggctgctcaagaagggagttgtatacgtttggacggacgatcattccacagcattccacaccttgaaagcagctctagcatcagctccggtgctggccttgcctgatttttcctctcagttcactattgaaactgacgctagttcttttggaattggtgctgtgcttatgcagaaagggcatccattatccttcttgagtaaagcactgggccctaaatgtcgcggactttcagcttatgagaaggaattcatggctattcttgtagcggttcagcagtggcgtcaatatttgcagcatggcgagtttattattctcactgatcaccagagtctgtcccagctcaatgagcaacggttgcatactccatggcagcataaggtgttcactaaactcttggggctccaatataagatcatctaccggcaaggccattccaatcgggtagcggatgcgttatcccgtcggatttctccagagattaatgctgtttcggaggtcgttccacaatggctcactgatgtccagaacagctatagtcatgatccggctgctcaatccttgatggccaaattagctttggatccttcggctgtgcctcactttactctcactaatggtctgctgcgttataagggtcgtatctggttggggaatgacaaagttctgcagcaacgactggtggctgctctccatacttcaccaattggaggccactctggcattcctgttacttatagtcgcctcaagaatctctttgcttggaaaaatatgaagaccacagtccaacaatttatacaaacttgccagatatgcttacaggcaaaaccagaccggtcagcataccccgggaaacttcaacccttaccagttccatctggggcctgggaaacgatcacaatggattttattgatgggctcccttcatcaggccatgccaactgtattctagtggttgtggataagtttaccaagtatgctcactttatccctttatcacatccttacactgccagctctgttgctcaagtgttctttgtcaacgtgtacaagctccatggtcttccttctgccattatctcagaccgggatccagtctttaccagcaacttctggcagcatctattcaaaatcactggaaccgatctgaaactcagctcgtcctaccacccccaaacagatgggcagaccgagcgtgtcaatcaatgtttggaaacctttttacgctgtttcaccagtgcttgtccaaaaaagtggaaggattggttgtctgcagcagagttttggtacaatacaagcttgcattcatccctcggttgttccccatttcaagcattgtatggccgacagcctaggacccttggtctcactatcaatgacgctgctccagcaagtttgtccgcttggctgcaggaacgctcagtgatgcaggagcttattcgtcagcatcttctgcgcgcccagtccagaatgaaacgacatgctgataaacacaggtcagagcgtacatttcaagagggcgattgggtatatctccggctccaaccatatgtccaagcttctgttatgccacgtgcacatcacaaactgagttacaagtttttcggtccctacaaaattctggacagaattggacaggtggcatatcgactggcattacctgcttccagtcgcattcatccggtggtgcatgtgtctcaacttaagctcgctaaaggattcaaagatccagaacctcttccactacctgatgatatcccagagatcagcgttccattgcagattattcagtcccgaggcatcaccaagggcagtcggctcgtgcaacaggtcctggtgtcatggtccgggcttcctgctgaattggcgacatgggaagatcgcgaagcacttcaacaatgttttccctttgctcctgcttggggacaagcaggtcttccagagggagggaatgtcaaggacttcgatatgtcggcccagcaacaggagaccaatgtgcctgaaggacgcacacatcgtgttcgacgcagcaaccctcgcgtgtatgggccggagtgggtctagagtccagttggtctggtgtaggcacgacctgggatatataatccttgtactgtgcctgaggacggcaagcaaaaacatattccggtaataatagactgcctagcctcctccgtcttcctccgtctctctctctgcttgctgtgtgcttccattctgttagataggctaacataggagatggggttacaatatatagactctcatgaaaccctaaccctaatgggccgacccccaacggtgccggcccacacacacagtctaatatccccctgcagtcgcaacaggggtaccacacacgatgagactggagtagaggccgaacataggagccgacgggttgaaatccccccgtagtcacagtgtcgtgagggtgcgaatgttgcgactggtgaagagaccggtgtggattccgagaaggcgatagcccctggatgctgagttagcccctggatgttcgagcgtcaacgatcggcgacacgacaaaagagcatcagcatgccaaccttcttgcttcttcgatcgttcggacgtcgaggagccccaccagggaggccgacggcagcacacgcgtctgcgccggtcatggtgtccgcgcccgcggcagaatagaagggaaacgacggatccggccgggatggccaaggcagtgacggatccggtcgggaagacgcgatcaggtcaaagggacgacggatcgagccgagaaggccgcaacaacgtggatctggccgggaaggccgcggcagcgacggaaccgacgaagagggaggcgcgcggcagggcagggccagccggacaggggcctgtggcggacctggtaggggagtttgacgccggcagcgagagaagcttgaagataagaggcgctgctgggcgtcgacgcaatcagggacaaggtagacagcgcgacgacggggactgcatagcgctggagtagaaggagagggagcggggaggccggcggggagggctgtcacgctgtagccgggaaagcgtgccagcgccgagcaggacaggggtcagccgcggcggccagagggaggagtccgacggctgggcgggcgcctgcgcgtgacgacggctggcagaggggagcgagagagggaatcagcggccagatccacgaccatggcggggaagagttcggcctgcctccgcggctgagcgcagcggcgctggagggcggacgtgggccgtaggcaggcgagcctggcccctgcccccgctgctgcactagaggcgcgcaagcaggcgagcccggccgccgctgccgccactccacgggagagcgcaggcaggtgggcccggccagcggcgctagagggcggacgtgggccgcaggcaggtggcccggccacctccgccgctgctccactagagggaggagggggacagctcgacatgcaagaaggccggtggcgcggcggttgggctggggccagcaaccaccggagacagagggcggggagagcgagtgcgcgacgtgcgagagcgaggaggcgagcaggaaggccagcgagaagagcacgagaagcaggatgaggagatcgagcgtggccgacgtgttgtctcacctaggttttggtcctatttggcgcaatctgatttccaatctgctggcttcttctactcaagtgttattgaatgggtatcctgggaatcatataaggcattgaagaggtcttcgtcagggagacccactttcccctatgctgtttgtgtcgatcatggatgttcttagcagtctctttagggctgctgaaagcaagggactgcttcatagcttagaaggagcaggagtccgaaataggctttccatttatgctgatgatgtgtgttagagggtaatgattgactattagggctaaccctagagggtagccatatagtgttttacatgggccacatgggcctagccatatactctaacacccccccgcagtctgaacatccgtcgcagcggagttgacagactggactcgaaaagaagaagtacatcacacaataggatccccccacagactcaactagccactacagatattgaggctggagcgaaactcggcgaaggtcgaggacggaagacccttagtgaagatgtcggcaaactgggaggtggttgggacgtggaggactcgaacatcactgacggcgaccagatctcggacaaagtgtaggtcgatctccacatgcttggtccgctggtgctgcaccaggttggtggagaggtagatggcgctgacgttgtcgcagtccgccacgccgttggccacgacacggtattccgcctctacgctcgagcgggagacgaccggctggcgcttcgacaaccaggacaccaggttgccgcctaagaagacggcgtagccggaggtggagcgccgagtgtctgggcacccggcccagtcagcgtcagtgtagacgaccagctcggaggaggtagaccggtaaagaagcagtccgtagtcgacgattccccggaggtagcggaggaggcgcttgagagccgcgaggtggggctcccgggggtcgtgcatatggagacagacctgctgcacagcgtaggagatgtccggcctggtgaaggtgaggtactgaagggcaccggcaagactcctgtagccggtggggtcctcgactgggtcacccgtggccttagagagcttggcctgcgtgtcgactggggtggagcagggcttgcagtcactcatctaagccagctccagaatgtcaagagtgtactgtcactggtgaaggaggagtcctgaggggcgaggctcagcagtgacccccaggaaatggtgaagcacgcccagatccttgaccggaaactcccgctgaagtgcgtcaacgaggcggcgaagaagtgacggactggaggcggtgaggacaatgtcacccatgtagagaagcaagtaggcagtctctgctccatgatggtggacgaacagagacgtgtctgacttggccccctctacacccttcggcttccgcacaccacctcttcttcgtcttcgtcacctgccactgctgctgtttttgttgccaccacgtcttctaccacctggcatcgtcgccttggtcaccccggacgcgatgccttgatgcagcttactcgtagtgcgactatcccatgtactagatcacatgatgagcatctttgtcatgcgtgccagttaggccaccatgttcgtcttcctttttcttcttcctcgcatgctactcatgcatttgatcttgtacattgttatttgtggacttcacctattaccagtatgtcaggctacaaatactatcttgtggtgcttgatgatttttctcattatgtgtggacttttcctttgcgtgccaagtctgaggctttccccgccctccgccacttcttcgcctgggtgtccactcagttcggcctcaccattaaggccgttcagtgtgacaatggtcaggagttcgataactccacctcccgcgacttctttctctcccacgggatgcagttgcggatgtcttgctcgtatacctcctcctagaacgacaaggctgagcgcatgatccgcacgaccaacgacaccatccgcactcttctcctccaggcgcacctaccggcacgcttctgggccaagggcctccacagatggttaaatgggaagatgatacaagattttgcccctgaagttgtctatatggtgggtagcagatccattacttcaagaactgttgctcaggcgctgcataactggcaatgggttagcgacattgtgaatcccttatcttttattgggctgcaacagtacttgcagctatggcatgctttaaatggagtagtgcttaaccaggaggaggatagacatgtgcgggtgcattcaggctctggaaaattctcctcacagtcttgttattcggcgttttttatgggagctatttcttttgagccatggaaaaggttgtggaagtcgtgggcacccccgaaatgcaaattttcgtttggttggcaataaggaataaatgttggactgttgataggcttcaaagaaaaggattaccgcacccggtggtatgtcctttatgtggccaagagcatgaaactatcttgcacctcttatgtatgtgcagttttgctagacaattttggcacgctatcttttcatctttgaggatgggccatctcacgcctaatagagatgtgggctcttttgctgagtggtggggcaaggtgcataggagagtgcccaaacaaatcagaaaaggtattcatagtatcattactctgggagcctggtgcttatggctccatcgcaataggtctgtttttgatggaacaagtccttccttgagcaccattcaaagactgcttatggatgaagtggagtgttggagtagggctggtgcaaagcaacttaaaagccttggtctcccagctgccttttctagcttttctagggccaggactatttctagcgcttaatgccgtgacaactgaggtcatcctattacaacatgagataaggatagagttttttccctgtttgtattaggtttctggtctttttttttcctgtgttcttttgccttgtttggacattgtattgtggtccattttggacctttctctctcttaatataatgatgtgcagctctcttgcgcgttcgagaaaaaaatgccttcctacacgacactttgactgagacattgtactgcagccaacccgtcggctttgtcaacacctctcaactgggtctggtctgcaagttgaactactctctgtatggcctcaagcaggcaccacgagcttggtatagtcgctttgcctcctacttgatctctctcaaattcatcgaggccaagtcggacacatccatgttcatccaatggtgggacgacgacaccgtctaactcctttttcggccctctccgacttctgagctagatgtctacaccaacaccgactaggctagctgcgtcaacatgtgccggtcaacatctgactacattgtgtttttgggcactagactcatctcatggtactcaaagcggtagcccgtggtctcccactccaacacggaggccaagtatcgagatatggccaatgacgtggtcgggacgtccttgctctgttaacttcttcatgagctccacagccccatcgcccgcgccaccctcgtctcctgcgacaacctcagcaagatctacctctccaatctcgtgcatcatcagcgcacgaagtacgtggatatcgagcttcacttcgtccgcgagcatgtcgccgacggtgatgtccgcgttctgaccacttcgcaatttgctgacatctacaccaaggggcttccttctactattttgattgagttttgttcccgcctcaacatatatacaggatagagttgtgactgtgagggggtgttagcgtaagtgttagggttgccatgtatacctttattgtaatgggctttagcccaaataactcatctattaatacatgtccaaccctgattagggttagggttttctcccactctaacaatatcaataatatgatgatggaatttatggtgatcataataaactaagcaaatttgggaaaggcaacaatgacatctttgggtgcccacaagccatatgatacggaatgcatccaatgtgtttcggttacaaggacactacatccaattgataaaatatacctagagtccgagttgaactgcacaatgaaggcaatgacgagaaataattcatttcaccagtccgcactacatattggactaacaaaaggcatgagcaatatgtaagtcattaaggcatgccattaaaagcatgattgtgccttttttatatttaagcatacaacttcacctagctttgcaaatatgcatgaatgtcacatagttgattgaataccttaaaataaattaaagatatgtaatttaatacaaattaaagaatgtttataaggtttagcaaaagtatttataaatgatgaaatcgtgcaaagcatactgatcaattcaaaaccaagtaacatcctatgaaaacaatgatatgaacatgattaataattgaagagatacaatacttgggtataaacatagtcgtcaagcattcattaaatagcactctttcgagaatcaattcatttaaatccccaggtttgctaagcctgtgctgggtctccttcagttttaatagttcaacccatggctcacttcgcttctcgaaagtctttagtaactgaaacatcattttttgccatcagaattgtagaactccttttgactagttaaaaaagaacaataatgtatattaatgtgcaaaaataatgctattgtgctagcacacagggggatgtaattctctaaaacaagaaatactaatgtaatatttaacttacaggaaaagtctagctagtctggcttgcccgatggtaagacaaggaagcaacccgctgctaaagagttatgatgttctacaaaaagttggtggtgtagtggcccgaggtgaagtactagacataggaagcacaacaatatcataaagtttgtttctgagagatgctactcaaccaataatttcatgtggcaacaagttgctcctaggtcagcacaagcctactcgcacttcgtatgtcatgcttttgttagttgttacacatgattgggtgagcgtgctgcagggcatgttttatataccatgtcatgcatcatcataatatttgtgggactctcactatctttctttgcactcctgctcttcatagggctagccattcctcttatcatctatcctctttctgacaacaatgttttttcttggtggctccctcaatgcttgaaccaagaaaacaaggctaagtttcatgctatggcatgtgtgactgctagaattagacgtacaatcctactaggccttgtaattgtagttttttctcgaatacgcaggagagttgtgtatcattatattaaaaaaagagaaacacccccacacacacactcacaaaacaccacctacatatacacggcccaacacacacacaaacaaacaaggagagaaactcctctaaccagggtcgaacaggtttcgtatatttttggcacctaccaagagccaaagctgcaactcatccctaaacccctcctcaagagaagataggcaaggtctctttccatgaaagacacacttttttatgtttccaaagctccatcctccaataatgataataccgttgaaaccttttcttttgcatttagggaccatatatgaagctttcctccaccagtccatgaagcaatcatcacctgtcttaggtacgacattattaagaccaattgaagataagatagcatgctaaaactgccttgcaaaaacacggttggttaatatatgttgtacagtttcttcctcttgatcacatagaacacaactatggggatgatccagcccccttttctttagccattctgctgtccaacatttattttttatggcaagtcatacaaaggtcttgcatatgggggccgcccaggtcctccatattcttttccatggttcaaaaggtagtgcacccctgaaaaaagctctgtatgcagacttggaacccaaaaaccccattaatgttatgtctccaaatatgtttatcatttgtatcttctacatgaaaattttctatgacatcccacagctatagatattgctcaatgcccgcaagagaaagattaccctgtatgtattggacccaagaaagagacgaaagggcctgctccacagtcctttccttttgaactttttagtaactgcagccacaatactcggtgctacatcttcaatagaggtcccatgaattcatttatctgtccaaatataagttgtgactccattaccaatattggtgattaaagctatccgaaataaggctctggcatggggtgagatattaagatcgaggccactccaaggcttagcagggcttgttttctgaaaccacaaccaaatcatttgcagagcccaactcataatgacgagatttggtattcgaaggcctcccaactcaataggcctagtaaccttctcccaagctataagacagtttcctcctcgagtctcttttctgccattccacaagaaatttctcctaattttgtcaagggcttaataacccattttggaacattgagggcaacaagcagatagactggtatggcagagagcacagatttaattaagattattctcctagataagtttaagagattagctttccaacctggaagcctacttgcaattttctaaatctatggaataagatcaccagaattgagtcttttattagttaagggaagacccttgtaagtcatgggaatactttttgaggcacaacctaaaatttgggcagccaactcctccattcatcattacaccgaatagtgtagaaaatgttagagcaactgtgtaccgatgggttgtgtttatgtaatggacgtagacccaactactctcattataaatacatctctcaaccctggttagggtcagggtttagggtttcagtctatctaacatggtaccaaggtcctcatcttgtcggaccttttcttctctctaatataaaagatgcgcaactctcctgcacgttcgag

SEQ ID NO: 20885 - DNA, 13840 bp, Zea Mays
ttttgtacctttttttgctggatagatcaaatatataaaaaaggatgatatgaaattcagaattgcatggaagcctaaaccatatcaaagcacaagatcgtaactaaccttgtgcccatccagagccgcataataaaggtcaactaatttaatcatgttttccacgattgacttcttctcatcttgatcgactccttctgttaataatcggtccatatgtgctaaccaacagtcaggcgctaaaccttttgtgtaactgtaaggagggacagccaaacatgtattccatcagaccaacataacaaaaccaaaaagattctgcgtgtagaattatgtaatggttaatatattgataggatgtcaaggacttcgatatgtcggcccagcaacaggagaccaatgtgcctgaaggacgcacacatcgtgttcgacgcagcaaccctcgcgtgtatgggccggagtgggtctagagtccagttggtctggtgtaggcacgacctgggatatataatccttgtactgtgcctgaggacggcaagcaaaaacatattccggtaataatagactgcctagcctcctccgtcttcctccgtctctctctctgcttgctgtgtgcttccattctgttagataggctaacatttggtatcagaagtccgtcgatccttggatctcgcatggcgaccacaggcgcagttgatgcccagctcaccctcgcgttggaatctcaaacgcgctccctgctgtctgaattggacaagcgcatccatgccatcgactccaagtgggcaaaccgcgtgggaatcctggagactcaagttgccgattccaccaagcgtttggagtcgttctccagggggatccatgaagacctggaggcccgtttggtgacagccgatgaagccgtggatgatcggatccgctatctggaggcgaacgattcgcgccgacatcgcgcagatcgtgacccaacaaccttccaacagccgttccggcgggttcggcgcagccggcatcctcggaacccccagatcggtgattgggcgttcccctgctaccttcgacaacaccgattgctcacgttttgggcccggcgctgcaatctctcaccgggacagtggtattgggtataatcaacccaatttccgctgcccggtcacggttagggggtttgcccaagctttcatttcccaagtttgatggcactagcccaaaattatggcagaaacgatgcgaggattattttgctatgtatgccactgaaatcactgtttgggtcagagtagcgtccatgcactttgagggggttgctgggcgttggtttcagtctattgaaccacaagtgtcttcctggtcatggcaacagttttgtcaagctgtgcacgatcgttttgggcgtgaacagcacgagcttgttattcgcaagctgttccatatccgtcagacatcttcggtccaggattatgttgatcgtttttgtgaacttattgatgtccttgtcacctatgagcacactacagatcctttgtattataccatgaaattcattgatggcctccgtgacgatattaaatctgttatattggttcaacgccccagtactttggatactgcctgcgctcttgctttgttacaggaagaggcagattcatcccggcgtcgtgagcatcgtgggtcggagggtacgttcccagggcgttcatatccgaagttacctgctcctcctcctcccaggtgggataaatcgctgggaggggaaactgtcgccaccaagcctgtggtccctcagccgggttcttctactgacaagctcgcatcccttcgtgcttatcgtcgtgcccgaggaagtatgggatctgttgaatccggaactcaccggatcagaaggtgatttcgaagattccacggatcagttcatgatgttattgtcccgggaggccagttctccaaaaactgcatattctacgttcaaacttcaaggctcctctctgcagggtgtcgcctccctggctcagcccctatcagttagagttgctaatggaaatattataaattgtaccagtcacctctccaatgcggtttggtctgtacagaacattcagtttcagtcagacttcaagattataccgcttcccaactatgacttgattcttggtatggattggcttatccagtatagcccgatgcatgttgactggaaacacaaatggttatccattgaatttcaaggacaatctactgtcattcatggtcttcagccactagttccttcaggagccctgttgcaggtcagacaggtagcagccacacatgtaccctcatctgaattatgtcaagtgtctgaatctgatttgcctgcttcagtgcatcaattactgtgttcatatcaatccttattcgaggaacccaccacattacctccaagccgattttgtgatcacacaattcctttgattccgggtgctcgcccagtcaacatgaggccgtatcgtttttccccagcaatgaaagatgaggtggaagcacaggtcaaggatatgttacgcagtggtcttattcaacctagctctagtgccttttcgtcaccagttatattggttaaaaagaaggatcacagctggcgtttctgtgtggactataggcaccttaatgcacttacagtgaagactaaatacccggtacctgtgattgatgagctcttggatgaactatttggtgcttcctggttttctattcttgacctgcgcgcaggattccaccagattttgctcaaggctggtgaagagcacaagacggcattccaaactcatatgggacattatgaatttcgtgttatggcgtttggcctcaccggtgctccggtgcaaccttggaagaccatcttaaacatttacaacaagtgttcgagctgttgtccagagatgcctggaaggtgaagatgaacaagtgttcttttgcacaaaatcaggtttcttatttgggacatattgtgtctgctgctggtgtcgctacagatcctgccaaaatccaagctatagctgactggccaaaaccagcaaatgtcaaggaattacggagttttctgggccttgctggatactataggaagttcatccgtcactttgggatcatttgccatcccttgcatgggctgctcaagaagggagttgtatacgtttggacggacgatcattccacagcattccacaccttgaaagcagctctagcatcagctccggtgctggccttgcctgatttttcctctcagttcactattgaaactgacgctagttcttttggaattggtgctgtgcttatgcagaaagggcatccattatccttcttgagtaaagcactgggccctaaatgtcgcggactttcagcttatgagaaggaattcatggctattcttgtagcggttcagcagtggcgtcaatatttgcagcatggcgagtttattattctcactgatcaccagagtctgtcccagctcaatgagcaacggttgcatactccatggcagcataaggtgttcactaaactcttggggctccaatataagatcatctaccggcaaggccattccaatcgggtagcggatgcgttatcccgtcggatttctccagagattaatgctgtttcggaggtcgttccacaatggctcactgatgtccagaacagctatagtcatgatccggctgctcaatccttgatggccaaattagctttggatccttcggctgtgcctcactttactctcactaatggtctgctgcgttataagggtcgtatctggttggggaatgacaaagttctgcagcaacgactggtggctgctctccatacttcaccaattggaggccactctggcattcctgttacttatagtcgcctcaagaatctctttgcttggaaaaatatgaagaccacagtccaacaatttatacaaacttgccagatatgcttacaggcaaaaccagaccggtcagcataccccgggaaacttcaacccttaccagttccatctggggcctgggaaacgatcacaatggattttattgatgggctcccttcatcaggccatgccaactgtattctagtggttgtggataagtttaccaagtatgctcactttatccctttatcacatccttacactgccagctctgttgctcaagtgttctttgtcaacgtgtacaagctccatggtcttccttctgccattatctcagaccgggatccagtctttaccagcaacttctggcagcatctattcaaaatcactggaaccgatctgaaactcagctcgtcctaccacccccaaacagatgggcagaccgagcgtgtcaatcaatgtttggaaacctttttacgctgtttcaccagtgcttgtccaaaaaagtggaaggattggttgtctgcagcagagttttggtacaatacaagcttgcattcatccctcggttgttccccatttcaagcattgtatggccgacagcctaggacccttggtctcactatcaatgacgctgctccagcaagtttgtccgcttggctgcaggaacgctcagtgatgcaggagcttattcgtcagcatcttctgcgcgcccagtccagaatgaaacgacatgctgataaacacaggtcagagcgtacatttcaagagggcgattgggtatatctccggctccaaccatatgtccaagcttctgttatgccacgtgcacatcacaaactgagttacaagtttttcggtccctacaaaattctggacagaattggacaggtggcatatcgactggcattacctgcttccagtcgcattcatccggtggtgcatgtgtctcaacttaagctcgctaaaggattcaaagatccagaacctcttccactacctgatgatatcccagagatcagcgttccattgcagattattcagtcccgaggcatcaccaagggcagtcggctcgtgcaacaggtcctggtgtcatggtccgggcttcctgctgaattggcgacatgggaagatcgcgaagcacttcaacaatgttttccctttgctcctgcttggggacaagcaggtcttccagagggagggaatgtcaaggacttcgatatgtcggcccagcaacaggagaccaatgtgcctgaaggacgcacacatcgtgttcgacgcagcaaccctcgcgtgtatgggccggagtgggtctagagtccagttggtctggtgtaggcacgacctgggatatataatccttgtactgtgcctgaggacggcaagcaaaaacatattccggtaataatagactgcctagcctcctccgtcttcctccgtctctctctctgcttgctgtgtgcttccattctgttagataggctaacataggagatggggttacaatatatagactctcatgaaaccctaaccctaatgggccgacccccaacggtgccggcccacacacacagtctaatatccccctgcagtcgcaacaggggtaccacacacgatgagactggagtagaggccgaacataggagccgacgggttgaaatccccccgtagtcacagtgtcgtgagggtgcgaatgttgcgactggtgaagagaccggtgtggattccgagaaggcgatagcccctggatgctgagttagcccctggatgttcgagcgtcaacgatcggcgacacgacaaaagagcatcagcatgccaaccttcttgcttcttcgatcgttcggacgtcgaggagccccaccagggaggccgacggcagcacacgcgtctgcgccggtcatggtgtccgcgcccgcggcagaatagaagggaaacgacggatccggccgggatggccaaggcagtgacggatccggtcgggaagacgcgatcaggtcaaagggacgacggatcgagccgagaaggccgcaacaacgtggatctggccgggaaggccgcggcagcgacggaaccgacgaagagggaggcgcgcggcagggcagggccagccggacaggggcctgtggcggacctggtaggggagtttgacgccggcagcgagagaagcttgaagataagaggcgctgctgggcgtcgacgcaatcagggacaaggtagacagcgcgacgacggggactgcatagcgctggagtagaaggagagggagcggggaggccggcggggagggctgtcacgctgtagccgggaaagcgtgccagcgccgagcaggacaggggtcagccgcggcggccagagggaggagtccgacggctgggcgggcgcctgcgcgtgacgacggctggcagaggggagcgagagagggaatcagcggccagatccacgaccatggcggggaagagttcggcctgcctccgcggctgagcgcagcggcgctggagggcggacgtgggccgtaggcaggcgagcctggcccctgcccccgctgctgcactagaggcgcgcaagcaggcgagcccggccgccgctgccgccactccacgggagagcgcaggcaggtgggcccggccagcggcgctagagggcggacgtgggccgcaggcaggtggcccggccacctccgccgctgctccactagagggaggagggggacagctcgacatgcaagaaggccggtggcgcggcggttgggctggggccagcaaccaccggagacagagggcggggagagcgagtgcgcgacgtgcgagagcgaggaggcgagcaggaaggccagcgagaagagcacgagaagcaggatgaggagatcgagcgtggccgacgtgttgtctcacctaggttttggtcctatttggcgcaatctgatttccaatctgctggcttcttctactcaagtgttattgaatgggtatcctgggaatcatataaggcattgaagaggtcttcgtcagggagacccactttcccctatgctgtttgtgtcgatcatggatgttcttagcagtctctttagggctgctgaaagcaagggactgcttcatagcttagaaggagcaggagtccgaaataggctttccatttatgctgatgatgtgtgttagagggtaatgattgactattagggctaaccctagagggtagccatatagtgttttacatgggccacatgggcctagccatatactctaacacccccccgcagtctgaacatccgtcgcagcggagttgacagactggactcgaaaagaagaagtacatcacacaataggatccccccacagactcaactagccactacagatattgaggctggagcgaaactcggcgaaggtcgaggacggaagacccttagtgaagatgtcggcaaactgggaggtggttgggacgtggaggactcgaacatcactgacggcgaccagatctcggacaaagtgtaggtcgatctccacatgcttggtccgctggtgctgcaccaggttggtggagaggtagatggcgctgacgttgtcgcagtccgccacgccgttggccacgacacggtattccgcctctacgctcgagcgggagacgaccggctggcgcttcgacaaccaggacaccaggttgccgcctaagaagacggcgtagccggaggtggagcgccgagtgtctgggcacccggcccagtcagcgtcagtgtagacgaccagctcggaggaggtagaccggtaaagaagcagtccgtagtcgacgattccccggaggtagcggaggaggcgcttgagagccgcgaggtggggctcccgggggtcgtgcatatggagacagacctgctgcacagcgtaggagatgtccggcctggtgaaggtgaggtactgaagggcaccggcaagactcctgtagccggtggggtcctcgactgggtcacccgtggccttagagagcttggcctgcgtgtcgactggggtggagcagggcttgcagtcactcatctaagccagctccagaatgtcaagagtgtactgtcactggtgaaggaggagtcctgaggggcgaggctcagcagtgacccccaggaaatggtgaagcacgcccagatccttgaccggaaactcccgctgaagtgcgtcaacgaggcggcgaagaagtgacggactggaggcggtgaggacaatgtcacccatgtagagaagcaagtaggcagtctctgctccatgatggtggacgaacagagacgtgtctgacttggccccctctacacccttcggcttccgcacaccacctcttcttcgtcttcgtcacctgccactgctgctgtttttgttgccaccacgtcttctaccacctggcatcgtcgccttggtcaccccggacgcgatgccttgatgcagcttactcgtagtgcgactatcccatgtactagatcacatgatgagcatctttgtcatgcgtgccagttaggccaccatgttcgtcttcctttttcttcttcctcgcatgctactcatgcatttgatcttgtacattgttatttgtggacttcacctattaccagtatgtcaggctacaaatactatcttgtggtgcttgatgatttttctcattatgtgtggacttttcctttgcgtgccaagtctgaggctttccccgccctccgccacttcttcgcctgggtgtccactcagttcggcctcaccattaaggccgttcagtgtgacaatggtcaggagttcgataactccacctcccgcgacttctttctctcccacgggatgcagttgcggatgtcttgctcgtatacctcctcctagaacgacaaggctgagcgcatgatccgcacgaccaacgacaccatccgcactcttctcctccaggcgcacctaccggcacgcttctgggccaagggcctccacagatggttaaatgggaagatgatacaagattttgcccctgaagttgtctatatggtgggtagcagatccattacttcaagaactgttgctcaggcgctgcataactggcaatgggttagcgacattgtgaatcccttatcttttattgggctgcaacagtacttgcagctatggcatgctttaaatggagtagtgcttaaccaggaggaggatagacatgtgcgggtgcattcaggctctggaaaattctcctcacagtcttgttattcggcgttttttatgggagctatttcttttgagccatggaaaaggttgtggaagtcgtgggcacccccgaaatgcaaattttcgtttggttggcaataaggaataaatgttggactgttgataggcttcaaagaaaaggattaccgcacccggtggtatgtcctttatgtggccaagagcatgaaactatcttgcacctcttatgtatgtgcagttttgctagacaattttggcacgctatcttttcatctttgaggatgggccatctcacgcctaatagagatgtgggctcttttgctgagtggtggggcaaggtgcataggagagtgcccaaacaaatcagaaaaggtattcatagtatcattactctgggagcctggtgcttatggctccatcgcaataggtctgtttttgatggaacaagtccttccttgagcaccattcaaagactgcttatggatgaagtggagtgttggagtagggctggtgcaaagcaacttaaaagccttggtctcccagctgccttttctagcttttctagggccaggactatttctagcgcttaatgccgtgacaactgaggtcatcctattacaacatgagataaggatagagttttttccctgtttgtattaggtttctggtctttttttttcctgtgttcttttgccttgtttggacattgtattgtggtccattttggacctttctctctcttaatataatgatgtgcagctctcttgcgcgttcgagaaaaaaatgccttcctacacgacactttgactgagacattgtactgcagccaacccgtcggctttgtcaacacctctcaactgggtctggtctgcaagttgaactactctctgtatggcctcaagcaggcaccacgagcttggtatagtcgctttgcctcctacttgatctctctcaaattcatcgaggccaagtcggacacatccatgttcatccaatggtgggacgacgacaccgtctaactcctttttcggccctctccgacttctgagctagatgtctacaccaacaccgactaggctagctgcgtcaacatgtgccggtcaacatctgactacattgtgtttttgggcactagactcatctcatggtactcaaagcggtagcccgtggtctcccactccaacacggaggccaagtatcgagatatggccaatgacgtggtcgggacgtccttgctctgttaacttcttcatgagctccacagccccatcgcccgcgccaccctcgtctcctgcgacaacctcagcaagatctacctctccaatctcgtgcatcatcagcgcacgaagtacgtggatatcgagcttcacttcgtccgcgagcatgtcgccgacggtgatgtccgcgttctgaccacttcgcaatttgctgacatctacaccaaggggcttccttctactattttgattgagttttgttcccgcctcaacatatatacaggatagagttgtgactgtgagggggtgttagcgtaagtgttagggttgccatgtatacctttattgtaatgggctttagcccaaataactcatctattaatacatgtccaaccctgattagggttagggttttctcccactctaacaatatcaataatatgatgatggaatttatggtgatcataataaactaagcaaatttgggaaaggcaacaatgacatctttgggtgcccacaagccatatgatacggaatgcatccaatgtgtttcggttacaaggacactacatccaattgataaaatatacctagagtccgagttgaactgcacaatgaaggcaatgacgagaaataattcatttcaccagtccgcactacatattggactaacaaaaggcatgagcaatatgtaagtcattaaggcatgccattaaaagcatgattgtgccttttttatatttaagcatacaacttcacctagctttgcaaatatgcatgaatgtcacatagttgattgaataccttaaaataaattaaagatatgtaatttaatacaaattaaagaatgtttataaggtttagcaaaagtatttataaatgatgaaatcgtgcaaagcatactgatcaattcaaaaccaagtaacatcctatgaaaacaatgatatgaacatgattaataattgaagagatacaatacttgggtataaacatagtcgtcaagcattcattaaatagcactctttcgagaatcaattcatttaaatccccaggtttgctaagcctgtgctgggtctccttcagttttaatagttcaacccatggctcacttcgcttctcgaaagtctttagtaactgaaacatcattttttgccatcagaattgtagaactccttttgactagttaaaaaagaacaataatgtatattaatgtgcaaaaataatgctattgtgctagcacacagggggatgtaattctctaaaacaagaaatactaatgtaatatttaacttacaggaaaagtctagctagtctggcttgcccgatggtaagacaaggaagcaacccgctgctaaagagttatgatgttctacaaaaagttggtggtgtagtggcccgaggtgaagtactagacataggaagcacaacaatatcataaagtttgtttctgagagatgctactcaaccaataatttcatgtggcaacaagttgctcctaggtcagcacaagcctactcgcacttcgtatgtcatgcttttgttagttgttacacatgattgggtgagcgtgctgcagggcatgttttatataccatgtcatgcatcatcataatatttgtgggactctcactatctttctttgcactcctgctcttcatagggctagccattcctcttatcatctatcctctttctgacaacaatgttttttcttggtggctccctcaatgcttgaaccaagaaaacaaggctaagtttcatgctatggcatgtgtgactgctagaattagacgtacaatcctactaggccttgtaattgtagttttttctcgaatacgcaggagagttgtgtatcattatattaaaaaaagagaaacacccccacacacacactcacaaaacaccacctacatatacacggcccaacacacacacaaacaaacaaggagagaaactcctctaaccagggtcgaacaggtttcgtatatttttggcacctaccaagagccaaagctgcaactcatccctaaacccctcctcaagagaagataggcaaggtctctttccatgaaagacacacttttttatgtttccaaagctccatcctccaataatgataataccgttgaaaccttttcttttgcatttagggaccatatatgaagctttcctccaccagtccatgaagcaatcatcacctgtcttaggtacgacattattaagaccaattgaagataagatagcatgctaaaactgccttgcaaaaacacggttggttaatatatgttgtacagtttcttcctcttgatcacatagaacacaactatggggatgatccagcccccttttctttagccattctgctgtccaacatttattttttatggcaagtcatacaaaggtcttgcatatgggggccgcccaggtcctccatattcttttccatggttcaaaaggtagtgcacccctgaaaaaagctctgtatgcagacttggaacccaaaaaccccattaatgttatgtctccaaatatgtttatcatttgtatcttctacatgaaaattttctatgacatcccacagctatagatattgctcaatgcccgcaagagaaagattaccctgtatgtattggacccaagaaagagacgaaagggcctgctccacagtcctttccttttgaactttttagtaactgcagccacaatactcggtgctacatcttcaatagaggtcccatgaattcatttatctgtccaaatataagttgtgactccattaccaatattggtgattaaagctatccgaaataaggctctggcatggggtgagatattaagatcgaggccactccaaggcttagcagggcttgttttctgaaaccacaaccaaatcatttgcagagcccaactcataatgacgagatttggtattcgaaggcctcccaactcaataggcctagtaaccttctcccaagctataagacagtttcctcctcgagtctcttttctgccattccacaagaaatttctcctaattttgtcaagggcttaataacccattttggaacattgagggcaacaagcagatagactggtatggcagagagcacagatttaattaagattattctcctagataagtttaagagattagctttccaacctggaagcctacttgcaattttctaaatctatggaataagatcaccagaattgagtcttttattagttaagggaagacccttgtaagtcatgggaatactttttgaggcacaacctaaaatttgggcagccaactcctccattcatcattacaccgaatagtgtagaaaatgttagagcaactgtgtaccgatgggttgtgtttatgtaatggacgtagacccaactactctcattataaatacatctctcaaccctggttagggtcagggtttagggtttcagtctatctaacatggtaccaaggtcctcatcttgtcggaccttttcttctctctaatataaaagatgcgcaactctcctgcacgttcgag

SEQ ID NO: 20886 - DNA, 1219 bp, Zea Mays
caaggacttcgatatgtcggcccagcaacaggagaccaatgtgcctgaaggacgcacacatcgtgttcgacgcagcaaccctcgcgtgtatgggccggagtgggtctagagtccagttggtctggtgtaggcacgacctgggatatataatccttgtactgtgcctgaggacggcaagcaaaaacatattccggtaataatagactgcctagcctcctccgtcttcctccgtctctctctctgcttgctgtgtgcttccattctgttagataggctaacatttggtatcagaagtccgtcgatccttggatctcgcatggcgaccacaggcgcagttgatgcccagctcaccctcgcgttggaatctcaaacgcgctccctgctgtctgaattggacaagcgcatccatgccatcgactccaagtgggcaaaccgcgtgggaatcctggagactcaagttgccgattccaccaagcgtttggagtcgttctccagggggatccatgaagacctggaggcccgtttggtgacagccgatgaagccgtggatgatcggatccgctatctggaggcgagtacgatctcccgtgtcgcggtgctcgagtcgtcttctcaagccgttgagctctggcggccccaaatcgatgcgtcgattgacgggctctacgccaacatccagacgattcgcgccgacatcgcgcagatcgtgacccaacaaccttccaacagccgttccggcgggttcggcgcagccggcatcctcggaacccccagatcggtgattgggcgttcccctgctaccttcgacaacaccgattgctcacgttttgggcccggcgctgcaatctctcaccgggacagtggtattgggtataatcaacccaatttccgctgcccggtcacgggaatattctcattagtagacgaagctaagcttcggctaaagaagtgcacaaaggcgcttcgtctatgcgtaagcaacaaagatgatggctgaaagcagcaacttcgggagcaagcccagaaggggaggctaacgaacggcgaaggttgaaacttgcagagctgagaacaaagaaaatacattactgttctgatgtcatttgtaaacgacttatgtaaaaactgatgggaattattgtaaatctatactaaggcagttcatctcccctataaatagatgaacagtgtcctacataagatagcttttacaagggcc

SEQ ID NO: 20887 - DNA, 186 bp, Zea Mays
cccattttattacatttcacctctgttatgcattcttgtatgaagaccttccaattgttgacgccttcgatgcggtcgattgagaccctattgttgcttcctccttggagttgctgacagaggcataatcctgccttccggtaccatcctgtccacccgacgcactctatggggtggccagattat

SEQ ID NO: 20888 - DNA, 1095 bp, Zea Mays
gtcactcggccattatattatgaccgttggagcttctgacatttgggccaccggacagtccggtggtgcaccagacagtccctgttcactgtccggtgcgccttctggcgctgctctgacttctacgcgcactgtagcgcattaactgctcgttgcagacgaccgttggcgctgtgtagccattactctgctggcacaccagacagcccagtgaattatagcggagtggctcctagaattcccgaaggtggcaagttcagaagttggttccctggtgcaccagacactgtccggtggtgcatcagacactgtccggtggcacaccgcacagtccggtgcgtgagaccagggcacactttggttgtcttttgctctttttatttgaaccctttcttggtctttttattggtttgttgtgaacctttggcacctgtaaaacttataatctagagcaaactagttagtccaattaatttgtgttgggcaattcaaccaccaaaattcatataggaaaaggtgtaagcctatttcccttccaatctccccctttttggtgattgatgccaacacaaaccaaagcaaatataaaagtgcagaattgaactagtttgcataatgtaagtgcaaaggttgcttggaatgaaaccaataattatttctactagatatgcatggatgactttcttctaatttaaaattttggaccacgcttgcaccacttgttttgttttgcaatgttttggaaattctttttcaaaatcttttgcaaatagtcaaaggtatatgaataagattttgagaagcattttcaagatttgaaattttctcctcctatttcaaatgcttttcctttgactaaacaaaactcccccttaatgaaatcctcctcttagtgttcaagagggttttagatattaattttgaagatggtgtaccaattcgaaattatatcaaaaataagatactaatttcaaaatcttttcttaactcaaatttgaaagactacaatttgaaattggtggtggtgcggtccttttgctttgggctcatactttctccccctttggcatgaatcgccaaaaacggatacttgtg

SEQ ID NO: 20889 - DNA, 1936 bp, Zea Mays
aatatcgcggcatgctgagacaaaatgcagcgatcacttgagagaacgtccacaaaagatagcatatcagtatagtctcgtaatggatcacgactattaactgcgatacccgcgcgtgccgagcagctcaaccatgtgtgcaccatagtaggctctcggtttcgtcgcggcaccatcagtcgttagtcatgacaccattaccaaacgtaaccaacgagaattccacatagcataaatagatggagcccatgagagtatggctcagaaaatgtgactgaagttgaagcaaagattgttggcaaaagagcatcagatgagaacttttatttaactcagagaaccattttatgatcatcacggggattatcggccaaagattgatacgatatttaatatgaggaggagctgaccatgagatcaagatcattgagtttttagagacatgagagaactaaagacaacatcaacattcattgaaccaaatggatacatcgtttagagattaaattgatcacaacatcatgatcctcggaggaggggtatgagactgaccagaaatgagagatttaggcaaatcaacatccgatacttgagaacgggttatagcagataaccagataacggggcagaatcaataggggatttggttggtaaggcaaatatgatttacaagaaaaaggattaccaaatccaggcaaaaggagaggtaggcaaacaggatcagctggatgatcaacaggaatgttatgaagttttaggggcaagggtttatggaaagaaacatggccttgatagggtttgcgcaactagacaccaaacaacatttgttttgacacaacaagtgcacaaggagacttgggttggtctagcggtcaagctgtgggtgtctataagttgtgcaggtacaatttcaagtgtagaacacacaagggcaagagaataccaacacaagcatgatttttttttggaggtttcacttgctaaactcaaggttgtttggagggggaaatcttttcatgagcagaacagacaacattttttttgtaaaaagggttgaacattcagaataccacctagatagcaaggcaagagaaacacataacacaacctaacaagacttaccaatctgacacgaggtaagacatttctaacatagcagcacatcacattattcccaatttcttattattggaataaaggtgagagaagcatgttggtgcacaagagacaattatgcgacaatcatgatgcatgctcattctagtcgtcttctcagacctaactactttttgggtgctttctatagcatccttattaatattagtagtagcctttatggcctatataaatagccacctagctacccatctatttcctaaggcttcacgtcctaggtctatccttatcgtcctgatatctatccaactttggtttctaagtaagttttactttagaaaaggttggtaatcatgacttattgacttctctgtactggtattcgctccgataccagctgtggcggaactgcctgaattattccaacttaagtgcttaagccccgccttagaggctagaccacacttaaatgggaataacccgtcaatccctcggatctagtccgataaagccacttaaccaggatcgaataccactagctcacacgaaggtgaggcacagagaaatacaataaaacataataccacaatttaataagtatcattagtgattacattatcggagtttcagcaataataaccatgaattttaatgcagcggaaataactaacggagaaaaccgagtaacatggcgaagcctggccatgctactcctcctggtcctctcctgcggaagcagtaacccacttgaccatctatcccggtggcagggatggaggccaagtcacaccagcaacaaatcatcctaagaagtacctgc

SEQ ID NO: 20890 - DNA, 942 bp, Zea Mays
gtgtgtcttgttttatatgttcctttctctagtgattgcgatataggagtttcatagacattgatgcctaggtccgatttaaacttacgttgtcttggttgctcttgtgtggtcaataggagaacaaatgaatgattaaggtgagcgtagaaaatacgtgtacttgtcatatcgtatttaggttgcgtaaataaataaaatgtggccgtcttgttaatggtgttaatgatgaacgccgataacatacgaatagctagcgcttgcgtatagtcgttgcggtgtcttgcaattaaatgttagtttgctaccatgtatttatatagcttgtgatatttttcattgtattcatacatatgcatcctgcatctcaattaggaccgagaggtgacgaccgtgcgagtgatgtggtgtcaaccacaagatgcagtcggtggacgacccaaggaaggatggacttaaccagtggatgctcgccaagcgagtacctccccagcaaacactatctaagtgttaaaataaaggcaagccccggttttatgcataaccgttatatatgctattttactgcacttaatgtttgtaggcttgtactgtgcacttaagtgtaggagttgcctgaaaccctagttgcatgaactcaggattcccttttgagatggatactagtatgctaggtcgagtagctgctttactaattaaggatctcggtagaagtcgagtgatttttctagcactcgcgcgaggtcaggaattggttgtatccattttgatatcatactgatggtggtctgtggacaacggttccatggggatgcgttttctacgagacggaaattggaataaggattaaggtgtggtaccgtgagtcaagcgtttgaacgtactaaacacatatcgagaaatatggtaaatcggtaagcctagtacctgagtgaacctgcc

SEQ ID NO: 20891 - DNA, 5299 bp, Zea Mays
gttctactttcctctttatctaagaagctatgtttgcctgtgttagaagtcaatgaagatgctcatctgttcagtatggtgataggattctacactcttttcttatgctgcaagttgcaagatcaattctgatgtatgattgcattctgcagatgtcagaaaacaggcgcagaggaggaaggcgtgctcagcaggagcaggcagccccgcaggatgaggcaccccgtcagcaattgccacccccgatgaccatcgagcagatgttcctaatgcagactcaggcagttcaagccatcggtcactctctggccgccattcaacagcaacagcagcagccaccacctcagcctcagatgcctcagatgcctagagacaagcatgttgaattcatgagaggtcatcccccagtattcgctcactcttctgaccccatggatgctgaagattggctacgcactgtggagcgagagttgcacaccgctcagtgcgacgacagggagaaagttctgtatggtccccgtctgttgagaggagcagcctagtcttggtgggagtcctatctcgccacccatgccaaccccaacactattacctgggaggaattcagagacaatttccgctagtaccatgtccccgcaggcctgatgacagtgaagaaggtggagttcctggcgctgaagcaagggcctatatccatcagtgagtaccgagacaagtttctgcagctgtcccgctatgctcctgaggatgtcaacacagatgccaagaggtagtatcatttcttgagaggcttggttgatcctctgcagtatcatctgatgaatcataccttccccacatttcagcacctaatcgacagagcgatcatgacagagaggaagcgcaaagagaaggaggatcgcaagcgtaagatcagtggaccccagcctggaagcagcaatcgccctcgtttctcaggcaacccaccttagcagttcagacagaaccagcgcccagctcagtagcagcagtttcaaaggcagtaccctcagcatcagcagcagaatcgccagaacaaccagtcaggaggaggtcagtttcagaagcagaatcagcaggcacctcgtcttcccgccccagcaaccaaccagagcaatcaggcagcaccagttcagggtggaaacagagcatgtttccattgtggagagcaaggccattgggtgatgcaatgtctgaagaagacagcccagcagcagtcaggccctagtgcaccagcaaagcagaatgtgtctcagcctggagcaggcaactgctctcagccacgctataaccatgggagactgaatcacttggaggctaaagcagttcaggaaacccccggcatgacagtaggtatgttttcagtcgactcccatattgtagaagtgttatttgatactggagcaacacattcatttattactgcatcttgggtagaagcacataaacttccaatcactaccatgtcaacccccatccaaattgactcagtcggtggtagaatttgagccgatagcatttgcttgaatgtaagtgtggaaataagggggatagcgtttcccgctaatctcatagtaatgggtactcaaggaatagatgtcatcctagggatgaattggctagataagtatcaagcaattatcagttgtgttgtccccactaagataagaagtggtagccgagttaatctcaccctgagccaaggaaaggaagttgtcatcagatggctattgatagcaaggagccagattcactcgagattatcaatgttgtgtcagaatttccagatgtgttcccggaagacttaccaggcatgccacctgagcggaaagttgagtttgctatatagcttcttcctggcaccgcccccatttctaaaagagcctacagagtgtctggactagagttggttgaactcaagaagcaaatcaatgagctgtcagagaaaggttacatccggccaagcacctcgccttgggctgcccctgtcctgttcgtggagaagaaagatggcaccagaaggatgtgtatcgattatcgagctctgaatgaagtcacgatcaagaacaagtaccccttgcccagaatagaagatctgttcgaccagttgagaggagccagcgtgttttcaaagatagatctgaggtcaggttatcaccagctcaggattcgaccttcagacattccgaaaacggcattcattaccaagtatgggttgtatgagttcacagttatgtcttttggcctaacgaatgcaccagccttcttcatgaatttgatgaacaatgtattcatggattatcttgacaagtttgtggtggtatttattgatgatattcttatatattctcaaagtgaagaagatcatatgaatcatttgaagacggtattgcagagattgcaagagcaccagttgtatgtaaagttgagtaagtgcgagttctggatcaatgaagtcatgttcttgggtcacataattaacaaagatggattggctgtgaatccgaagaaagtggcagacattctgaattggaaagcgccaacagatgctagaggaatcaagagctttattggaatggctggatatttgaaagggaaataggcttacaccttttcctatatgaattttggtggtcgaattgcccaacacaaattaattagactaactagtttgctctagattataagttttacaggtgctaaaggttcacaacaaaccaataaaaagactaagaaagggttcaaataaaaagagcaaaagacaaccgaagtgtgccctggtctggcgcaccagactgtccggtgtgccaccggacaatgtccggtgcaccagggaaccaacctctgaacttgccaccttcgagaattctgggagccactcagctataattcaccggactgtccggtgtgccagcggagtaacgactacacaacgccaacggtcgtctgcaacgagcagttaatgcgctacagtgcgcgcagaagtcagagcagcgccagaaggcgcaccggacagtgaacggggactgtctggtgcaccaccggactgtccggtggcccagatgtcagaagctccaatggttagaatccaacggccgagtgacgtggctggcgcaccggacagtgtcctatggcgcaccggactgtccggtgcgccatgcgacagcaacctccaccaacggctcttttggtggttggggctataaatacccccaaccacccaccattcattgcatccaagtttttagccttcaaacaccttacaagagctatagcattcaatacaagacacaatcaaagagatcaaatcctctcgcaagtctaaagatcattccaatcaaatagtgactagtgagagagagacttgtgttcatttgagctcttacgcttggattgcttttcttcttcattctttcttgattccaactcaattgtaaccaaggcaagagacaccaattgtgtggtggtccttgtggggacttagtgtcccgtttgattgagaagagaagctcactcggtctaagtgaccgtttgagagagggaaagggttgaaagagacccgggctttgtgaccacctcaacggggagtaggtttgcaagaactgaacctcggtaaaacaaatcaccgtgtcatccgccttatttgcttgtgatttgtttttcgccctctctttcggactcgtttatatttctaaagctaaccccggcttgtagttgtgcttaaagtttgtaaatttcagattcgccctattcacccccccccccctctaggcaactttcaattggtatcagatcccggtacttcattagagcttaatcgctcgaagtgatgtcaggagatcacgccaagaaggagatggtgaccggcatgaagcccgccacaagccacgggaaggctccatcaagggagtccggcaacaaaaagaaggagggatccccttcacgcattaggacgcacaagagtggcgacaagaagaagaaaatgaagaaagtggtctactacgagaccgactcttcatcgccctctacatcgagatccgaagccgtgtccgtcacttctaagcaccaagagcgcaagaagtatagtaagattcccctacactactctcgcattcctagacatactccattactttccgtcccattaggcaaaccaccgacgtttgacggtgaagattattctaggtggagtgatatgatgagatatcacctaacctcactccacaaaagtatatgggatgttgttgagtttggagcgcaggtaccatccgtaggggatgaagattacgatggggacgaggtggcccaaatcgagcacttcaactctcaagcaactactatactcctcacctctctaaatcgagaagagtataataaagtgcaagggttgaagagcgccaaagagatttgggacgtactcaagaccacgcacgaaggagatgaggtgaccaaaatcaccaagcgggaaacgatcgagggggagctcgatcggttcatgctcaaccaaggcgaggaccctcaagccatgtacaaccggctaaagaccttggtgaatcaagtgcgcaacctcgggagcacaaaatgggatgaccatgagatggccaaggttattcttagatcactcgtatttcttaaccctactcaagttcaattaattcgtggtgatccaaggtataaactaatgtctcccgaggaagttatagaaaaatttgtgagctttgaattgatgatcaaaggctccaagaagatcatcgagcaaggcaccacctcaacacccgaggtgcaacccgtcgccttcaaattagcgacagaggagaagaaggaagagtctacatcaagtagacttcccatcgacgcctccaagctcgacaacgaggaaatggcgctcatcatcaagagctttcgccaaatcctcaagcaaaggaaggggagagattacaagccccgttccaagaaggtgtgctacaagtgtggtaagcccggtcatttcattgctaaatgtccattatctagtgatagtgacaggggcgacggcaagaagggaaagagaagagaaaagaagagatactacaagaagaagggcggcgatgcccatgtttgccgggagtgggactccgacgagagctccaccgactcctccgacgaggacgccgcaaacatcaccgtcaccaagggccttctcttccccaacgtcggccacaagtgcctcatggcaaaggacggcaagaagaagaaggtaaaatcaagatcctccactaagtatgcaacttctagtgatgag

SEQ ID NO: 20892 - DNA, 4299 bp, Zea Mays
agtttaattaccaacattgacaagttaaatgcatcactctctagccttaaaattgagaatgaaaaattaattgctaaagctaaagatttaaatggttgcaatgtttccatttccaatcttagagaagaaaatgcaattttacatgctaagattgttgaattgaatacttgcaaaccctctacatctaccgttgagcatgtttccatttgcactagatgtagagatattaatgttgatgctattcatgatcacttagctttaattaagaaacaaaatgatcacatagctcaacttagtgctaagattaatgagcataacttagaaaatgaaaaatttaaatttgctagaagcatgctctatagtgggagacgcccgggcattaaggatggcattggcttccgaaagggagacaatgtcaagcttaatgcccctcctaaaagattatttaactttgttaagggcaaggctcccatgcctcaggttaacgagggttacattttataccctgtcggctatcccgagcataaaattaggagaattcattataggtagtctcactctggctctcatcatgcttttatttataagagtgaggcatctagttctaggcaatcaacccgtgctaaattgcctaagaagaaaactcctattgcatcaaatgaacataacatttcatttaagacttttgatgcatcctatgtgcttactaacaaatcaggcaaaatagttgccaaatatgttgggggcaaacacaaggggtcaaagacttgtgtttgggtacccaaggtgcttgtttctaatgtcaaaggacccaagaccgtttgggtacctaagaacaaggcctaaacttgttttgtaggtttatgcatccgggggctcaagttggatcatcgatagcggggcacaaaccacatgacaggggagaagaagatgttctcctcctatgagaaaaaccaagatatccaaagagctatcacattcggggatggaaatcaagatttggtcaaaggattgggtaaaatttctatatctcctgaccattctatttccaatgtttttcttatagattctttagattgcaatttgctttctgtttctcaattatgcaaaatggtctacaactgtctttttacagatttaggtgttactgtctttagaagaagtgatgattcagtagcatttaagggagtgttagagggtcaggtatacttagtagattttgatagagctgaactcgacacttgcttaattgctaagactaacatgggttggctctggcaccgccgactagcccatgttgggatgaagaatcttcataagcttctaaagggagagcacattttgggactaaccaatgttcattctgagaaagacaggatttgtagcgcatgtaaagcaggaaagcaagttggtgttcatcatccacacaagaacatcatgacgaccgataggccgcttgagctactccacatggacctattcggcccgatagcttacataagcatcggcgggagtaagtactgtcttgtaattgtatatgattattctcgcttcacttgggtgttctttttgcaggaaaaatctcaaacccaagagacactaaagggattcttgagacgggctcaaaatgagttcggcttaaggatcaaaaagattagaagcaactacgggacggagttcaagaactctcaaattgaaggcttccttgaggaggagggcatcaagcatgagttctcttctccctacatgccacaacaaaatggtgtagtggagaggaagaatagaactctattggacatggcaaggaccatgcttgatgagtacaagacttcgaatcggttttgggccgaggccgtcaacaccgcgagctacgccatcaaccggttatatctacaccgaatcctcaagaagacatcatacgaactcctcaccggtaaaaagcccaatgtttcatactttagagtctttggtagcaaatgctttatgcttgttaaaagaggtagaaaatctaaatttgctcctaaggctatagaaggctttttacttggttatgattcaaacacaagggcatatagagtctttaacaagtccactggactagttgaagtttcttgtgacattgtgtttgatgagactaatggctctcaagtagagcaagttgatcttgatgagctagatgatgaagaggcttcgtgtgtcgtgctaaggaacatgtccattggggatgtgtgtcctaaggaatccgaagagcctccacaagcacaagatcaaccatcttcctccatgcaagcatctccaccaacccaagatgaggatcaagctcaagttgatgaagatgaggatcaagaagatgagccacctcaagaggagggaaatgatcaagggggagatgcccatggtcaagacaaggaagatgatgagagtccaagaccgccacacccaagagtccaccaagcaatccaacgagatcaccccgtgaacaccatcctcggcgatatacataagggggtaactactcgatctcgtgttgctcattttgtgaacattactcctttgtgtcttctattgagccatacagggtagaagatgcattaagggattcggattgggtgttggcaatgcaagaggaactcaacaacttcatgaggaatgaggtatggtatttagttccacgtcctaaccaaaatgttgtaggaacctagtgggtcttccgcaacaagcaagatgagcatggtgtggtgacaaggaacaaagcccgacttgtggaattcacaagtggaaggtttggatttcggtgaaacctatgcacccgtagctgggcttgagtcaattcacattttacttgcctatgctacttaccatggcttcaagctttatcgaatggacgtgaagagtgccttcctcaatggaccaatcaaggaagaggtctatgttgagcaacctcccggctttgaagatagtgagtaccctaatcacgtctacaaactctctaaggcgctttatgggctcaagcaagccccaagagcatggtatgaatgcctaagagattttcttatttctaatgacttcaaagtcagaaaagccgatcctactctattcactaaaactattgcaaaagatttgtttgtatgccaaatttatgttgatgatatcatatttgggtctactaacaaatccacttgtgaagaatttagtaggatcatgattcaaaaattcgagatgtctatgatgggggagttgaagtattttctaggatttcaagtaaagcaactccaagagggcaccttcattagccaaacgaagtacattcaagacatactcaccaagtttgggatgaaggatgccaagcccatcaagacacccatgggaactaatgggcaactcgacctcgacacgggaggtaaatccatagatcaaaaggtataccggtcgatgataggttctttactctatctatgtgcatctagaccgaatattatgctttccgtgtgcatgtgtgcaagattccaagccgatcctaaggaagttcaccttagggccgtgaaacgaatcttgagatatttagtttatactcctaagtttggcctttggtaccccaggggatccacttttgatttaattggatattccaatgctgattgggcagggtgtaagattgatagaaagagcacatcagggacttgccagttcttgggaagatctctggtgtcctgggcttcaaagaagcaaaattttgtagctctttctaccgccgaagccgagtatattgccgcaggccattgttgcgcgcaattgctttggatgaggcaaaccctcagggactatggttacaaattaaccaaagttcctcttctatgtgataatgagagtgcaatccgcatggcggataatcccgttgagcatagccgcactaaacacatagccattcggtatcactttttgagggatcaccaacaaaagggggatatcgagattgcatatattaacaccaaagaacaattagccgatatctttaccaagccactagatgagaaaacttttaccaaacttaggcatgagctaaatattcttgattctaggaattttgattgatgttttgcacacatagctcatgtatatacctttgatcatctctctttcatttgctatgactaatgtattcttcaagtgcatttcatgctaagtcatagattgaaagggaatcagagtcttcggcgaagacaaggcttccactccactccatcgaattaatcatccttcgccgtcgctccacaccgctctccaatttgggtaaaatct

SEQ ID NO: 20893 - DNA, 391 bp, Zea Mays
tctacagctatttgcacaagctagttgtcctctaaatctccctatcaaaaatgtactatcaattgctaagtatggtctgcaccctctaaggaaaccttctatgcatggtttcatagcaaagaatagtctattgaaccggatcttctcatttaccatatgattatcaatcactacaacactaccaggacaacatctttctacctctttttgaacctatataagttattaaagctgttgtcccaactaccaaatagttgtgtttgggcaagaagcataccatcgtacactcttttgtaaggcacatctaccttatgcttatcttttatcctcctctgcaattctttagctgtcaaccttgcatcctccatgatccaatctttcacaatttcac

SEQ ID NO: 20894 - DNA, 1486 bp, Zea Mays
tacaaacatactttatatttccaaaactcaagttttacaacataaaaaattataaatattacaagtcctgatatactcaaagtgcataacttattaccatagcgggaaggtagaacccttccaaagttcacacataaacctaactaatcctccttcaagactggaagcatcttccagccacagggacacctagaaagctcctgattacctgcaataacatgggttcgaaaaccctgattatgaagtgtacttttgcaagtcttacccgactaaggaaaaagactctcaaggatatgctggatttgggaatcaaggaaaggcttttagcaagaatcaacttcaatagtttgcagaaagcttactaaaatgagtccttactttgaatattttaatgctagattaagcattaatagaccttgtttgcatctagtctaatttcataatcacattaatcaatacaacatgatttttgctcattatgattccatccatgacttagattgtaggtcagtgaccaaatctccattatccgaggatataatggcgatcccaatcgatttacccagctggggatccctaaccacacgacatatgtagcactgaacccttgcatatgccaacctgtcccctgctatctcaagaccagaccaggttcacgccaaccgagagcacaattactccaccgtccagcctcttgccacggagggtacacgctactctcgccatctctccactcctattgcgtggtagcctttctggttgtggtcaagctaagattaggcttactctgtcccatactagggcatgtggctagttaatatagttctcgatcatcaagcctacattccctataatcctgaatcaacctgggcagaacatcacttgttcctagcccaagtctcgatttaagtacttccatccataggattgtttgtgttccttaggatgattaaaccatcttagggaaccttgcattagatctcccaatgatcctggtgaaaatatttgtgtaggtagagccatccttcctcaggataaacctgagctagacattagtgcaaaggacaaactctatccgcaagacttacctctaggcagggctaagaaatttttgtaaacaatatttgatacttccaaagaagtatctataacaggaatggatatcaaggtagtcaatgcatcaaatagtttccaagcaactcctataaacttaatgcagatttcactagacttaaagtgtataaaagtcttctttaaaaatacaaggaaggggttgcatgcaccggggcttgccttattgcagtgaagaggttctagatccctctattaaatacccagttagatggctcccatcacttgatgagcaggcactgaagcagaccgctcttcagaaaccacttcttgaatttcatcttcttcttcttctgggaattctacatgtaaagatatggatatgaatgcttatgcttatgcaacttgaaaagaa

SEQ ID NO: 20895 - DNA, 2292 bp, Zea Mays
gttaaacttaacatgacaaaaaggtaataaaatatagcattggtgcaaaggtacaacaaaattcctactactctataagcacggtgtgtaagcgtttacaccgtgcatcatgttttgccccgcatcaccgcgcccgcaacccccccgatctccgtcgtctcccccctctggcgtgtgttaaaccgacgtgacggctgtcatccgcgtgcggcaaccgtgctcatacatcactgtgtcgcccccacccccctcgccgcatgatgcccgcaacgtccgtggccgtcgcgcccgcccctccccccacctcgagagcggcacccggcaaccaccccactgtcaagatcaccgtgtccatataaggatggatcccctcacccgagaaccactcacgtcgagactaacgcatcccaagccagataaggatggatcccctcacatctccgattatttcgccgtccaaacacatgatttcctggttcaccctcctcccctttggcgtcctccagatcttgccttcgcccgcatcgacgtaggcgacgggggcatgacaggtcggttggtggagcggggctagaggccatcgatggtggttgtggcgacgtgctgctgggaagacgaggcaactctctcctccagcacaccctgtggtggagacttgccatacatatgacgcagctgaagctgcagagggcgcgcctgtgccgacgacggaagcaaagaagctggcgtcctctgtcacgaggtccaagcaggagatcacagaggacttctcgtcgattggcgggacatggcccccacggccgcccaagaagagaccagatcacaaagaagatccgaaaggcgagaggatttcatttcccggatcgacttacttctaccctccggttgtttgtggacagtattttggtgctggttttgttatcatgtgttgtgtttgttttattttaacatcactccagatttgatgaatcttagctcggcttctgcacgatgctaaccctaggctcgtcaggtttttttaagaaggaagccccaattcctgtgctagatccaccatgccattcaatgttgcagatcatgacgaatcttgtgattggtttgtgtcaaagcaatggatacacatatattcgcattgcatcatttctatggaggtgaaggatgaggaagaaaaaggggaggagttgcctccagatgttgagactttgaccacaacaattgaataaacatgtgattatcatgaactattatgtgtgctaccatttccttttgtgcttttctaattactagcgggaatgtttagcttctacaaaaataataggaatgagtttctgtacaccggtggctatgtttgaattgttaatagtgagactgagagagtggtatggttaggatgttagatttgtgcttccagtgattgattagtatcttttttggtagctggtatgtgttagttttaccataagctaaaagtttaagtagaatgaagtggatgtgttgtgccaaattaaatgaattttcatatgctcctacccaggctctgctttgtgtgttttgaactcctttgtgatgttgaacaattgtgcttattagttggtaatttactgatattccattgtcagtccattatattgttgtttaatagaatatttgtgtgtgtctcattggatattgagttattgacagatatgttttccataccaaaacaatgttcttaaacatgcatttcaggatgagtgattggaaaatgttcggattcttttgcaagatcaaagtttctatgcacttaatcagcttgtggatttcatcatcttggtcggcaagtttgtacgacaaaggcgacccggagtcaccgtcccttgaaagcgccccacttccggatgatgataggttgcgcattgccagcgagtttagaattgtgccacatggtgatgggggccattatctccttgtcgccctctgtgacaaagtgaaattgaaggattacatgtttcacatcttctttatgttgaaattgtcttgtatgttgtttagaccttttaaaggcaacatgccacacatatctttgttttggtgttcagagctacatatggtactcttcatggtttctgttgcgagtaacagggatatcaggtttttgtacttacctatatggtcatatctgaacctataaactgttgttaggatagatacaaggtgtgcatgatcttctttctattgattcatacttacatatgtagaccatattttatcaacttatctatactatactcaaagcaccagtttcaacggtca

SEQ ID NO: 20896 - DNA, 1421 bp, Zea Mays
acggctgtcatccgcgtgcggcaaccgtgctcatacatcactgtgtcgcccccacccccctcgccgcatgatgcccgcaacgtccgtggccgtcgcgcccgcccctccccccacctcgagagcggcacccggcaaccaccccactgtcaagatcaccgtgtccatataaggatggatcccctcacccgagaaccactcacgtcgagactaacgcatcccaagccagataaggatggatcccctcacatctccgattatttcgccgtccaaacacatgatttcctggttcaccctcctcccctttggcgtcctccagatcttgccttcgcccgcatcgacgtaggcgacgggggcatgacaggtcggttggtggagcggggctagaggccatcgatggtggttgtggcgacgtgctgctgggaagacgaggcaactctctcctccagcacaccctgtggtggagacttgccatacatatgacgcagctgaagctgcagagggcgcgcctgtgccgacgacggaagcaaagaagctggcgtcctctgtcacgaggtccaagcaggagatcacagaggacttctcgtcgattggcgggacatggcccccacggccgcccaagaagagaccagatcacaaagaagatccgaaaggcgagaggatttcatttcccggatcgacttacttctaccctccggtttttttaagaaggaagccccaattcctgtgctagatccaccatgccattcaatgttgcagatcatgacgaatcttgtgattggaggtgaaggatgaggaagaaaaaggggaggagttgcctccagatgttgagactttgaccacaacaattgaataaacatgatgagtgattggaaaatgttcggattcttttgcaagatcaaagtttctatgcacttaatcagcttgtggatttcatcatcttggtcggcaagtttgtacgacaaaggcgacccggagtcaccgtcccttgaaagcgccccacttccggatgatgataggttgcgcattgccagcgagtttagaattgtgccacatggtgatgggggccattatctccttgtcgccctctgtgacaaagtgaaattgaaggattacatgtttcacatcttctttatgttgaaattgtcttgtatgttgtttagaccttttaaaggcaacatgccacacatatctttgttttggtgttcagagctacatatggtactcttcatggtttctgttgcgagtaacagggatatcaggtttttgtacttacctatatggtcatatctgaacctataaactgttgttaggatagatacaaggtgtgcatgatcttctttctattgattcatacttacatatgtagaccatattttatcaacttatctatactatactcaaagcaccagtttcaacggtca

SEQ ID NO: 20897 - DNA, 1320 bp, Zea Mays
catcactgtgtcgcccccacccccctcgccgcatgatgcccgcaacgtccgtggccgtcgcgcccgcccctccccccacctcgagagcggcacccggcaaccaccccactgtcaagatcaccgtgtccatataaggatggatcccctcacccgagaaccactcacgtcgagactaacgcatcccaagccagataaggatggatcccctcacatctccgattatttcgccgtccaaacacatgatttcctggttcaccctcctcccctttggcgtcctccagatcttgccttcgcccgcatcgacgtaggcgacgggggcatgacaggtcggttggtggagcggggctagaggccatcgatggtggttgtggcgacgtgctgctgggaagacgaggcaactctctcctccagcacaccctgtggtggagacttgccatacatatgacgcagctgaagctgcagagggcgcgcctgtgccgacgacggaagcaaagaagctggcgtcctctgtcacgaggtccaagcaggagatcacagaggacttctcgtcgattggcgggacatggcccccacggccgcccaagaagagaccaggtgcaacgacaactcaatatcacaaagaagatccgaaaggcgagaggatttcatttcccggatcgacttacttctaccctccggaggtgaaggatgaggaagaaaaaggggaggagttgcctccagatgttgagactttgaccacaacaattgaataaacatgatgagtgattggaaaatgttcggattcttttgcaagatcaaagtttctatgcacttaatcagcttgtggatttcatcatcttggtcggcaagtttgtacgacaaaggcgacccggagtcaccgtcccttgaaagcgccccacttccggatgatgataggttgcgcattgccagcgagtttagaattgtgccacatggtgatgggggccattatctccttgtcgccctctgtgacaaagtgaaattgaaggattacatgtttcacatcttctttatgttgaaattgtcttgtatgttgtttagaccttttaaaggcaacatgccacacatatctttgttttggtgttcagagctacatatggtactcttcatggtttctgttgcgagtaacagggatatcaggtttttgtacttacctatatggtcatatctgaacctataaactgttgttaggatagatacaaggtgtgcatgatcttctttctattgattcatacttacatatgtagaccatattttatcaacttatctatactatactcaaagcaccagtttcaacggtca

SEQ ID NO: 20898 - DNA, 2069 bp, Zea Mays
catcactgtgtcgcccccacccccctcgccgcatgatgcccgcaacgtccgtggccgtcgcgcccgcccctccccccacctcgagagcggcacccggcaaccaccccactgtcaagatcaccgtgtccatataaggatggatcccctcacccgagaaccactcacgtcgagactaacgcatcccaagccagataaggatggatcccctcacatctccgattatttcgccgtccaaacacatgatttcctggttcaccctcctcccctttggcgtcctccagatcttgccttcgcccgcatcgacgtaggcgacgggggcatgacaggtcggttggtggagcggggctagaggccatcgatggtggttgtggcgacgtgctgctgggaagacgaggcaactctctcctccagcacaccctgtggtggagacttgccatacatatgacgcagctgaagctgcagagggcgcgcctgtgccgacgacggaagcaaagaagctggcgtcctctgtcacgaggtccaagcaggagatcacagaggacttctcgtcgattggcgggacatggcccccacggccgcccaagaagagaccaggtgcaacgacaactcaatatcacaaagaagatccgaaaggcgagaggatttcatttcccggatcgacttacttctaccctccggtttttttaagaaggaagccccaattcctgtgctagatccaccatgccattcaatgttgcagatcatgacgaatcttgtgattggtttgtgtcaaagcaatggatacacatatattcgcattgcatcatttctatggtttgttgtctcatttgatcgattgacgacagtgattatacattaccagttcttttgatgtatcctatgatggaaagggaaaattaatggttgaatttcttaatatgagtaggaggtgaaggatgaggaagaaaaaggggaggagttgcctccagatgttgagactttgaccacaacaattgaataaacatgtgattatcatgaactattatgtgtgctaccatttccttttgtgcttttctaattactagcgggaatgtttagcttctacaaaaataataggaatgagtttctgtacaccggtggctatgtttgaattgttaatagtgagactgagagagtggtatggttaggatgttagatttgtgcttccagtgattgattagtatcttttttggtagctggtatgtgttagttttaccataagctaaaagtttaagtagaatgaagtggatgtgttgtgccaaattaaatgaattttcatatgctcctacccaggctctgctttgtgtgttttgaactcctttgtgatgttgaacaattgtgcttattagttggtaatttactgatattccattgtcagtccattatattgttgtttaatagaatatttgtgtgtgtctcattggatattgagttattgacagatatgttttccataccaaaacaatgttcttaaacatgcatttcaggatgagtgattggaaaatgttcggattcttttgcaagatcaaagtttctatgcacttaatcagcttgtggatttcatcatcttggtcggcaagtttgtacgacaaaggcgacccggagtcaccgtcccttgaaagcgccccacttccggatgatgataggttgcgcattgccagcgagtttagaattgtgccacatggtgatgggggccattatctccttgtcgccctctgtgacaaagtgaaattgaaggattacatgtttcacatcttctttatgttgaaattgtcttgtatgttgtttagaccttttaaaggcaacatgccacacatatctttgttttggtgttcagagctacatatggtactcttcatggtttctgttgcgagtaacagggatatcaggtttttgtacttacctatatggtcatatctgaacctataaactgttgttaggatagatacaaggtgtgcatgatcttctttctattgattcatacttacatatgtagaccatattttatcaacttatctatactatactcaaagcaccagtttcaacggtca

SEQ ID NO: 20899 - DNA, 1427 bp, Zea Mays
catcactgtgtcgcccccacccccctcgccgcatgatgcccgcaacgtccgtggccgtcgcgcccgcccctccccccacctcgagagcggcacccggcaaccaccccactgtcaagatcaccgtgtccatataaggatggatcccctcacccgagaaccactcacgtcgagactaacgcatcccaagccagataaggatggatcccctcacatctccgattatttcgccgtccaaacacatgatttcctggttcaccctcctcccctttggcgtcctccagatcttgccttcgcccgcatcgacgtaggcgacgggggcatgacaggtcggttggtggagcggggctagaggccatcgatggtggttgtggcgacgtgctgctgggaagacgaggcaactctctcctccagcacaccctgtggtggagacttgccatacatatgacgcagctgaagctgcagagggcgcgcctgtgccgacgacggaagcaaagaagctggcgtcctctgtcacgaggtccaagcaggagatcacagaggacttctcgtcgattggcgggacatggcccccacggccgcccaagaagagaccagatcacaaagaagatccgaaaggcgagaggatttcatttcccggatcgacttacttctaccctccgaaggaagccccaattcctgtgctagatccaccatgccattcaatgttgcagatcatgacgaatcttgtgattggtttgtgtcaaagcaatggatacacatatattcgcattgcatcatttctatggaggtgaaggatgaggaagaaaaaggggaggagttgcctccagatgttgagactttgaccacaacaattgaataaacatgatgagtgattggaaaatgttcggattcttttgcaagatcaaagtttctatgcacttaatcagcttgtggatttcatcatcttggtcggcaagtttgtacgacaaaggcgacccggagtcaccgtcccttgaaagcgccccacttccggatgatgataggttgcgcattgccagcgagtttagaattgtgccacatggtgatgggggccattatctccttgtcgccctctgtgacaaagtgaaattgaaggattacatgtttcacatcttctttatgttgaaattgtcttgtatgttgtttagaccttttaaaggcaacatgccacacatatctttgttttggtgttcagagctacatatggtactcttcatggtttctgttgcgagtaacagggatatcaggtttttgtacttacctatatggtcatatctgaacctataaactgttgttaggatagatacaaggtgtgcatgatcttctttctattgattcatacttacatatgtagaccatattttatcaacttatctatactatactcaaagcaccagtttcaacggtca

SEQ ID NO: 20900 - DNA, 1702 bp, Zea Mays
catcactgtgtcgcccccacccccctcgccgcatgatgcccgcaacgtccgtggccgtcgcgcccgcccctccccccacctcgagagcggcacccggcaaccaccccactgtcaagatcaccgtgtccatataaggatggatcccctcacccgagaaccactcacgtcgagactaacgcatcccaagccagataaggatggatcccctcacatctccgattatttcgccgtccaaacacatgatttcctggttcaccctcctcccctttggcgtcctccagatcttgccttcgcccgcatcgacgtaggcgacgggggcatgacaggtcggttggtggagcggggctagaggccatcgatggtggttgtggcgacgtgctgctgggaagacgaggcaactctctcctccagcacaccctgtggtggagacttgccatacatatgacgcagctgaagctgcagagggcgcgcctgtgccgacgacggaagcaaagaagctggcgtcctctgtcacgaggtccaagcaggagatcacagaggacttctcgtcgattggcgggacatggcccccacggccgcccaagaagagaccaggtgcaacgacaactcaatatcacaaagaagatccgaaaggcgagaggatttcatttcccggatcgacttacttctaccctccggttgtttgtggacagtattttggtgctggttttgttatcatgtgttgtgtttgttttattttaacatcactccagatttgatgaatcttagctcggcttctgcacgatgctaaccctaggctcgtcaggtttttttaagaaggaagccccaattcctgtgctagatccaccatgccattcaatgttgcagatcatgacgaatcttgtgattggtttgtgtcaaagcaatggatacacatatattcgcattgcatcatttctatggtttgttgtctcatttgatcgattgacgacagtgattatacattaccagttcttttgatgtatcctatgatggaaagggaaaattaatggttgaatttcttaatatgagtaggaggtgaaggatgaggaagaaaaaggggaggagttgcctccagatgttgagactttgaccacaacaattgaataaacatgtgattgatgagtgattggaaaatgttcggattcttttgcaagatcaaagtttctatgcacttaatcagcttgtggatttcatcatcttggtcggcaagtttgtacgacaaaggcgacccggagtcaccgtcccttgaaagcgccccacttccggatgatgataggttgcgcattgccagcgagtttagaattgtgccacatggtgatgggggccattatctccttgtcgccctctgtgacaaagtgaaattgaaggattacatgtttcacatcttctttatgttgaaattgtcttgtatgttgtttagaccttttaaaggcaacatgccacacatatctttgttttggtgttcagagctacatatggtactcttcatggtttctgttgcgagtaacagggatatcaggtttttgtacttacctatatggtcatatctgaacctataaactgttgttaggatagatacaaggtgtgcatgatcttctttctattgattcatacttacatatgtagaccatattttatcaacttatctatactatactcaaagcaccagtttcaacggtca

SEQ ID NO: 20901 - DNA, 1453 bp, Zea Mays
catcactgtgtcgcccccacccccctcgccgcatgatgcccgcaacgtccgtggccgtcgcgcccgcccctccccccacctcgagagcggcacccggcaaccaccccactgtcaagatcaccgtgtccatataaggatggatcccctcacccgagaaccactcacgtcgagactaacgcatcccaagccagataaggatggatcccctcacatctccgattatttcgccgtccaaacacatgatttcctggttcaccctcctcccctttggcgtcctccagatcttgccttcgcccgcatcgacgtaggcgacgggggcatgacaggtcggttggtggagcggggctagaggccatcgatggtggttgtggcgacgtgctgctgggaagacgaggcaactctctcctccagcacaccctgtggtggagacttgccatacatatgacgcagctgaagctgcagagggcgcgcctgtgccgacgacggaagcaaagaagctggcgtcctctgtcacgaggtccaagcaggagatcacagaggacttctcgtcgattggcgggacatggcccccacggccgcccaagaagagaccaggtgcaacgacaactcaatatcacaaagaagatccgaaaggcgagaggatttcatttcccggatcgacttacttctaccctccggttgtttgtggacagtattttggtgctggttttgttatcatgtgttgtgtttgttttattttaacatcactccagatttgatgaatcttagctcggcttctgcacgatgctaaccctaggctcgtcaggtttttttaagaaggaagccccaattcctgtgctagatccaccatgccattcaatgttgcagatcatgacgaatcttgtgattggatgagtgattggaaaatgttcggattcttttgcaagatcaaagtttctatgcacttaatcagcttgtggatttcatcatcttggtcggcaagtttgtacgacaaaggcgacccggagtcaccgtcccttgaaagcgccccacttccggatgatgataggttgcgcattgccagcgagtttagaattgtgccacatggtgatgggggccattatctccttgtcgccctctgtgacaaagtgaaattgaaggattacatgtttcacatcttctttatgttgaaattgtcttgtatgttgtttagaccttttaaaggcaacatgccacacatatctttgttttggtgttcagagctacatatggtactcttcatggtttctgttgcgagtaacagggatatcaggtttttgtacttacctatatggtcatatctgaacctataaactgttgttaggatagatacaaggtgtgcatgatcttctttctattgattcatacttacatatgtagaccatattttatcaacttatctatactatactcaaagcaccagtttcaacggtca

SEQ ID NO: 20902 - DNA, 1756 bp, Zea Mays
catcactgtgtcgcccccacccccctcgccgcatgatgcccgcaacgtccgtggccgtcgcgcccgcccctccccccacctcgagagcggcacccggcaaccaccccactgtcaagatcaccgtgtccatataaggatggatcccctcacccgagaaccactcacgtcgagactaacgcatcccaagccagataaggatggatcccctcacatctccgattatttcgccgtccaaacacatgatttcctggttcaccctcctcccctttggcgtcctccagatcttgccttcgcccgcatcgacgtaggcgacgggggcatgacaggtcggttggtggagcggggctagaggccatcgatggtggttgtggcgacgtgctgctgggaagacgaggcaactctctcctccagcacaccctgtggtggagacttgccatacatatgacgcagctgaagctgcagagggcgcgcctgtgccgacgacggaagcaaagaagctggcgtcctctgtcacgaggtccaagcaggagatcacagaggacttctcgtcgattggcgggacatggcccccacggccgcccaagaagagaccaggtgcaacgacaactcaatgaggtgaaggatgaggaagaaaaaggggaggagttgcctccagatgttgagactttgaccacaacaattgaataaacatgtgattatcatgaactattatgtgtgctaccatttccttttgtgcttttctaattactagcgggaatgtttagcttctacaaaaataataggaatgagtttctgtacaccggtggctatgtttgaattgttaatagtgagactgagagagtggtatggttaggatgttagatttgtgcttccagtgattgattagtatcttttttggtagctggtatgtgttagttttaccataagctaaaagtttaagtagaatgaagtggatgtgttgtgccaaattaaatgaattttcatatgctcctacccaggctctgctttgtgtgttttgaactcctttgtgatgttgaacaattgtgcttattagttggtaatttactgatattccattgtcagtccattatattgttgtttaatagaatatttgtgtgtgtctcattggatattgagttattgacagatatgttttccataccaaaacaatgttcttaaacatgcatttcaggatgagtgattggaaaatgttcggattcttttgcaagatcaaagtttctatgcacttaatcagcttgtggatttcatcatcttggtcggcaagtttgtacgacaaaggcgacccggagtcaccgtcccttgaaagcgccccacttccggatgatgataggttgcgcattgccagcgagtttagaattgtgccacatggtgatgggggccattatctccttgtcgccctctgtgacaaagtgaaattgaaggattacatgtttcacatcttctttatgttgaaattgtcttgtatgttgtttagaccttttaaaggcaacatgccacacatatctttgttttggtgttcagagctacatatggtactcttcatggtttctgttgcgagtaacagggatatcaggtttttgtacttacctatatggtcatatctgaacctataaactgttgttaggatagatacaaggtgtgcatgatcttctttctattgattcatacttacatatgtagaccatattttatcaacttatctatactatactcaaagcaccagtttcaacggtca

SEQ ID NO: 20903 - DNA, 1532 bp, Zea Mays
catcactgtgtcgcccccacccccctcgccgcatgatgcccgcaacgtccgtggccgtcgcgcccgcccctccccccacctcgagagcggcacccggcaaccaccccactgtcaagatcaccgtgtccatataaggatggatcccctcacccgagaaccactcacgtcgagactaacgcatcccaagccagataaggatggatcccctcacatctccgattatttcgccgtccaaacacatgatttcctggttcaccctcctcccctttggcgtcctccagatcttgccttcgcccgcatcgacgtaggcgacgggggcatgacaggtcggttggtggagcggggctagaggccatcgatggtggttgtggcgacgtgctgctgggaagacgaggcaactctctcctccagcacaccctgtggtggagacttgccatacatatgacgcagctgaagctgcagagggcgcgcctgtgccgacgacggaagcaaagaagctggcgtcctctgtcacgaggtccaagcaggagatcacagaggacttctcgtcgattggcgggacatggcccccacggccgcccaagaagagaccaggtgcaacgacaactcaatatcacaaagaagatccgaaaggcgagaggatttcatttcccggatcgacttacttctaccctccggttgtttgtggacagtattttggtgctggttttgttatcatgtgttgtgtttgttttattttaacatcactccagatttgatgaatcttagctcggcttctgcacgatgctaaccctaggctcgtcaggtttttttaagaaggaagccccaattcctgtgctagatccaccatgccattcaatgttgcagatcatgacgaatcttgtgattggaggtgaaggatgaggaagaaaaaggggaggagttgcctccagatgttgagactttgaccacaacaattgaataaacatgatgagtgattggaaaatgttcggattcttttgcaagatcaaagtttctatgcacttaatcagcttgtggatttcatcatcttggtcggcaagtttgtacgacaaaggcgacccggagtcaccgtcccttgaaagcgccccacttccggatgatgataggttgcgcattgccagcgagtttagaattgtgccacatggtgatgggggccattatctccttgtcgccctctgtgacaaagtgaaattgaaggattacatgtttcacatcttctttatgttgaaattgtcttgtatgttgtttagaccttttaaaggcaacatgccacacatatctttgttttggtgttcagagctacatatggtactcttcatggtttctgttgcgagtaacagggatatcaggtttttgtacttacctatatggtcatatctgaacctataaactgttgttaggatagatacaaggtgtgcatgatcttctttctattgattcatacttacatatgtagaccatattttatcaacttatctatactatactcaaagcaccagtttcaacggtca

SEQ ID NO: 20904 - DNA, 2922 bp, Zea Mays
cccacatatatatcctaacggagtaaataccatcgggtatcgggtcgtgggtacccattgccatctctactccaatcccacgggacaacaaaccctaaatcctcacatcctctcctcactccctcccatctagcggcggccgggcggcgcctccgcacgctgccggcgttgtgcctcgcctctacgcggctccatcagtcctgcgtggccgtcgagtagatctccgtcacaggcgcgagctcatcaccgtccaggcaagcgcgctctagctcccaagccgcgcgctccaggccgcacgtcatccaggtgtcgagctccaggtcgcgccacgccgcgcgccgtctaggcgtcgagctccaggccgcgccacgcctcgcgctccaggccgtgcgctgtccaggcgtccagctccctaggccgcgcgctccagcgtccagacacgccacgcgctccaggccgcgcgccgtccaggcgtcgagttccaggccgcgcgctccagcggtccagccatatcgccctcagcgtctcagccacatcacgtcgaggcgtccagtggctccagcgtctcagcgtatgataagccatgggatatttgttctcataatgaaggaaacaactcagacggggttgattggttggaagataaatcgggtggtgatgtcggcaagaacaaatcagattacactgaaggcggaggtagtggtagtagaccttggtgccagtgcgtctgctcctgctagggctgcgcccagtcttccacaattgatccatattcgtctgagatcaattagaaaaaggaagccaatacataagagtgtctatgatctatgaaagctggagcaatttttcagtcgttatgagtagtgactgaattagtttggatccttagattcagacccctgctgtttttttcttcttttcattagccccttttcattgctgcaactggagcaatttttcagtcattatgagtagtgattggattagtttggatccttagatttagattcttgcctactgttttttttcttcttttcattagccccttttcattgctgcagctggaacaagagcacgcgtgctcatcctgtagttctgttcccacgaatcagcagttggagaaatcttcggctggagttagagaggggatgcatgctcatatccctaaattcaaattctgcattagtgatttgtttggatattgaccgtaagcaccttcccatccagattgagccaaagggtgtgaacttatctcggtccattgacatcgatcagcagtcggagaagcacaagagtatgtcaagggtgtcagcttcagtggagagagagcttgttcatgaacaacccactgacgacgatgcgtctgcgctggcgtatttggttcgacgtcgttgtccaaacacgtatctctttttttatggacatgcactggaggaccgtgttgttcggatgacttttatagctaagccgacctattccagtaggagaaaatacctcaatgacttgctagatgctgatcttgtgagcctgagtcgaggtgacaggaaaagatggcataacatgtgggctgctgctgaggcagctgctcaagctgcgaggctgctgctcaggctgagcctgctgaccatgcgggccatgaagactaaacctgatggcgctgccggttctgtctgtagtttagagctgcagtcgcttatctactttctactaattctagatcttgtgaacttaggacattgtgcttgtcatgccgaatgtttggtgttctaaactttagacactgtgttgctgttttaattactcatgtatcaatgttgtgaacttaagacattgtgctagtcactttagacgttatgttgctactttcgatcactttcttgatttttgccacggtggcggtgccagcgctgaggtctaggagcctgagctgggcggcgctgaggtctaggacttcctcaagagatgctgtaacccttcagttaataggtaactcagttactctatattgtctcagttaatggggaactcagttaatcttatattttatatcagttaatggataactcagttaatatgctgtaacctttctgttaatggataactcagttaatcctctatattgtctcagttaatggataactcagttaattccttgtaatggatcagttaacggagcgctcagttaatttataatatatcctcggttaattgctcactcggttaatacactgtaacccttcagttaattctgcactcccatgtggctttcgattacggaatattcttataaaaaattataaatagtgcatgttcaagacaggaatatttgatttttttaatatggaatatttctatagcaaagtgtaaatattccatgttctagtcaggaatatttgatcttttacggaatattcttataaaggagtgtaaatattccatctttcagacaggaatgtttaaagttataatatggaatgttcttataacaaattgtaaatattccatgtttcatttcagaaatatttgacattttattacggaatattcttataacccatacaccctaaaaacactaaacctaaaaaaacccctaaaccaataccctgaacccaaaacccttccgatacgctaagctacgtgaggggctcaactcatgtagttggctattcggacgtgaaggctacaaacaccaaacgacgtggtgcttgtatgatagactcaaacaccaaccgaaatggtttttgacttataggtagcaaaacccccgtcacctgtgtttagaacccacctaaagctgttcatcgcggtctagaggccattttggagaagggtttacctggatccgctcttaacgtagttgtcacaccgcgtacatggcagtaggaggaattaaatatagcacatcgtgcatctaggaatagc

SEQ ID NO: 20905 - DNA, 2139 bp, Zea Mays
cccacatatatatcctaacggagtaaataccatcgggtatcgggtcgtgggtacccattgccatctctactccaatcccacgggacaacaaaccctaaatcctcacatcctctcctcactccctcccatctagcggcggccgggcggcgcctccgcacgctgccggcgttgtgcctcgcctctacgcggctccatcagtcctgcgtggccgtcgagtagatctccgtcacaggcgcgagctcatcaccgtccaggcaagcgcgctctagctcccaagccgcgcgctccaggccgcacgtcatccaggtgtcgagctccaggtcgcgccacgccgcgcgccgtctaggcgtcgagctccaggccgcgccacgcctcgcgctccaggccgtgcgctgtccaggcgtccagctccctaggccgcgcgctccagcgtccagacacgccacgcgctccaggccgcgcgccgtccaggcgtcgagttccaggccgcgcgctccagcggtccagccatatcgccctcagcgtctcagccacatcacgtcgaggcgtccagtggctccagcgtctcagcgtatgataagccatgggatatttgttctcataatgaaggaaacaactcagacggggttgattggttggaagataaatcgggtggtgatgtcggcaagaacaaatcagattacactgaaggcggaggtagtggtagtagaccttggtgccagtgcgtctgctcctgctagggctgcgcccagtcttccacaattgatccatattcgtctgagatcaattagaaaaaggaagccaatacataagagtgtctatgatctatgaaagaatgaaagagaggaaagcacaattttactctggatgtgctattacgtaaacctggacgtgctagttatatgtcgtggtagcccacgaccgacggcatcaaaggtgcattgctactctattggggacggtacaacaagcttacgcgacagttgtcaagtggcgcaggcccgataaagctctcacttgaagagataaaaaaagaacttgaatcgggtaaatacgaatgtatgttgcaatatttggatcagctcacacatatatttgtaacgtgtgatgagcataagtcaccatcagtagctgcgtattgtgccaatattagatgtgggaacttaagtagtgcaagtactgggaagcgcaacattgacgagacctcttccagccatgttcggcagaagagctcgaaagttcatgtggctcagtcattacaaaatggcatgacccacgaggatgcaatgcaatttcttaaagaccatgacatcttaggtggtactttaaaattttgtatagccaataagttacttaaagactatcaaaatctgagtacgttctcccgtctggaatcccttgaggaaaggatcagtttcctggaaggaacctggaaattagaatctgatgggtcagtttcctggcagtaacctggaaattagaatctgatccctcttccttaaaggtaagccagtttgtttaggtcttctgtagtcatgtcagttatttatcttgttcttgtgtttttttgctagtctagtctgaccttgatatctaaggggccagctaaaagcaaatacatgtcatggagactgcattcagccttggtttctttctgtctaccttttgaaagtaatgatgactgtatattgctttctgaacaacctgttattgctttctgaaaggtttaccctagagcgatgtggtttctcaaacaagctacttggcatttattttctttgtggcaatgttctatggatgtaactatgaactacgtactagtatgctgcccgatgcagtgatgttctcttctggagagggatgcggatgccattcagcaagcaatgccaaggaagattagtgcatggaaagtgtatggaattgttcatgcttcattgttgttgttttggccttgctgtttggcctggtgttgagtttggctggccccgtttgaaatggccttagaaccagtgatgtttagctgatgatacctagatattctgcttttggtatgttgaaatattgtgacttgtgatttctaaactccagctgaatactgctattccaagtcatacaatgcacgtgtgaacgtagtgcatt

SEQ ID NO: 20906 - DNA, 1256 bp, Zea Mays
cccacatatatatcctaacggagtaaataccatcgggtatcgggtcgtgggtacccattgccatctctactccaatcccacgggacaacaaaccctaaatcctcacatcctctcctcactccctcccatctagcggcggccgggcggcgcctccgcacgctgccggcgttgtgcctcgcctctacgcggctccatcagtcctgcgtggccgtcgagtagatctccgtcacaggcgcgagctcatcaccgtccaggcaagcgcgctctagctcccaagccgcgcgctccaggccgcacgtcatccaggtgtcgagctccaggtcgcgccacgccgcgcgccgtctaggcgtcgagctccaggccgcgccacgcctcgcgctccaggccgtgcgctgtccaggcgtccagctccctaggccgcgcgctccagcgtccagacacgccacgcgctccaggccgcgcgccgtccaggcgtcgagttccaggccgcgcgctccagcggtccagccatatcgccctcagcgtctcagccacatcacgtcgaggcgtccagtggctccagcgtctcagcgtatgataagccatgggatatttgttctcataatgaaggaaacaactcagacggggttgattggttggaagataaatcgggtggtgatgtcggcaagaacaaatcagattacactgaaggcggaggtagtggtagtagaccttggtgccagtgcgtctgctcctgctagggctgcgcccagtcttccacaattgatccatattcgtctgagatcaattagaaaaaggaagccaatacataagagtgtctatgatctatgaaagctgaaaggtttaccctagagcgatgtggtttctcaaacaagctacttggcatttattttctttgtggcaatgttctatggatgtaactatgaactacgtactagtatgctgcccgatgcagtgatgttctcttctggagagggatgcggatgccattcagcaagcaatgccaaggaagattagtgcatggaaagtgtatggaattgttcatgcttcattgttgttgttttggccttgctgtttggcctggtgttgagtttggctggccccgtttgaaatggccttagaaccagtgatgtttagctgatgatacctagatattctgcttttggtatgttgaaatattgtgacttgtgatttctaaactccagctgaatactgctattccaagtcatacaatgcacgtgtgaacgtagtgcatt

SEQ ID NO: 20907 - DNA, 1135 bp, Zea Mays
cccacatatatatcctaacggagtaaataccatcgggtatcgggtcgtgggtacccattgccatctctactccaatcccacgggacaacaaaccctaaatcctcacatcctctcctcactccctcccatctagcggcggccgggcggcgcctccgcacgctgccggcgttgtgcctcgcctctacgcggctccatcagtcctgcgtggccgtcgagtagatctccgtcacaggcgcgagctcatcaccgtccaggcaagcgcgctctagctcccaagccgcgcgctccaggccgcacgtcatccaggtgtcgagctccaggtcgcgccacgccgcgcgccgtctaggcgtcgagctccaggccgcgccacgcctcgcgctccaggccgtgcgctgtccaggcgtccagctccctaggccgcgcgctccagcgtccagacacgccacgcgctccaggccgcgcgccgtccaggcgtcgagttccaggccgcgcgctccagcggtccagccatatcgccctcagcgtctcagccacatcacgtcgaggcgtccagtggctccagcgtctcagcgtatgataagccatgggatatttgttctcataatgaaggaaacaactcagacggggttgattggttggaagataaatcgggtggtgatgtcggcaagaacaaatcagattacactgaaggcggaggtagtggtagtagaccttggtgccagtgcgtctgctcctgctagggctgcgcccagtcttccacaattgatccatattcgtctgagatcaattagaaaaaggaagccaatacataagagtgtctatgatctatgaaagtgatgttctcttctggagagggatgcggatgccattcagcaagcaatgccaaggaagattagtgcatggaaagtgtatggaattgttcatgcttcattgttgttgttttggccttgctgtttggcctggtgttgagtttggctggccccgtttgaaatggccttagaaccagtgatgtttagctgatgatacctagatattctgcttttggtatgttgaaatattgtgacttgtgatttctaaactccagctgaatactgctattccaagtcatacaatgcacgtgtgaacgtagtgcatt

SEQ ID NO: 20908 - DNA, 1871 bp, Zea Mays
caatcggtataagtagtgactggattagtttggatccttagattcagattcttgcctactgtttttttcttcttttcattagtcccttttcattgctgcagctggaacaagcgtgctcatcatgtagttctgttcccacgaatcagcagttggagaaatcttcggctggagttagaattgagccaaagggtgtgaacttatctcggtccattgacatcgatcagcagtcggagaagcacaagagtatgtcaagggtgtcagcttcagtggagagagagcttgttcatgaacaacccactgacgacgatgcgtctgcgctggcgtatttggttcgacgtcgttgtccaaacacgtatctctttttttatggacatgcactggaggaccgtgttgttcggatgacttttatagctaagccgacctattccagtaggagaaaatacctcaatgacttgctagatgctgatcttgtgagcctgagtcgaggtgacaggaaaagatggcataacatgtgggctgctgctgaggcagctgctcaagctgcgaggctgctgctcaggctgagcctgctgaccatgcgggccatgaagactaaacctgatggcgctgccggttctgtctgtagtttagagctgcagtcgcttatctactttctactaattctagatcttgtgaacttaggacattgtgcttgtcatgccgaatgtttggtgttctaaactttagacactgtgttgctgttttaattactcatgtatcaatgttgtgaacttaagacattgtgctagtcactttagacgttatgttgctactttcgatcactttcttgatttttgccacggtggcggtgccagcgctgaggtctaggagcctgagctgggcggcgctgaggtctaggacttcctcaagagatgctgtaacccttcagttaataggtaactcagttactctatattgtctcagttaatggggaactcagttaatcttatattttatatcagttaatggataactcagttaatatgctgtaacctttctgttaatggataactcagttaatcctctatattgtctcagttaatggataactcagttaattccttgtaatggatcagttaacggagcgctcagttaatttataatatatcctcggttaattgctcactcggttaatacactgtaacccttcagttaattctgcactcccatgtggctttcgattacggaatattcttataaaaaattataaatagtgcatgttcaagacaggaatatttgatttttttaatatggaatatttctatagcaaagtgtaaatattccatgttctagtcaggaatatttgatcttttacggaatattcttataaaggagtgtaaatattccatctttcagacaggaatgtttaaagttataatatggaatgttcttataacaaattgtaaatattccatgtttcatttcagaaatatttgacattttattacggaatattcttataacccatacaccctaaaaacactaaacctaaaaaaacccctaaaccaataccctgaacccaaaacccttccgatacgctaagctacgtgaggggctcaactcatgtagttggctattcggacgtgaaggctacaaacaccaaacgacgtggtgcttgtatgatagactcaaacaccaaccgaaatggtttttgacttataggtagcaaaacccccgtcacctgtgtttagaacccacctaaagctgttcatcgcggtctagaggccattttggagaagggtttacctggatccgctcttaacgtagttgtcacaccgcgtacatggcagtaggaggaattaaatatagcacatcgtgcatctaggaatagc

SEQ ID NO: 20909 - DNA, 3451 bp, Zea Mays
gaccagacaaccccagaccagccacgcccaagctggtgggggccaagccgtggtcgtggccagcggtgcctaggccactggtggctgggccaggctgggcagccacgccgacgacagggggaggagtggggcggcggcgatggcaagagcccaggcaacagcgcccgcagtaggggcagcgctggtggcaggagggcagtgaggacggttcgggaggcgacgatgacgcgcctgcaacgtgagaggggtgagaagcaggagggagagggaaaccgttcatgaccctgggcgcgagacttaggattcgctcaaatgccattatgaaacttaggattcgctcaaatgccattatgggaacacgcttcgctaagagaccactatcaatcgtatgctaacagacaaaatgccagttaggcggttatttgaaagataaacgtcttttactatgttgtcagcagttcatcggacacttttgcccctagaaccaaaagcgccattctcttctctccttttcttatcctttgtctccctgagctcgctcgtatccctcggcggagatcttccctcggcgggctccaccgacgttggtcggctccccacggcaagctccaccggcggcggccggttgccctcggcgagctacaccggtttcccctcggctaccctcggcaccggcttcccctcgtctacaccggcttccaccacggcggccggttcccctcggcgagctccaggtatgtacatgggctttagggtttagggtttaggctttaggctttaggtgatttgagttagcagcagagatgtcccaacagcgacacattattggtcaccaacagttggactacaaatttgtcttgcacttggattacttgaacaaatcacattattggtcaccaacagttggctagatggattacaactggaatgattctatgtacgggtatgattctacatttaataacttttatagaaatcgaatgaagtagtatgattgtatttttttattttttattttcagctttgatgatgagcttccgcctagcttagcattggtagtacatcctagtgctcacccaaaggttggtattgactgggacgcacttcaaattgttgagagccaagatgaggaaggtatgatagaaattgttgccgatgacagaatgtatgagttgatcgggttgagagctgaggatgaagctgctgagaaggcgggtgaagctttcaagatgcaagagggtgatgtcaatagaagttatagtgagaatgaaattattgatgcagccatccctgttgatgatgaaattccagatgagagggtgatgttgcatgacccagacaagccttgtatggatattggaacagtgtaccccagcatgcgtgacttcaggctagctttgagacagtttgcgatcaatgaagagtttgagctagaaatatataaaaatgatccaagtcgatttattggtaattgcaatggagaaggttgcccttggcatattgtgggacgtaggcaataatctgggaatagtgttatggtatagacttgttattactaatctatgttgtgcccttgccatctatgttgttactaactgaggtttattattgcaggtaattgtcttaattgaggaacacacttgtacttccagtgctagaaggaaaaccacgacccctactagcgcttgggtagcatcaaaggttatccatctcctcaaggagtctaacatgggtccgaaggagctgcagaaaaggttggaagaaaaatataaatgtgaaattcattatgacacggtttggaaggggaggcaattggcgataaaagagttacatggcagttgggaagagagttttcaaatgcttttcaattggagggcagaggtgtcgagtcgttctccggggattgtcattgagattgacattaaggacgtagatggcaagatttatttccacatatttttttgtgcattagccccttgcattcaaggatttttagaaggttgcagaccatacctcagcatagactcaactgccctcaacggtagatggaatgggcatatggctgcagccacgtctatcgatggtcataactggatgtattgtcacacccgtttccaaagggaagagccgggtgcatggcatatgtgtgccaggatctatttccacacatatgttgacgtcacaagtgtaatatatcaaaagaacaatgcataaaagcgtaaataacgattatattaacatattacacttcgaacagacataatgtcttaacctttattcatcaaagtacagcgaaacaaggacatccatccacataaagatgaccgagggtatcactagactagcatccatggagttcagcatcatatcttcatctgcaacttctgatcaaaattaagcaagggtgagcttacttatggtctttgtgtgtgttatggacgttctaaattcaataatcttgaaggccgagagctatggtttgttacagccgctgcttcgtcggggaattggacagagaatttccttatacgccgatgatgtggttctgtttatgcatccggtgaggagtgacttggagacagtcaaacaagttttgaaggtgttcggtgaagcctcaggacttgttactaatttagcaaagagctcgtttactccgatttgctgcaatgaccaggaggttttggcaatccaagagacgctatcttgtaatttggtgaatttcccttgcaagtacttgggcctgcctttgtctattagaaagctctccaggagggaccttctccctctagttgagaaggttgcagatagattgcctggttggaaagctgctcttattcacccggcgggtagggctactcttgtcaaatctgtcctctcagctattccagtttaccaccttattgcacttcaatgccccaaatgggtcatcaaagccattgacaagattaggagaggtttcctctggaaaggccgcaaaaatatcaaaggtgggcactgtttagtgggttggcagaaggtgtgtttaccattgactttgggtggtttaggtgttccaaatcttgaagttatgggctggtccctcaatttgagatggttatggttgaagaaaacacaacctgagcggccgtgggctttcttggatgtccaagttcatcccaatgctgctgcactttttgctgcatcggttcagtcagttgtgggcagtggaactgacaccaaattttggactgatcgttggctgcacggtaaaagaattgcagattgggctccttcgctatttgctgctgttaacaagaaggttgtgaggtcaagaacagtccaggaagcaattaatggtagcagttgggttcttgacattaggggcaatttctcctctatggctttctccgaattcttccagatctgggatcttgttcgggaggttcaactgttatcagatgttccagatcag

SEQ ID NO: 20910 - DNA, 2345 bp, Zea Mays
gccactatagccaggtggttcataagagtcagaacaagtcagaagaaactgcaatcaatcacaatgaagtcgcacgactcattcgtacgcacagtaatttcatgaatcttacgaatatcgagtccatctcagagagagatacatgtgcatccttgtggatggaagctgttataaatatgccatccattgataaagatataatttattccaaaaaaaaccgcacaaagcagagtgaacatgaatgcgtgggaagctacggagagggagaaccatgtaaccgagcgtgggctcgtccccgtcagcaccggcgacgtgcaggtgcagcacgagcatggcggcgcggccaaggcggacggcttcgtgcgcagggaccagtcatgccggtacgctagcagcgacatcccaagcgatctgctggtcaaggtgggcggcgtcaacttccacgtccacaagcacccgatggtctctcggagcggccgcctggcccggctcgtcgacgaggcgtcggccctgcacggccccgtcgccgccaccgtggtcgagctgccggacctgccgggcggccacggcgcgttcgagctggccgccaagttctgctacggcgtggtggtggacatcacggccgccaacgtcgccgcgctacgctgcgccgccgagtacctggagatgacggaggaggtggaggagggcaacctggccttccgcgccgaggcgttcctgagctacgtggtggcgtcctcctggcgggactccgtcgtcgtcctccgcgcctgcgagggcctctccccgtgggccgacgacctccacctcgtgcgccgctgcagcgagtccgtcgcggcgaaggcgtgcaccaaccccagggccgtgcgctgggcctacgctggcaggacgtcgtcgtcgcccaataagtcgcccacggccggcaccgccggcaacagccagcagcagcccgggccgccggccgactggtgggtggaggacatctgcgtgctgaggatcgatcacttcgtgcgcgtcgtcaccgccgtccaggccagaggcatgcggcccgacctcatcggggccgccatcacgcgctatgcctccaaatggctctcctccgctggcctcctcgccaacaaggacagccctgcatcgcgtggcggcggcggcggcggtgtgctccaaatgatcgttgccagcgagggcgatgacgcgcagacggagacggaggctagtgagcagaggaggatcgtcgagagcctgatcagcatcatcccaccgcagaaggactgcctctcatgcagcttcctcctccggctgctccgcctggccgtcgtcctcaaggcggcgccggcgctggtcacggaggtggagaagcacgtgggcatgcagctcgaccaggcgaaactgctcgacatcctggtgccgtcgtacccctacgcccgctccgaggccgcctacgacgtcgacctcgtgcagcggctggtggagcaattcgtggtgcaggagcagtccggccgcgacaaggagaagcaggaacagcaaagctccagagcgctgcgcatggcgagcctgatggacagctacctctccgaggtgtcccgggaccggaacctgtccctgggcaaattccaggcgctggccgagtcgttgccggagtcggcacgcgtgtgccacgacgagctgtaccgcgccgtcgactcctacctgaaagcgcatccgacggtgaccgagcacgagcggaagcggctgtgccgggcggtggactgcgggaagctgtcgcgggaggcgcggctccacgcggcgcagaacgagcggctaccgctccgcgtcgtggtgcaggtgctgctgtcggagcaggcaaagatggccggcgcgctcggcagggcgggcaagaaggaggacgacgtcaacgcgctcaggcaggaggtggagagcgtgaacgcgaagtacatggagctgcagcgcgaggtggagctcctgcaacggcaggtggagcgcatgctgccgccctccgcggcggcgaagcaacataacgtgtccgggtggagcagcggatggaagaagctcgggagactcggcaggattcaggtggagcagccggtggtgacggcggcaaccggcgagacagcgaacaggcaacttcggcggaggagaaactccgcatcgtgagctgtacacaagtttgagcaatggagttttcagcttcttttaattacgtgttgtggctgtgatagacgacatcgtgtttgtataaaaaaactcgtagattgcaggatacttaatgtaagtaatagtttgtatatttttcttgacgagacatttcattttcttcataaattatattattgcctttttctagt

SEQ ID NO: 20911 - DNA, 739 bp, Zea Mays
taaacaagctgcagcgctgatgctcaaggagaaggttcacaggataccggttgtgaatgagcagcagcacgtgatcggaatcgtgactcgctccgacgtgttccaggctcttgaggccaccagcaaagcatgggagtgagtcagtgaggtacggtaggcttgttctcgccagatgttaccccctttatttgtgtagtgatctcagcagagagtatagttatgctaccaatatggcgagaagaggacagaaaaagctaggtgtttatactggaatcgctgcaatacaagacaaataatggtgtaaatttatggagttactgaaacttatacgggctgattggttcgccggccgcgctaagccgggcgggtgcgagcctggccagccaggtaaccaaacatgtgattgcataaagtcaatgcatacgatggctcaggattaaatggtgcgggtaaccaatcacatggataaagaaggtatttatgaaggatgacgaactgttcgtcactacatgtaacacacaatagatagaatagattgtatgtcctttaggatttagacatgtacaagatacatcactatcggaattcggctctttgccgagtgtcaaatgttttatcgagtgttttttattttcgccactcggcaaaaaaagtgtcaaatgttctttaggttttgtaagagtttttcgacaaaaaataaataaataaaataaaagaaagtctttcaatccatttatca

SEQ ID NO: 20912 - DNA, 710 bp, Zea Mays
taaacaagctgcagcgctgatgctcaaggagaaggttcacaggataccggttgtgaatgagcagcagcacgtgatcggctcttgaggccaccagcaaagcatgggagtgagtcagtgaggtacggtaggcttgttctcgccagatgttaccccctttatttgtgtagtgatctcagcagagagtatagttatgctaccaatatggcgagaagaggacagaaaaagctaggtgtttatactggaatcgctgcaatacaagacaaataatggtgtaaatttatggagttactgaaacttatacgggctgattggttcgccggccgcgctaagccgggcgggtgcgagcctggccagccaggtaaccaaacatgtgattgcataaagtcaatgcatacgatggctcaggattaaatggtgcgggtaaccaatcacatggataaagaaggtatttatgaaggatgacgaactgttcgtcactacatgtaacacacaatagatagaatagattgtatgtcctttaggatttagacatgtacaagatacatcactatcggaattcggctctttgccgagtgtcaaatgttttatcgagtgttttttattttcgccactcggcaaaaaaagtgtcaaatgttctttaggttttgtaagagtttttcgacaaaaaataaataaataaaataaaagaaagtctttcaatccatttatca

SEQ ID NO: 20913 - DNA, 500 bp, Zea Mays
taaacaagctgcagcgctgatgctcaaggagaaggttcacaggataccggttgtgaatgagcagcagcacgtgatcggaatcgtgactcgctccgacgtgttccaggctcttgaggccaccagcaaagcatgggagtgagtcagtgaggtaaccaaacatgtgattgcataaagtcaatgcatacgatggctcaggattaaatggtgcgggtaaccaatcacatggataaagaaggtatttatgaaggatgacgaactgttcgtcactacatgtaacacacaatagatagaatagattgtatgtcctttaggatttagacatgtacaagatacatcactatcggaattcggctctttgccgagtgtcaaatgttttatcgagtgttttttattttcgccactcggcaaaaaaagtgtcaaatgttctttaggttttgtaagagtttttcgacaaaaaataaataaataaaataaaagaaagtctttcaatccatttatca

SEQ ID NO: 20914 - DNA, 463 bp, Zea Mays
ctccctctccaagctgtcgccgcccaccgccttagttcgcggacaacggcctcatcttcctcgtgtagaccaccagagccccctcctcttcctcgtgcagagcactggatccccatcttcctcacgcagagcacgaacataggagatttgcaaagcctcatcaagacggcaagagatctacaaagtccaaatcagtaaccatctgctgaaggtgatacaatgtaacatgtgcaagcataagaagttttttcagaagatcaaagggatggagctctgtggtgctaaatagatgtttaaaggaaagtcatgatgagcaaagccattgttgtcatgaatcaaaaaatcctaccatgtccatggcaaaaagttgtttctgcatacatattttaagggttgtgttttattgaatctgtttgattttattgatttttaatatttctattttatttgagatttgatgatg

SEQ ID NO: 20915 - DNA, 2036 bp, Zea Mays
cactaacctaaccagctgcctctcctaagctatccgccgtcgccgtcgccgtcgccgtcgctctcctctctcctccgagccgctgctccctctcccctgcgcgccgccactgtgggcatctacaccgctgccgctctcctctctcctctgtgccgcagctcttctctctccctctcccctgcgcgccgccactgcgggcaccctgcacgccgccactgcgggcaccctgcacgccgccgctgcgtggccctacacgccaccgctacgggtgccctacgcgccgccgtcattgctccagctcttctctcctctgtttcccagccaatgccgccgctctaactccccaaggcatcgccccgacgacggctcaacgacgccccgtcgacgcctcgcggacgccctgcgccgcagcgggcgctttacgctccatggcaaggtaccggcatctgggccaattcgccccactaggagggaaacaaactgctgcacaacttcccggggactggatctccattggccacagcacccagtggctctggtactccgtgtacgcaacctgcttccattaagaattggtcatcatggcgtgggagctcattgaagttccgggcaacttgaatccctctctcaaagactcttcagttgatgtggtggccgccaagattgatcccaagttagccaatactctcattaggcagttaagccaggtgtgccctttggagaatctgaggcatgtaaagcgtgtacgtcgacgtactgaatgtggtggaaaatctgagttatcaataatcctatgtgtttctactgggtctgaaacttgtaacatacagttctctgaagatctacagaagatagtggatacttatcagctgagtcctttcaccgcaaaagttgccaggtgttgtgctacatcaaaagaggagtgggaggaacagtgcaaactttggccaacatcttaccatcctgcacatgaccttggtattgtccgtggatttcaagaggaggaattaccatcaatatttaattgcatgaaggctgctattcagttatcaaaggcaggcaatgctgcaatcattgttgatccatcaagcatgcaaatagttgcaaaggccactgaccatacacacaagcatgatacggctgaagaagggaacacattttctgaagcgaatgcagatgttacctgcccttggaatacatcgactgatgatgacaacaatctgtcacttccaggatcctttcttcctaaactcaacagtttgaacatggaaatcccatgtataaatccttggggatggatgaaaaaaaggacttgtgagcagaagccatcgccatgggatggctgttctgcatggcatcctctgagacatgctcccatggctgccattgaaaatgctgctgagagggacagaacgatgtttccttcttcgatttcaataaccaagccagattcagatggcagtcccgagaactgctgcgacaatgaaccagcaaaaaggctgaagacggatacaaaagataatgagaaaccggcatctgaatcatctggtggcgacctgtttgagaccagcagaccatatctctgcacagggtttgatatctaccttgtttgggaaccatgcacaatgtgtgcgatggcgcttgtgcatcataggttcaagcgcgtgttctacgccttccccaatcctgtggccggagcactcggtggagtctacaggttgcatggggagaggagtctaaaccatcactataatgtgtttagggtttcagtacctgaggcgtacttgaatgggttgaactgttattcgaaggaatgctgatccaacacctttccgtttttatttagaaaaaaagaggatccaagactgttttccttttttttttatttttggcacaagggcttcatattaggcctaaacttgcccatctgtattattaaatgttttggtaacaaatgtgtttatggatgtaaacgttggtgctatttttttattagtttacttaaatttaatgaaatatgatcggtttcaaacatg

SEQ ID NO: 20916 - DNA, 2038 bp, Zea Mays
taaccagctgcctctcctaagctatccgccgtcgccgtcgccgtcgccgtcgctctcctctctcctccgagccgctgctccctctcccctgcgcgccgccactgtgggcatctacaccgctgccgctctcctctctcctctgtgccgcagctcttctctctccctctcccctgcgcgccgccactgcgggcaccctgcacgccgccactgcgggcaccctgcacgccgccgctgcgtggccctacacgccaccgctacgggtgccctacgcgccgccgtcattgctccagctcttctctcctctgtttcccagccaatgccgccgctctaactccccaaggcatcgccccgacgacggctcaacgacgccccgtcgacgcctcgcggacgccctgcgccgcagcgggcgctttacgctccatggcaaggtaccggcatctgggccaattcgccccactaggagggaaacaaactgctgcacaacttcccggggactggatctccattggccacagcacccagtggctctggtactccgtgtacgcaacctgcttccattaagaattggtcatcatggcgtgggagctcattgaagttccgggcaacttgaatccctctctcaaagactcttcagttgatgtggtggccgccaagattgatcccaagttagccaatactctcattaggcagttaagccaggtgtgccctttggagaatctgaggcatgtaaagcgtgtacgtcgacgtactgaatgtggtggaaaatctgagttatcaataatcctatgtgtttctactgggtctgaaacttgtaacatacagttctctgaagatctacagaagatagtggatacttatcagctgagtcctttcaccgcaaaatctttaacaggttgccaggtgttgtgctacatcaaaagaggagtgggaggaacagtgcaaactttggccaacatcttaccatcctgcacatgaccttggtattgtccgtggatttcaagaggaggaattaccatcaatatttaattgcatgaaggctgctattcagttatcaaaggcaggcaatgctgcaatcattgttgatccatcaagcatgcaaatagttgcaaaggccactgaccatacacacaagcatgatacggctgaagaagggaacacattttctgaagcgaatgcagatgttacctgcccttggaatacatcgactgatgatgacaacaatctgtcacttccaggatcctttcttcctaaactcaacagtttgaacatggaaatcccatgtataaatccttggggatggatgaaaaaaaggacttgtgagcagaagccatcgccatgggatggctgttctgcatggcatcctctgagacatgctcccatggctgccattgaaaatgctgctgagagggacagaacgatgtttccttcttcgatttcaataaccaagccagattcagatggcagtcccgagaactgctgcgacaatgaaccagcaaaaaggctgaagacggatacaaaagataatgagaaaccggcatctgaatcatctggtggcgacctgtttgagaccagcagaccatatctctgcacagggtttgatatctaccttgtttgggaaccatgcacaatgtgtgcgatggcgcttgtgcatcataggttcaagcgcgtgttctacgccttccccaatcctgtggccggagcactcggtggagtctacaggttgcatggggagaggagtctaaaccatcactataatgtgtttagggtttcagtacctgaggcgtacttgaatgggttgaactgttattcgaaggaatgctgatccaacacctttccgtttttatttagaaaaaaagaggatccaagactgttttccttttttttttatttttggcacaagggcttcatattaggcctaaacttgcccatctgtattattaaatgttttggtaacaaatgtgtttatggatgtaaacgttggtgctatttttttattagtttacttaaatttaatgaaatatgatcggtttcaaacatg

SEQ ID NO: 20917 - DNA, 2021 bp, Zea Mays
ccagctgcctctcctaagctatccgccgtcgccgtcgccgtcgccgtcgctctcctctctcctccgagccgctgctccctctcccctgcgcgccgccactgtgggcatctacaccgctgccgctctcctctctcctctgtgccgcagctcttctctctccctctcccctgcgcgccgccactgcgggcaccctgcacgccgccactgcgggcaccctgcacgccgccgctgcgtggccctacacgccaccgctacgggtgccctacgcgccgccgtcattgctccagctcttctctcctctgtttcccagccaatgccgccgctctaactccccaaggcatcgccccgacgacggctcaacgacgccccgtcgacgcctcgcggacgccctgcgccgcagcgggcgctttacgctccatggcaaggtaccggcatctgggccaattcgccccactaggagggaaacaaactgctgcacaacttcccggggactggatctccattggccacagcacccagtggctctggtactccgtgtacgcaacctgcttccattaagaattggtcatcatggcgtgggagctcattgaagttccgggcaacttgaatccctctctcaaagactcttcagttgatgtggtggccgccaagattgatcccaagttagccaatactctcattagttaagccaggtgtgccctttggagaatctgaggcatgtaaagcgtgtacgtcgacgtactgaatgtggtggaaaatctgagttatcaataatcctatgtgtttctactgggtctgaaacttgtaacatacagttctctgaagatctacagaagatagtggatacttatcagctgagtcctttcaccgcaaaagttgccaggtgttgtgctacatcaaaagaggagtgggaggaacagtgcaaactttggccaacatcttaccatcctgcacatgaccttggtattgtccgtggatttcaagaggaggaattaccatcaatatttaattgcatgaaggctgctattcagttatcaaaggcaggcaatgctgcaatcattgttgatccatcaagcatgcaaatagttgcaaaggccactgaccatacacacaagcatgatacggctgaagaagggaacacattttctgaagcgaatgcagatgttacctgcccttggaatacatcgactgatgatgacaacaatctgtcacttccaggatcctttcttcctaaactcaacagtttgaacatggaaatcccatgtataaatccttggggatggatgaaaaaaaggacttgtgagcagaagccatcgccatgggatggctgttctgcatggcatcctctgagacatgctcccatggctgccattgaaaatgctgctgagagggacagaacgatgtttccttcttcgatttcaataaccaagccagattcagatggcagtcccgagaactgctgcgacaatgaaccagcaaaaaggctgaagacggatacaaaagataatgagaaaccggcatctgaatcatctggtggcgacctgtttgagaccagcagaccatatctctgcacagggtttgatatctaccttgtttgggaaccatgcacaatgtgtgcgatggcgcttgtgcatcataggttcaagcgcgtgttctacgccttccccaatcctgtggccggagcactcggtggagtctacaggttgcatggggagaggagtctaaaccatcactataatgtgtttagggtttcagtacctgaggcgtacttgaatgggttgaactgttattcgaaggaatgctgatccaacacctttccgtttttatttagaaaaaaagaggatccaagactgttttccttttttttttatttttggcacaagggcttcatattaggcctaaacttgcccatctgtattattaaatgttttggtaacaaatgtgtttatggatgtaaacgttggtgctatttttttattagtttacttaaatttaatgaaatatgatcggtttcaaacatg

SEQ ID NO: 20918 - DNA, 2000 bp, Zea Mays
ccagctgcctctcctaagctatccgccgtcgccgtcgccgtcgccgtcgctctcctctctcctccgagccgctgctccctctcccctgcgcgccgccactgtgggcatctacaccgctgccgctctcctctctcctctgtgccgcagctcttctctctccctctcccctgcgcgccgccactgcgggcaccctgcacgccgccactgcgggcaccctgcacgccgccgctgcgtggccctacacgccaccgctacgggtgccctacgcgccgccgtcattgctccagctcttctctcctctgtttcccagccaatgccgccgctctaactccccaaggcatcgccccgacgacggctcaacgacgccccgtcgacgcctcgcggacgccctgcgccgcagcgggcgctttacgctccatggcaaggtaccggcatctgggccaattcgccccactaggagggaaacaaactgctgcacaacttcccggggactggatctccattggccacagcacccagtggctctggtactccgtgtacgcaacctgcttccattaagaattggtcatcatggcgtgggagctcattgaagttccgggcaacttgaatccctctctcaaagactcttcagttgatgtggtggccgccaagattgatcccaagttagccaatactctcattaggcagttaagccaggtgtgccctttggagaatctgaggcatgtaaagcgtgaaaatctgagttatcaataatcctatgtgtttctactgggtctgaaacttgtaacatacagttctctgaagatctacagaagatagtggatacttatcagctgagtcctttcaccgcaaaagttgccaggtgttgtgctacatcaaaagaggagtgggaggaacagtgcaaactttggccaacatcttaccatcctgcacatgaccttggtattgtccgtggatttcaagaggaggaattaccatcaatatttaattgcatgaaggctgctattcagttatcaaaggcaggcaatgctgcaatcattgttgatccatcaagcatgcaaatagttgcaaaggccactgaccatacacacaagcatgatacggctgaagaagggaacacattttctgaagcgaatgcagatgttacctgcccttggaatacatcgactgatgatgacaacaatctgtcacttccaggatcctttcttcctaaactcaacagtttgaacatggaaatcccatgtataaatccttggggatggatgaaaaaaaggacttgtgagcagaagccatcgccatgggatggctgttctgcatggcatcctctgagacatgctcccatggctgccattgaaaatgctgctgagagggacagaacgatgtttccttcttcgatttcaataaccaagccagattcagatggcagtcccgagaactgctgcgacaatgaaccagcaaaaaggctgaagacggatacaaaagataatgagaaaccggcatctgaatcatctggtggcgacctgtttgagaccagcagaccatatctctgcacagggtttgatatctaccttgtttgggaaccatgcacaatgtgtgcgatggcgcttgtgcatcataggttcaagcgcgtgttctacgccttccccaatcctgtggccggagcactcggtggagtctacaggttgcatggggagaggagtctaaaccatcactataatgtgtttagggtttcagtacctgaggcgtacttgaatgggttgaactgttattcgaaggaatgctgatccaacacctttccgtttttatttagaaaaaaagaggatccaagactgttttccttttttttttatttttggcacaagggcttcatattaggcctaaacttgcccatctgtattattaaatgttttggtaacaaatgtgtttatggatgtaaacgttggtgctatttttttattagtttacttaaatttaatgaaatatgatcggtttcaaacatg

SEQ ID NO: 20919 - DNA, 1626 bp, Zea Mays
cgccttagcgcctaagcgacgctaaggtaccggcatctgggccaattcgccccactaggagggaaacaaactgctgcacaacttcccggggactggatctccattggccacagcacccagtggctctggtactccgtgtacgcaacctgcttccattaagaattggtcatcatggcgtgggagctcattgaagttccgggcaacttgaatccctctctcaaagactcttcagttgatgtggtggccgccaagattgatcccaagttagccaatactctcattaggcagttaagccaggtgtgccctttggagaatctgaggcatgtaaagcgtgtacgtcgacgtactgaatgtggtggaaaatctgagttatcaataatcctatgtgtttctactgggtctgaaacttgtaacatacagttctctgaagatctacagaagatagtggatacttatcagctgagtcctttcaccgcaaaagttgccaggtgttgtgctacatcaaaagaggagtgggaggaacagtgcaaactttggccaacatcttaccatcctgcacatgaccttggtattgtccgtggatttcaagaggaggaattaccatcaatatttaattgcatgaaggctgctattcagttatcaaaggcaggcaatgctgcaatcattgttgatccatcaagcatgcaaatagttgcaaaggccactgaccatacacacaagcatgatacggctgaagaagggaacacattttctgaagcgaatgcagatgttacctgcccttggaatacatcgactgatgatgacaacaatctgtcacttccaggatcctttcttcctaaactcaacagtttgaacatggaaatcccatgtataaatccttggggatggatgaaaaaaaggacttgtgagcagaagccatcgccatgggatggctgttctgcatggcatcctctgagacatgctcccatggctgccattgaaaatgctgctgagagggacagaacgatgtttccttcttcgatttcaataaccaagccagattcagatggcagtcccgagaactgctgcgacaatgaaccagcaaaaaggctgaagacggatacaaaagataatgagaaaccggcatctgaatcatctggtggcgacctgtttgagaccagcagaccatatctctgcacagggtttgatatctaccttgtttgggaaccatgcacaatgtgtgcgatggcgcttgtgcatcataggttcaagcgcgtgttctacgccttccccaatcctgtggccggagcactcggtggagtctacaggttgcatggggagaggagtctaaaccatcactataatgtgtttagggtttcagtacctgaggcgtacttgaatgggttgaactgttattcgaaggaatgctgatccaacacctttccgtttttatttagaaaaaaagaggatccaagactgttttccttttttttttatttttggcacaagggcttcatattaggcctaaacttgcccatctgtattattaaatgttttggtaacaaatgtgtttatggatgtaaacgttggtgctatttttttattagtttacttaaatttaatgaaatatgatcggtttcaaacatg

SEQ ID NO: 20920 - DNA, 1625 bp, Zea Mays
ctaagcgacgctaaggtaccggcatctgggccaattcgccccactaggagggaaacaaactgctgcacaacttcccggggactggatctccattggccacagcacccagtggctctggtactccgtgtacgcaacctgcttccattaagaattggtcatcatggcgtgggagctcattgaagttccgggcaacttgaatccctctctcaaagactcttcagttgatgtggtggccgccaagattgatcccaagttagccaatactctcattaggcagttaagccaggtgtgccctttggagaatctgaggcatgtaaagcgtgtacgtcgacgtactgaatgtggtggaaaatctgagttatcaataatcctatgtgtttctactgggtctgaaacttgtaacatacagttctctgaagatctacagaagatagtggatacttatcagctgagtcctttcaccgcaaaatctttaacaggttgccaggtgttgtgctacatcaaaagaggagtgggaggaacagtgcaaactttggccaacatcttaccatcctgcacatgaccttggtattgtccgtggatttcaagaggaggaattaccatcaatatttaattgcatgaaggctgctattcagttatcaaaggcaggcaatgctgcaatcattgttgatccatcaagcatgcaaatagttgcaaaggccactgaccatacacacaagcatgatacggctgaagaagggaacacattttctgaagcgaatgcagatgttacctgcccttggaatacatcgactgatgatgacaacaatctgtcacttccaggatcctttcttcctaaactcaacagtttgaacatggaaatcccatgtataaatccttggggatggatgaaaaaaaggacttgtgagcagaagccatcgccatgggatggctgttctgcatggcatcctctgagacatgctcccatggctgccattgaaaatgctgctgagagggacagaacgatgtttccttcttcgatttcaataaccaagccagattcagatggcagtcccgagaactgctgcgacaatgaaccagcaaaaaggctgaagacggatacaaaagataatgagaaaccggcatctgaatcatctggtggcgacctgtttgagaccagcagaccatatctctgcacagggtttgatatctaccttgtttgggaaccatgcacaatgtgtgcgatggcgcttgtgcatcataggttcaagcgcgtgttctacgccttccccaatcctgtggccggagcactcggtggagtctacaggttgcatggggagaggagtctaaaccatcactataatgtgtttagggtttcagtacctgaggcgtacttgaatgggttgaactgttattcgaaggaatgctgatccaacacctttccgtttttatttagaaaaaaagaggatccaagactgttttccttttttttttatttttggcacaagggcttcatattaggcctaaacttgcccatctgtattattaaatgttttggtaacaaatgtgtttatggatgtaaacgttggtgctatttttttattagtttacttaaatttaatgaaatatgatcggtttcaaacatg

SEQ ID NO: 20921 - DNA, 1596 bp, Zea Mays
gcgacgctaaggtaccggcatctgggccaattcgccccactaggagggaaacaaactgctgcacaacttcccggggactggatctccattggccacagcacccagtggctctggtactccgtgtacgcaacctgcttccattaagaattggtcatcatggcgtgggagctcattgaagttccgggcaacttgaatccctctctcaaagactcttcagttgatgtggtggccgccaagattgatcccaagttagccaatactctcattaggcagttaagccaggtgtgccctttggagaatctgaggcatgtaaagcgtgaaaatctgagttatcaataatcctatgtgtttctactgggtctgaaacttgtaacatacagttctctgaagatctacagaagatagtggatacttatcagctgagtcctttcaccgcaaaatctttaacaggttgccaggtgttgtgctacatcaaaagaggagtgggaggaacagtgcaaactttggccaacatcttaccatcctgcacatgaccttggtattgtccgtggatttcaagaggaggaattaccatcaatatttaattgcatgaaggctgctattcagttatcaaaggcaggcaatgctgcaatcattgttgatccatcaagcatgcaaatagttgcaaaggccactgaccatacacacaagcatgatacggctgaagaagggaacacattttctgaagcgaatgcagatgttacctgcccttggaatacatcgactgatgatgacaacaatctgtcacttccaggatcctttcttcctaaactcaacagtttgaacatggaaatcccatgtataaatccttggggatggatgaaaaaaaggacttgtgagcagaagccatcgccatgggatggctgttctgcatggcatcctctgagacatgctcccatggctgccattgaaaatgctgctgagagggacagaacgatgtttccttcttcgatttcaataaccaagccagattcagatggcagtcccgagaactgctgcgacaatgaaccagcaaaaaggctgaagacggatacaaaagataatgagaaaccggcatctgaatcatctggtggcgacctgtttgagaccagcagaccatatctctgcacagggtttgatatctaccttgtttgggaaccatgcacaatgtgtgcgatggcgcttgtgcatcataggttcaagcgcgtgttctacgccttccccaatcctgtggccggagcactcggtggagtctacaggttgcatggggagaggagtctaaaccatcactataatgtgtttagggtttcagtacctgaggcgtacttgaatgggttgaactgttattcgaaggaatgctgatccaacacctttccgtttttatttagaaaaaaagaggatccaagactgttttccttttttttttatttttggcacaagggcttcatattaggcctaaacttgcccatctgtattattaaatgttttggtaacaaatgtgtttatggatgtaaacgttggtgctatttttttattagtttacttaaatttaatgaaatatgatcggtttcaaacatg

SEQ ID NO: 20922 - DNA, 1212 bp, Zea Mays
gggaagctttgatgttgtcattttttattgaaagtgataatatgtgatactggcatgatgggttaggttgccaggtgttgtgctacatcaaaagaggagtgggaggaacagtgcaaactttggccaacatcttaccatcctgcacatgaccttggtattgtccgtggatttcaagaggaggaattaccatcaatatttaattgcatgaaggctgctattcagttatcaaaggcaggcaatgctgcaatcattgttgatccatcaagcatgcaaatagttgcaaaggccactgaccatacacacaagcatgatacggctgaagaagggaacacattttctgaagcgaatgcagatgttacctgcccttggaatacatcgactgatgatgacaacaatctgtcacttccaggatcctttcttcctaaactcaacagtttgaacatggaaatcccatgtataaatccttggggatggatgaaaaaaaggacttgtgagcagaagccatcgccatgggatggctgttctgcatggcatcctctgagacatgctcccatggctgccattgaaaatgctgctgagagggacagaacgatgtttccttcttcgatttcaataaccaagccagattcagatggcagtcccgagaactgctgcgacaatgaaccagcaaaaaggctgaagacggatacaaaagataatgagaaaccggcatctgaatcatctggtggcgacctgtttgagaccagcagaccatatctctgcacagggtttgatatctaccttgtttgggaaccatgcacaatgtgtgcgatggcgcttgtgcatcataggttcaagcgcgtgttctacgccttccccaatcctgtggccggagcactcggtggagtctacaggttgcatggggagaggagtctaaaccatcactataatgtgtttagggtttcagtacctgaggcgtacttgaatgggttgaactgttattcgaaggaatgctgatccaacacctttccgtttttatttagaaaaaaagaggatccaagactgttttccttttttttttatttttggcacaagggcttcatattaggcctaaacttgcccatctgtattattaaatgttttggtaacaaatgtgtttatggatgtaaacgttggtgctatttttttattagtttacttaaatttaatgaaatatgatcggtttcaaacatg

SEQ ID NO: 20923 - DNA, 1216 bp, Zea Mays
ctttgatgttgtcattttttattgaaagtgataatatgtgatactggcatgatgggttagtctttaacaggttgccaggtgttgtgctacatcaaaagaggagtgggaggaacagtgcaaactttggccaacatcttaccatcctgcacatgaccttggtattgtccgtggatttcaagaggaggaattaccatcaatatttaattgcatgaaggctgctattcagttatcaaaggcaggcaatgctgcaatcattgttgatccatcaagcatgcaaatagttgcaaaggccactgaccatacacacaagcatgatacggctgaagaagggaacacattttctgaagcgaatgcagatgttacctgcccttggaatacatcgactgatgatgacaacaatctgtcacttccaggatcctttcttcctaaactcaacagtttgaacatggaaatcccatgtataaatccttggggatggatgaaaaaaaggacttgtgagcagaagccatcgccatgggatggctgttctgcatggcatcctctgagacatgctcccatggctgccattgaaaatgctgctgagagggacagaacgatgtttccttcttcgatttcaataaccaagccagattcagatggcagtcccgagaactgctgcgacaatgaaccagcaaaaaggctgaagacggatacaaaagataatgagaaaccggcatctgaatcatctggtggcgacctgtttgagaccagcagaccatatctctgcacagggtttgatatctaccttgtttgggaaccatgcacaatgtgtgcgatggcgcttgtgcatcataggttcaagcgcgtgttctacgccttccccaatcctgtggccggagcactcggtggagtctacaggttgcatggggagaggagtctaaaccatcactataatgtgtttagggtttcagtacctgaggcgtacttgaatgggttgaactgttattcgaaggaatgctgatccaacacctttccgtttttatttagaaaaaaagaggatccaagactgttttccttttttttttatttttggcacaagggcttcatattaggcctaaacttgcccatctgtattattaaatgttttggtaacaaatgtgtttatggatgtaaacgttggtgctatttttttattagtttacttaaatttaatgaaatatgatcggtttcaaacatg

SEQ ID NO: 20924 - DNA, 1079 bp, Zea Mays
atgccattggtgctggcaagccttggtattgtccgtggatttcaagaggaggaattaccatcaatatttaattgcatgaaggctgctattcagttatcaaaggcaatgctgcaatcattgttgatccatcaagcatgcaaatagttgcaaaggccactgaccatacacacaagcatgatacggctgaagaagggaacacattttctgaagcgaatgcagatgttacctgcccttggaatacatcgactgatgatgacaacaatctgtcacttccaggatcctttcttcctaaactcaacagtttgaacatggaaatcccatgtataaatccttggggatggatgaaaaaaaggacttgtgagcagaagccatcgccatgggatggctgttctgcatggcatcctctgagacatgctcccatggctgccattgaaaatgctgctgagagggacagaacgatgtttccttcttcgatttcaataaccaagccagattcagatggcagtcccgagaactgctgcgacaatgaaccagcaaaaaggctgaagacggatacaaaagataatgagaaaccggcatctgaatcatctggtggcgacctgtttgagaccagcagaccatatctctgcacagggtttgatatctaccttgtttgggaaccatgcacaatgtgtgcgatggcgcttgtgcatcataggttcaagcgcgtgttctacgccttccccaatcctgtggccggagcactcggtggagtctacaggttgcatggggagaggagtctaaaccatcactataatgtgtttagggtttcagtacctgaggcgtacttgaatgggttgaactgttattcgaaggaatgctgatccaacacctttccgtttttatttagaaaaaaagaggatccaagactgttttccttttttttttatttttggcacaagggcttcatattaggcctaaacttgcccatctgtattattaaatgttttggtaacaaatgtgtttatggatgtaaacgttggtgctatttttttattagtttacttaaatttaatgaaatatgatcggtttcaaacatg

SEQ ID NO: 20925 - DNA, 593 bp, Zea Mays
aaatattggtaatatattgtataaatctagtcaaatttaagaatgttttactaacatttatgcacggaacgagtgatttttataaaaataacaaaggaaaacattttttatataataaataaataaaaacggaaaagaaaatcacagcgaaggagtaggcagtcagcggccagcgccagcgaggtcgaggcatcggcgcatcgcatcgcccactttgctttgctcgctcgtctcttcgctttccgccgtggtgcatggccagtgaattccaattcgttctccctctccggctctccccaccaaaaacgtgaggcccgccggaacgagcaagcatattcacggaggcgtggatccagaggctcccccgcagcgcttgtccagaagcagccgacgcggcgtctgtccgcgggccgacggtcggtcgggcggcctgtcgtgtataaatggcggacgaggaggggggcagcggcgttgcgggagggagaggaggagaagcgctggcggcatctgctcccaacggggaccgctcagggaatagccccctcgccgtgccgtcgttctctgcaggaactagagggagaagcaacaactag

SEQ ID NO: 20926 - DNA, 591 bp, Zea Mays
aaatattggtaatatattgtataaatctagtcaaatttaagaatgttttactaacatttatgcacggaacgagtgatttttataaaaataacaaaggaaaacattttttatataataaataaataaaaacggaaaagaaaatcacagcgaaggagtaggcagtcagcggccagcgccagcgaggtcgaggcatcggcgcatcgcatcgcccactttgctttgctcgctcgtctcttcgctttccgccgtggtgcatggccagtgaattccaattcgttctccctctccggctctccccaccaaaaacgtgaggcccgccggaacgagcaagcatattcacggaggcgtggatccagaggctcccccgcagcgcttgtccagaagcagccgacgcggcgtctgtccgcgggccgacggtcggtcgggcggcctgtcgtgtataaatggcggacgaggaggggggcagcggcgttgcgggagggagaggaggagaagcgctggcggcatctgctcccaacggggaccgctcagggaatagccccctcgccgtgccgtcgttctctgcagacaaccagggtgagcgaaggcagc

SEQ ID NO: 20927 - DNA, 1131 bp, Zea Mays
ttattttaagatgacagaggcttccatagatcaagcaccatgccgttgccggtggtgattaagaatgatgaaattgccaatgaaactgctggaccatcaagttcggaaaggtccagaactgagcgtcgtcggcaaaataatccagctgatgatcctgctaaacagttacttgatgaaaggattccaataaaaaagaaggtgcatatatcttacactcttcatgtacctatttcttttcagtagcttagttccttttgttttgccatgcaggcatctgaaatacacatctgtttatgaactgggaattgaatcattgaaaattgcactaactaatgtataatagtgttcaaagtatgactttctttgaattaccagtatatttgcttaataaaaaattaaaaataattgaaccattgaatattgagtgtggaatgaatattaatgttgaccgtagctgtaagttactgatttaatgaatgttgagtaatttacatgaagatatgcctttacatgtatttgagtttttgtgtttatgaaatcttccttaggtaaatgttatcgtgcataattagttaagaattttcatgttttctttaaaaaacactaaattaaatagcctcctataacttttagaggaggatgtcgctaaatgtcatagcccgctatttacaacaatgacccccaatcaaaggaagaaaatgttcctgtgacagattctttatgtggcaggcagttttacattttgacttaagatgatttgaccatagattgattattttctttcatctttatcatactgatgactggtctttcctctagacataatttagcaacaaactgtcatccaatctattggaatagtaaaccctcaccctaacaggggttgggtggtgtattaatagacttgagtactgggccaggcccattacagaggggtgagacagtaattacatagggaacaatcccaaaccctaaacgggtattctaacacccccccccggcagtcacaactctatcctgtacagatgttgagactggagcgaaagtctaaaaatacactcgacggtaaccctttggtgaagatgtcagcgaattgcagcgtggtggggacgctgagaacccgaacgtcac

SEQ ID NO: 20928 - DNA, 1748 bp, Zea Mays
gtcctgttagacaggaggttgtgtttttgtgtgtttaaaatgtaatctttgtgtcaggttgtttcctgaggggcttcttttgcctctcaggtttgtttgtactttcgtttcttcttaatgaaataacacgcagctctcctgcattgttcgggaaatcctatgtgtctttgaggcaataagttgctccaaagtactccaagcaaatttttttgaacttgacgtatatctggatagtccaaacagattccaatatgatcaatgttgcatttttcgccacaagccttactgcatatttttcttgtgaaaaagacctatatttgctcactggtttgaattataatcatgtttatctttccaatctcaaatgttcttcaggacatacacatgtggcagaagcgctaaaagtaccaattcatatactgtttaccatgccatggacgccaactagtaaatttcctcatcccttttctcgtgtgaagcagcctgctggatatagaattggggtccaaagatcgatgttgttggattttgcttccttgatcttgcttccaattacgtgcctcctgaaccacttgtgaaatggcttcaagctggtgacaagcccatatatgttggttttggtagccttccagttcaagacccacaaaagatgactgaaattattgtcaaagcgctggaaattactggacagagaggtatcattaacaaaggctggggtggccttggaaccttggcagaaccaaaagattttgtatatctactagacaactgccctcatgactggctttttctgcaatgcaaagcagtggtgcatcatggtggcgctggaacaacagccgcaggtctcaaagcagcggtaagtgctctctccatgccttatttcaatgtaaaatagttgtactcttctcaaaggcactggagagttgcaagaggaaagggagtctaagaagacatacaaaccacagtcccaataaggtgatgttgactggatgaagacctaccaaaaaacagctagtgtcctacgactattgtacctttctttggtgaccaacctttctggggcgaccgggtgcatgcaagagggctagggcctccgcctattccagttgatcagtttggtttgcagaagttggtggatgctataaagttcatgacgaaaccagtggtgaaagacaaggctgtagaggtggcgaaagccatggaatctgaagacggggtgacaggtgccgtcagggcattcctcagacacctgccttcgaaaaccgaggaaccgagcccaccgcaaccgtcaggctttcttgaattcttcttaggcccactaagtaaatgtttgggatgctcttagtgcagaacgcaatctgtcacggattggcgccttggcggcataccacaagagtttgccgtgatatcccatgcaaagaagctctggctcttcttttctttgtttccttttcctttcctgcgggtatttgtagtgtgcaaagagtggttgcttgtggtgtgcatggtctgcagcggatggcctgcgccctgtggtgcgtgtcattttgatgtttgccgtggagcaggcgacgatttcacgtccaacccgtacgttctgtatatttatgaaagaaagaaacagaggctaggttttccttgttctaatatggttaccgctaaatagctgatagcggctttgtaatggaaagtgagcgctatagcggacattgggttttaatagcagaatattaaaaatagataaaaat

SEQ ID NO: 20929 - DNA, 1908 bp, Zea Mays
ttgtgtttttgtgtgtttaaaatgtaatctttgtgtcaggttgtttcctgaggggcttcttttgcctctcaggtttgtttgtactttcgtttcttcttaatgaaataacacgcagctctcctgcattgttcgggaaatcctatgtgtctttgaggcaataagttgctccaaagtactccaagcaaatttttttgaacttgacgtatatctggatagtccaaacagattccaatatgatcaatgttgcatttttcgccacaagccttactgcatatttttcttgtgaaaaagacctatatttgctcactggtttgaattataatcatgtttatctttccaatctcaaatgttcttcaggacatacacatgtggcagaagcgctaaaagtaccaattcatatactgtttaccatgccatggacgccaactagtaaatttcctcatcccttttctcgtgtgaagcagcctgctggatatagactttcatatcaaattgtggactcgatgatttggcttggaataagggatatgataaatgagttcagaaagaaaaagttgaagctgcgtccagtaacatatctaagtggttctcagggttctggcaatgacatccctcatggatacatttggagtcctcatctagtcccgaaaccaaaagattggggtccaaagatcgatgttgttggattttgcttccttgatcttgcttccaattacgtgcctcctgaaccacttgtgaaatggcttcaagctggtgacaagcccatatatgttggttttggtagccttccagttcaagacccacaaaagatgactgaaattattgtcaaagcgctggaaattactggacagagaggtatcattaacaaaggctggggtggccttggaaccttggcagaaccaaaagattttgtatatctactagacaactgccctcatgactggctttttctgcaatgcaaagcagtggtgcatcatggtggcgctggaacaacagccgcaggtctcaaagcagcggtaagtgctctctccatgccttatttcaatgtaaaatagttgtactcttctcaaaggcactggagagttgcaagaggaaagggagtctaagaagacatacaaaccacagtcccaataaggtgatgttgactggatgaagacctaccaaaaaacagctagtgtcctacgactattgtacctttctttggtgaccaacctttctggggcgaccgggtgcatgcaagagggctagggcctccgcctattccagttgatcagtttggtttgcagaagttggtggatgctataaagttcatgacgaaaccagtggtgaaagacaaggctgtagaggtggcgaaagccatggaatctgaagacggggtgacaggtgccgtcagggcattcctcagacacctgccttcgaaaaccgaggaaccgagcccaccgcaaccgtcaggctttcttgaattcttcttaggcccactaagtaaatgtttgggatgctcttagtgcagaacgcaatctgtcacggattggcgccttggcggcataccacaagagtttgccgtgatatcccatgcaaagaagctctggctcttcttttctttgtttccttttcctttcctgcgggtatttgtagtgtgcaaagagtggttgcttgtggtgtgcatggtctgcagcggatggcctgcgccctgtggtgcgtgtcattttgatgtttgccgtggagcaggcgacgatttcacgtccaacccgtacgttctgtatatttatgaaagaaagaaacagaggctaggttttccttgttctaatatggttaccgctaaatagctgatagcggctttgtaatggaaagtgagcgctatagcggacattgggttttaatagcagaatattaaaaatagataaaaat

SEQ ID NO: 20930 - DNA, 1318 bp, Zea Mays
cgccacaagccttactgcatatttttcttgtgaaaaagacctatatttgctcactggtttgaattataatcatgtttatctttccaatctcaaatgttcttcaggacatacacatgtggcagaagcgctaaaagtaccaattcatatactgtttaccatgccatggacgccaactagtaaatttcctcatcccttttctcgtgtgaagcagcctgctggatatagaattggggtccaaagatcgatgttgttggattttgcttccttgatcttgcttccaattacgtgcctcctgaaccacttgtgaaatggcttcaagctggtgacaagcccatatatgttggttttggtagccttccagttcaagacccacaaaagatgactgaaattattgtcaaagcgctggaaattactggacagagaggtatcattaacaaaggctggggtggccttggaaccttggcagaaccaaaagattttgtatatctactagacaactgccctcatgactggctttttctgcaatgcaaagcagtggtgcatcatggtggcgctggaacaacagccgcaggtctcaaagcagcgtgtcctacgactattgtacctttctttggtgaccaacctttctggggcgaccgggtgcatgcaagagggctagggcctccgcctattccagttgatcagtttggtttgcagaagttggtggatgctataaagttcatgacgaaaccagtggtgaaagacaaggctgtagaggtggcgaaagccatggaatctgaagacggggtgacaggtgccgtcagggcattcctcagacacctgccttcgaaaaccgaggaaccgagcccaccgcaaccgtcaggctttcttgaattcttcttaggcccactaagtaaatgtttgggatgctcttagtgcagaacgcaatctgtcacggattggcgccttggcggcataccacaagagtttgccgtgatatcccatgcaaagaagctctggctcttcttttctttgtttccttttcctttcctgcgggtatttgtagtgtgcaaagagtggttgcttgtggtgtgcatggtctgcagcggatggcctgcgccctgtggtgcgtgtcattttgatgtttgccgtggagcaggcgacgatttcacgtccaacccgtacgttctgtatatttatgaaagaaagaaacagaggctaggttttccttgttctaatatggttaccgctaaatagctgatagcggctttgtaatggaaagtgagcgctatagcggacattgggttttaatagcagaatattaaaaatagataaaaat

SEQ ID NO: 20931 - DNA, 1965 bp, Zea Mays
catatttttcttgtgaaaaagacctatatttgctcactggtttgaattataatcatgtttatctttccaatctcaaatgttcttcaggacatacacatgtggcagaagcgctaaaagtaccaattcatatactgtttaccatgccatggacgccaactagtaaatttcctcatcccttttctcgtgtgaagcagcctgctggatatagactttcatatcaaattgtggactcgatgatttggcttggaataagggatatgataaatgagttcagaaagaaaaagttgaagctgcgtccagtaacatatctaagtggttctcagggttctggcaatgacatccctcatggatacatttggagtcctcatctagtcccgaaaccaaaagattggggtccaaagatcgatgttgttggattttgcttccttgatcttgcttccaattacgtgcctcctgaaccacttgtgaaatggcttcaagctggtgacaagcccatatatgttggttttggtagccttccagttcaagacccacaaaagatgactgaaattattgtcaaagcgctggaaattactggacagagaggtatcattaacaaaggctggggtggccttggaaccttggcagaaccaaaagattttgtatatctactagacaactgccctcatgactggctttttctgcaatgcaaagcagtggtgcatcatggtggcgctggaacaacagccgcaggtctcaaagcagcggtaagtgctctctccatgccttatttcaatgtaaaatagttgtactcttctcaaaggcactggagagttgcaagaggaaagggagtctaagaagacatacaaaccacagtcccaataaggtgatgttgactggatgaagacctaccaaaaaacagctaggtatgagcctacgaccagcaatgaaaacaagaatcatgggcctttggcccctgccatacaccacgtcgttgctcatctctaatgtcctgcatgatgatgctgaaattaggtgaagcaccctcatatatacagccgctcctatgcttctaccatccaatgcccaccaaagaattaaaccactgtttgcttattttcctttcagcctatttatggcacttttgacacgtttgcattttgatgggatcaggcataagtctaaaataccttccttgctgttattctcggaggtttcttgtactcaatttagttgtagtctacgatttgcagtgtcctacgactattgtacctttctttggtgaccaacctttctggggcgaccgggtgcatgcaagagggctagggcctccgcctattccagttgatcagtttggtttgcagaagttggtggatgctataaagttcatgacgaaaccagtggtgaaagacaaggctgtagaggtggcgaaagccatggaatctgaagacggggtgacaggtgccgtcagggcattcctcagacacctgccttcgaaaaccgaggaaccgagcccaccgcaaccgtcaggctttcttgaattcttcttaggcccactaagtaaatgtttgggatgctcttagtgcagaacgcaatctgtcacggattggcgccttggcggcataccacaagagtttgccgtgatatcccatgcaaagaagctctggctcttcttttctttgtttccttttcctttcctgcgggtatttgtagtgtgcaaagagtggttgcttgtggtgtgcatggtctgcagcggatggcctgcgccctgtggtgcgtgtcattttgatgtttgccgtggagcaggcgacgatttcacgtccaacccgtacgttctgtatatttatgaaagaaagaaacagaggctaggttttccttgttctaatatggttaccgctaaatagctgatagcggctttgtaatggaaagtgagcgctatagcggacattgggttttaatagcagaatattaaaaatagataaaaat

SEQ ID NO: 20932 - DNA, 1542 bp, Zea Mays
gttcttcaggacatacacatgtggcagaagcgctaaaagtaccaattcatatactgtttaccatgccatggacgccaactagtaaatttcctcatcccttttctcgtgtgaagcagcctgctggatatagactttcatatcaaattgtggactcgatgatttggcttggaataagggatatgataaatgagttcagaaagaaaaagttgaagctgcgtccagtaacatatctaagtggttctcagggttctggcaatgacatccctcatggatacatttggagtcctcatctagtcccgaaaccaaaagattggggtccaaagatcgatgttgttggattttgcttccttgatcttgcttccaattacgtgcctcctgaaccacttgtgaaatggcttcaagctggtgacaagcccatatatccagttcaagacccacaaaagatgactgaaattattgtcaaagcgctggaaattactggacagagaggtatcattaacaaaggctggggtggccttggaaccttggcagaaccaaaagattttgtatatctactagacaactgccctcatgactggctttttctgcaatgcaaagcagtggtgcatcatggtggcgctggaacaacagccgcaggtctcaaagcagcggtaagtgctctctccatgccttatttcaatgtaaaatagttgtactcttctcaaaggcactggagagttgcaagaggaaagggagtctaagaagacatacaaaccacagtcccaataaggtgatgttgactggatgaagacctaccaaaaaacagctagtgtcctacgactattgtacctttctttggtgaccaacctttctggggcgaccgggtgcatgcaagagggctagggcctccgcctattccagttgatcagtttggtttgcagaagttggtggatgctataaagttcatgacgaaaccagtggtgaaagacaaggctgtagaggtggcgaaagccatggaatctgaagacggggtgacaggtgccgtcagggcattcctcagacacctgccttcgaaaaccgaggaaccgagcccaccgcaaccgtcaggctttcttgaattcttcttaggcccactaagtaaatgtttgggatgctcttagtgcagaacgcaatctgtcacggattggcgccttggcggcataccacaagagtttgccgtgatatcccatgcaaagaagctctggctcttcttttctttgtttccttttcctttcctgcgggtatttgtagtgtgcaaagagtggttgcttgtggtgtgcatggtctgcagcggatggcctgcgccctgtggtgcgtgtcattttgatgtttgccgtggagcaggcgacgatttcacgtccaacccgtacgttctgtatatttatgaaagaaagaaacagaggctaggttttccttgttctaatatggttaccgctaaatagctgatagcggctttgtaatggaaagtgagcgctatagcggacattgggttttaatagcagaatattaaaaatagataaaaat

SEQ ID NO: 20933 - DNA, 1549 bp, Zea Mays
aggacatacacatgtggcagaagcgctaaaagtaccaattcatatactgtttaccatgccatggacgccaactagtaaatttcctcatcccttttctcgtgtgaagcagcctgctggatatagactttcatatcaaattgtggactcgatgatttggcttggaataagggatatgataaatgagttcagaaagaaaaagttgaagctgcgtccagtaacatatctaagtggttctcagggttctggcaatgacatccctcatggatacatttggagtcctcatctagtcccgaaaccaaaagattggggtccaaagatcgatgttgttggattttgcttccttgatcttgcttccaattacgtgcctcctgaaccacttgtgaaatggcttcaagctggtgacaagcccatatatgttggttttggtagccttttcaagacccacaaaagatgactgaaattattgtcaaagcgctggaaattactggacagagaggtatcattaacaaaggctggggtggccttggaaccttggcagaaccaaaagattttgtatatctactagacaactgccctcatgactggctttttctgcaatgcaaagcagtggtgcatcatggtggcgctggaacaacagccgcaggtctcaaagcagcggtaagtgctctctccatgccttatttcaatgtaaaatagttgtactcttctcaaaggcactggagagttgcaagaggaaagggagtctaagaagacatacaaaccacagtcccaataaggtgatgttgactggatgaagacctaccaaaaaacagctagtgtcctacgactattgtacctttctttggtgaccaacctttctggggcgaccgggtgcatgcaagagggctagggcctccgcctattccagttgatcagtttggtttgcagaagttggtggatgctataaagttcatgacgaaaccagtggtgaaagacaaggctgtagaggtggcgaaagccatggaatctgaagacggggtgacaggtgccgtcagggcattcctcagacacctgccttcgaaaaccgaggaaccgagcccaccgcaaccgtcaggctttcttgaattcttcttaggcccactaagtaaatgtttgggatgctcttagtgcagaacgcaatctgtcacggattggcgccttggcggcataccacaagagtttgccgtgatatcccatgcaaagaagctctggctcttcttttctttgtttccttttcctttcctgcgggtatttgtagtgtgcaaagagtggttgcttgtggtgtgcatggtctgcagcggatggcctgcgccctgtggtgcgtgtcattttgatgtttgccgtggagcaggcgacgatttcacgtccaacccgtacgttctgtatatttatgaaagaaagaaacagaggctaggttttccttgttctaatatggttaccgctaaatagctgatagcggctttgtaatggaaagtgagcgctatagcggacattgggttttaatagcagaatattaaaaatagataaaaat

SEQ ID NO: 20934 - DNA, 1363 bp, Zea Mays
cacatgtggcagaagcgctaaaagtaccaattcatatactgtttaccatgccatggacgccaactagtaaatttcctcatcccttttctcgtgtgaagcagcctgctggatatagaattggggtccaaagatcgatgttgttggattttgcttccttgatcttgcttccaattacgtgcctcctgaaccacttgtgaaatggcttcaagctggtgacaagcccatatatgttggttttggtagccttttcaagacccacaaaagatgactgaaattattgtcaaagcgctggaaattactggacagagaggtatcattaacaaaggctggggtggccttggaaccttggcagaaccaaaagattttgtatatctactagacaactgccctcatgactggctttttctgcaatgcaaagcagtggtgcatcatggtggcgctggaacaacagccgcaggtctcaaagcagcggtaagtgctctctccatgccttatttcaatgtaaaatagttgtactcttctcaaaggcactggagagttgcaagaggaaagggagtctaagaagacatacaaaccacagtcccaataaggtgatgttgactggatgaagacctaccaaaaaacagctagtgtcctacgactattgtacctttctttggtgaccaacctttctggggcgaccgggtgcatgcaagagggctagggcctccgcctattccagttgatcagtttggtttgcagaagttggtggatgctataaagttcatgacgaaaccagtggtgaaagacaaggctgtagaggtggcgaaagccatggaatctgaagacggggtgacaggtgccgtcagggcattcctcagacacctgccttcgaaaaccgaggaaccgagcccaccgcaaccgtcaggctttcttgaattcttcttaggcccactaagtaaatgtttgggatgctcttagtgcagaacgcaatctgtcacggattggcgccttggcggcataccacaagagtttgccgtgatatcccatgcaaagaagctctggctcttcttttctttgtttccttttcctttcctgcgggtatttgtagtgtgcaaagagtggttgcttgtggtgtgcatggtctgcagcggatggcctgcgccctgtggtgcgtgtcattttgatgtttgccgtggagcaggcgacgatttcacgtccaacccgtacgttctgtatatttatgaaagaaagaaacagaggctaggttttccttgttctaatatggttaccgctaaatagctgatagcggctttgtaatggaaagtgagcgctatagcggacattgggttttaatagcagaatattaaaaatagataaaaat

SEQ ID NO: 20935 - DNA, 1236 bp, Zea Mays
cacatgtggcagaagcgctaaaagtaccaattcatatactgtttaccatgccatggacgccaactagtaaatttcctcatcccttttctcgtgtgaagcagcctgctggatatagaccagttcaagacccacaaaagatgactgaaattattgtcaaagcgctggaaattactggacagagaggtatcattaacaaaggctggggtggccttggaaccttggcagaaccaaaagattttgtatatctactagacaactgccctcatgactggctttttctgcaatgcaaagcagtggtgcatcatggtggcgctggaacaacagccgcaggtctcaaagcagcggtaagtgctctctccatgccttatttcaatgtaaaatagttgtactcttctcaaaggcactggagagttgcaagaggaaagggagtctaagaagacatacaaaccacagtcccaataaggtgatgttgactggatgaagacctaccaaaaaacagctagtgtcctacgactattgtacctttctttggtgaccaacctttctggggcgaccgggtgcatgcaagagggctagggcctccgcctattccagttgatcagtttggtttgcagaagttggtggatgctataaagttcatgacgaaaccagtggtgaaagacaaggctgtagaggtggcgaaagccatggaatctgaagacggggtgacaggtgccgtcagggcattcctcagacacctgccttcgaaaaccgaggaaccgagcccaccgcaaccgtcaggctttcttgaattcttcttaggcccactaagtaaatgtttgggatgctcttagtgcagaacgcaatctgtcacggattggcgccttggcggcataccacaagagtttgccgtgatatcccatgcaaagaagctctggctcttcttttctttgtttccttttcctttcctgcgggtatttgtagtgtgcaaagagtggttgcttgtggtgtgcatggtctgcagcggatggcctgcgccctgtggtgcgtgtcattttgatgtttgccgtggagcaggcgacgatttcacgtccaacccgtacgttctgtatatttatgaaagaaagaaacagaggctaggttttccttgttctaatatggttaccgctaaatagctgatagcggctttgtaatggaaagtgagcgctatagcggacattgggttttaatagcagaatattaaaaatagataaaaat

SEQ ID NO: 20936 - DNA, 1377 bp, Zea Mays
cacatgtggcagaagcgctaaaagtaccaattcatatactgtttaccatgccatggactaaatttcctcatcccttttctcgtgtgaagcagcctgctggatatagactttcatatcaaattgtggactcgatgatttggcttggaataagggatatgataaatgagttcagaaagaaaaagttgaagctgcgtccagtaacatatctaagtggttctcagggttctggcaatgacatccctcatggatacatttggagtcctcatctagtcccgaaaccaaaagattggggtccaaagatcgatgttgttggattttgcttccttgatcttgcttccaattacgtgcctcctgaaccacttgtgaaatggcttcaagctggtgacaagcccatatatgttggttttggtagccttccagttcaagacccacaaaagatgactgaaattattgtcaaagcgctggaaattactggacagagaggtatcattaacaaaggctggggtggccttggaaccttggcagaaccaaaagattttgtatatctactagacaactgccctcatgactggctttttctgcaatgcaaagcagtggtgcatcatggtggcgctggaacaacagccgcaggtctcaaagcagcgtgtcctacgactattgtacctttctttggtgaccaacctttctggggcgaccgggtgcatgcaagagggctagggcctccgcctattccagttgatcagtttggtttgcagaagttggtggatgctataaagttcatgacgaaaccagtggtgaaagacaaggctgtagaggtggcgaaagccatggaatctgaagacggggtgacaggtgccgtcagggcattcctcagacacctgccttcgaaaaccgaggaaccgagcccaccgcaaccgtcaggctttcttgaattcttcttaggcccactaagtaaatgtttgggatgctcttagtgcagaacgcaatctgtcacggattggcgccttggcggcataccacaagagtttgccgtgatatcccatgcaaagaagctctggctcttcttttctttgtttccttttcctttcctgcgggtatttgtagtgtgcaaagagtggttgcttgtggtgtgcatggtctgcagcggatggcctgcgccctgtggtgcgtgtcattttgatgtttgccgtggagcaggcgacgatttcacgtccaacccgtacgttctgtatatttatgaaagaaagaaacagaggctaggttttccttgttctaatatggttaccgctaaatagctgatagcggctttgtaatggaaagtgagcgctatagcggacattgggttttaatagcagaatattaaaaatagataaaaat

SEQ ID NO: 20937 - DNA, 1536 bp, Zea Mays
cacatgtggcagaagcgctaaaagtaccaattcatatactgtttaccatgccatggactaaatttcctcatcccttttctcgtgtgaagcagcctgctggatatagactttcatatcaaattgtggactcgatgatttggcttggaataagggatatgataaatgagttcagaaagaaaaagttgaagctgcgtccagtaacatatctaagtggttctcagggttctggcaatgacatccctcatggatacatttggagtcctcatctagtcccgaaaccaaaagattggggtccaaagatcgatgttgttggattttgcttccttgatcttgcttccaattacgtgcctcctgaaccacttgtgaaatggcttcaagctggtgacaagcccatatatgttggttttggtagccttccagttcaagacccacaaaagatgactgaaattattgtcaaagcgctggaaattactggacagagaggtatcattaacaaaggctggggtggccttggaaccttggcagaaccaaaagattttgtatatctactagacaactgccctcatgactggctttttctgcaatgcaaagcagtggtgcatcatggtggcgctggaacaacagccgcaggtctcaaagcagcggtaagtgctctctccatgccttatttcaatgtaaaatagttgtactcttctcaaaggcactggagagttgcaagaggaaagggagtctaagaagacatacaaaccacagtcccaataaggtgatgttgactggatgaagacctaccaaaaaacagctagtgtcctacgactattgtacctttctttggtgaccaacctttctggggcgaccgggtgcatgcaagagggctagggcctccgcctattccagttgatcagtttggtttgcagaagttggtggatgctataaagttcatgacgaaaccagtggtgaaagacaaggctgtagaggtggcgaaagccatggaatctgaagacggggtgacaggtgccgtcagggcattcctcagacacctgccttcgaaaaccgaggaaccgagcccaccgcaaccgtcaggctttcttgaattcttcttaggcccactaagtaaatgtttgggatgctcttagtgcagaacgcaatctgtcacggattggcgccttggcggcataccacaagagtttgccgtgatatcccatgcaaagaagctctggctcttcttttctttgtttccttttcctttcctgcgggtatttgtagtgtgcaaagagtggttgcttgtggtgtgcatggtctgcagcggatggcctgcgccctgtggtgcgtgtcattttgatgtttgccgtggagcaggcgacgatttcacgtccaacccgtacgttctgtatatttatgaaagaaagaaacagaggctaggttttccttgttctaatatggttaccgctaaatagctgatagcggctttgtaatggaaagtgagcgctatagcggacattgggttttaatagcagaatattaaaaatagataaaaat

SEQ ID NO: 20938 - DNA, 764 bp, Zea Mays
ctaatgtcctgcatgatgatgctgaaattagtgtcctacgactattgtacctttctttggtgaccaacctttctggggcgaccgggtgcatgcaagagggctagggcctccgcctattccagttgatcagtttggtttgcagaagttggtggatgctataaagttcatgacgaaaccagtggtgaaagacaaggctgtagaggtggcgaaagccatggaatctgaagacggggtgacaggtgccgtcagggcattcctcagacacctgccttcgaaaaccgaggaaccgagcccaccgcaaccgtcaggctttcttgaattcttcttaggcccactaagtaaatgtttgggatgctcttagtgcagaacgcaatctgtcacggattggcgccttggcggcataccacaagagtttgccgtgatatcccatgcaaagaagctctggctcttcttttctttgtttccttttcctttcctgcgggtatttgtagtgtgcaaagagtggttgcttgtggtgtgcatggtctgcagcggatggcctgcgccctgtggtgcgtgtcattttgatgtttgccgtggagcaggcgacgatttcacgtccaacccgtacgttctgtatatttatgaaagaaagaaacagaggctaggttttccttgttctaatatggttaccgctaaatagctgatagcggctttgtaatggaaagtgagcgctatagcggacattgggttttaatagcagaatattaaaaatagataaaaat

SEQ ID NO: 20939 - DNA, 2345 bp, Zea Mays
aaacacgaggacctcgcgacgcgactccacccacacgcacagctccatgcctgcccacgcggacgcctgagcatcagaccagaggagagctatatctactccgctcgccaccaccaccaccccagtccagcccagcccaccacacccagctctctcccttctccaccagacacagccaggccttgtcttcttcttcctcccgattcgtgtttttttcctttctttttcgctgctgcaaaatatcgccgtttcctatctcttatcccccacgcatctcccgcctcgcctccgccacacgttccgcgcctccacacctctctcgatctcgcgcgtctggatttttccgacccgatcttttccccccgcatcagctgtcttctccttgcgccgggccaggccgcctctccctcctcccttcgcttgcgtctcactactcatcactgctactgctacttcgttcgagagggatacggataccccattgccggcccactgcgcgagagagattttggtgcgactacagagtcccaatcctataccccggccccaaaactcttctctgctaccagtaaccgttccttccgccggaatcgattttgtgagggggcgagttccgccaccgtgggcgggggtcgtcgtcggcgaccacaacgcccagcaggcggcgcagctccctccgccgcccgccgctgccgcggtggtccctcgcaacgaggcgcccgccgtcgtaacgagaactgtggtggctcctgcggcgcccgaggacgagcagctggcggtgaacacccgtgacttgatgcacctctggcggctcgtccaggagaaggacggtggcccgtcgtggatccacatgatggaccgcaccttgccgaccatgaggtaccaagcctggcggagagacccaccgaatggtccaccacagtaccgcagtagcactatctttgaggatgcatcaccagaggttgtgagagatttcttctgggacgacgagttccgggtgaagaacagctgggatgacatgcttcttcagtacgagacactggaacagtgcgccaagactggaaccatggttgtccggtgggtcaggaagttcccgttcttctgcagcgacagggagtacatcataggccgcaggatatgggcatctgggaagacgttttactgtgtgaccaagggcgtgcctcgtccctctgttccaagacaaaacaaacctcgtcgtgtggacttgtactactcgagctggtgcatccgtccagttgaatcaagaaaaggcgacggtgcaatgactgcatgtgaggtgctcttattccaccatgaagatatggggatcccatgggagattgcgaagctcggtgtccggcaggggatgtggggctgcgtcaagaggatagagcctggccttcgggcataccaggttgcgaggactgctggagagcctatctcaaaacatgccgccatggcgcatgttaccaccaggttcgatgccgacgagctcgtcacggaagacagcgcggaggccagttcatccagtgacaacaacaagaccgccgaggttgagaagccaaagcactggacaaacaacatacccaaggttctcatgatcggcggcgccgtcgccctggcttgcaccttcgacggtggattgatgaccaaggccgccatattcggcacggcgaggaggtttgcagggccaggaaggcggtaggtggatggagctggtcaccctagagcaatgccatgctaatcatgtgtagcaaagcgttggttggatggatgcctggaagtgccctaagcagtcctttttgtagcaatgcactgcagaggacagaatgccttgtctagttgctcagtctagacatcatcctcatgttgcagataaggtggtgtgctcttattacagatcagtatcagttgagaaaaatagatccctgcacatcccgagaaaggaaatggacgacaaagatccagcgacacagagaagtgtacgtaagcagaccgggcatgcttgtgctgctgctgcagccgcgccgccgggttagagccagctggataggttagaaatgtagcattattatgaggacaaagtgtacgatgaacaaggttcattctggcagctgtacgacgaacaaggttcattgtcgttagatgaaacgacaagaattcactgctgtttagtaacaagaattcttggtcttgtagctctggcatctatttgttctcccctatggaaactagatgttgacctttttggcagttggtgcaggatttttgcacgtacaagtttttacccaatgctgtgtccaatccagctacgctgtgtgtttggaataagaaattttttctct

SEQ ID NO: 20940 - DNA, 1690 bp, Zea Mays
ccactgtgcaacgagcaaggtgaaatcaactatgagtgtgcagcccatccgaggccattttgacgcaggcctagctgggccacaggtggttggaaatcatgtaggctcaaaggtaaaagtagtccagttcatagccgagccgcaggagagaagagaagcaccgcaaccctaggtcgccgcctcttttcctctccactcgtccgcgggacgcgacgcgacgacaccggagggttttctgcggggatttgtttgtcgccaactcgccggcagccaagatgaggccggtcttcgtggggaacctggactatgacacccgccactcggagctcgaccgcctcttctaccgctacggcagggtcgagcgcatcgacatcaagtcaggaactaccagggcaaaacatagcttccccagggctcttcaactccttccattcaataacctggccatcatttccttcacttgaaaccatctgttcatgtgccctgatgcaaactgttactgctgctcgagcatgtttagcgggatcgtgccatcagtaccatcatgccttaccatgccacgactagaagtatcaccaacatgacaacatgctatgtgtactacattgataagcaagagttctatttatggcgaagcatgtccaatgtctccggtcattctttcttactttggatataagttgttcaacaccatgcttaggtcttatcatgaatggaatctaccactctagtgctcttcataccatcagaactatgcaggctatgcttttgtctactttgaggatgaacgtgatggcaatgatgctatacgggctcttgatggttatccatttggccctggcagacgcaggctttcagtagagtggtcacggggtgagcaagctggtagacgtgatggcaacaaaccagaagcaaatactaagccaactaggacactgtttgtcattaactttgatccaatgaacacaagagtcagtgacatcgaaaggcacttcacaccatttgggaacatatcaagtgttcggataaggaagaactttgcttttgttcagtttgaaactatggaagaagcaagaaaggctcttgaagctactcatgctaccacccttttggacagggtgatttctgtcgagtacgccttcagggatgatagtgaagtgagtgataggtacggcagcccaagaagaggtggtggctatggtaggcggggtgatagcccagtgtaccggtcacgtcctagtccagactatggtcgcccagcaagtcctgtatatggttcatatgacggtcctggtcctgttcgtgatcgctatcggagatctcctgcttatcgatcaaggtccccacctgcgaaacgaagagcatatgactaatcgagaaccctctgttatgccatatatggcctaggaacaccctgtagcaagaacttactgtacctgtaccggagcgtcaccttaatgtccttaaattcccgtgtttaatggtctgtacatggttatgctatgcgactgtcaggtttcactgcatgcaatattgtcatttggctgctaccctttgtttggccttgggatgctcgatctctattttcagatttttaccgtccttgtcatccgctgctatctgttaatagagtgcattggcgatttcatataccggccaagcgtgctagttccaggtttgttaatgggag

SEQ ID NO: 20941 - DNA, 1312 bp, Zea Mays
ccactgtgcaacgagcaaggtgaaatcaactatgagtgtgcagcccatccgaggccattttgacgcaggcctagctgggccacaggtggttggaaatcatgtaggctcaaaggtaaaagtagtccagttcatagccgagccgcaggagagaagagaagcaccgcaaccctaggtcgccgcctcttttcctctccactcgtccgcgggacgcgacgcgacgacaccggagggttttctgcggggatttgtttgtcgccaactcgccggcagccaagatgaggccggtcttcgtggggaacctggactatgacacccgccactcggagctcgaccgcctcttctaccgctacggcagggtcgagcgcatcgacatcaagtcaggctatgcttttgtctactttgaggatgaacgtgatggcaatgatgctatacgggctcttgatggttatccatttggccctggcagacgcaggctttcagtagagtggtcacggggtgagcaagctggtagacgtgatggcaacaaaccagaagcaaatactaagccaactaggacactgtttgtcattaactttgatccaatgaacacaagagtcagtgacatcgaaaggcacttcacaccatttgggaacatatcaagtgttcggataaggaagaactttgcttttgttcagtttgaaactatggaagaagcaagaaaggctcttgaagctactcatgctaccacccttttggacagggtgatttctgtcgagtacgccttcagggatgatagtgaagtgagtgataggtacggcagcccaagaagaggtggtggctatggtaggcggggtgatagcccagtgtaccggtcacgtcctagtccagactatggtcgcccagcaagtcctgtatatggttcatatgacggtcctggtcctgttcgtgatcgctatcggagatctcctgcttatcgatcaaggtccccacctgcgaaacgaagagcatatgactaatcgagaaccctctgttatgccatatatggcctaggaacaccctgtagcaagaacttactgtacctgtaccggagcgtcaccttaatgtccttaaattcccgtgtttaatggtctgtacatggttatgctatgcgactgtcaggtttcactgcatgcaatattgtcatttggctgctaccctttgtttggccttgggatgctcgatctctattttcagatttttaccgtccttgtcatccgctgctatctgttaatagagtgcattggcgatttcatataccggccaagcgtgctagttccaggtttgttaatgggag

SEQ ID NO: 20942 - DNA, 1909 bp, Zea Mays
atgagtgtgcagcccatccgaggccattttgacgcaggcctagctgggccacaggtggttggaaatcatgtaggctcaaaggtaaaagtagtccagttcatagccgagccgcaggagagaagagaagcaccgcaaccctaggtcgccgcctcttttcctctccactcgtccgcgggacgcgacgcgacgacaccggagggttttctgcggggatttgtttgtcgccaactcgccggcagccaagatgaggccggtcttcgtggggaacctggactatgacacccgccactcggagctcgaccgcctcttctaccgctacggcagggtcgagcgcatcgacatcaagtcaggtctgcctgcccttgcattccctccttttgcccacccccttgtttatcttcgtcttcggccggttttagattcgatctcatcttattgtgtacctagccacttggtatatcttcatgtttaaatttcaacgaattgaagaaaaaaaaggtggtggagtaagatactctgatactttgcggttgttgtgctgctccatgcgatgtaactgcagttgcaggcacagatgtttaaatctttactctggcgcaggaactaccagggcaaaacatagcttccccagggctcttcaactccttccattcaataacctggccatcatttccttcacttgaaaccatctgttcatgtgccctgatgcaaactgttactgctgctcgagcatgtttagcgggatcgtgccatcagtaccatcatgccttaccatgccacgactagaagtatcaccaacatgacaacatgctatgtgtactacattgataagcaagagttctatttatggcgaagcatgtccaatgtctccggtcattctttcttactttggatataagttgttcaacaccatgcttaggtcttatcatgaatggaatctaccactctagtgctcttcataccatcagaactatgcaggctatgcttttgtctactttgaggatgaacgtgatggcaatgatgctatacgggctcttgatggttatccatttggccctggcagacgcaggctttcagtagagtggtcacggggtgagcaagctggtagacgtgatggcaacaaaccagaagcaaatactaagccaactaggacactgtttgtcattaactttgatccaatgaacacaagagtcagtgacatcgaaaggcacttcacaccatttgggaacatatcaagtgttcggataaggaagaactttgcttttgttcagtttgaaactatggaagaagcaagaaaggctcttgaagctactcatgctaccacccttttggacagggtgatttctgtcgagtacgccttcagggatgatagtgaagtgagtgataggtacggcagcccaagaagaggtggtggctatggtaggcggggtgatagcccagtgtaccggtcacgtcctagtccagactatggtcgcccagcaagtcctgtatatggttcatatgacggtcctggtcctgttcgtgatcgctatcggagatctcctgcttatcgatcaaggtccccacctgcgaaacgaagagcatatgactaatcgagaaccctctgttatgccatatatggcctaggaacaccctgtagcaagaacttactgtacctgtaccggagcgtcaccttaatgtccttaaattcccgtgtttaatggtctgtacatggttatgctatgcgactgtcaggtttcactgcatgcaatattgtcatttggctgctaccctttgtttggccttgggatgctcgatctctattttcagatttttaccgtccttgtcatccgctgctatctgttaatagagtgcattggcgatttcatataccggccaagcgtgctagttccaggtttgttaatgggag

SEQ ID NO: 20943 - DNA, 1467 bp, Zea Mays
ctcaaaggtaaaagtagtccagttcatagccgagccgcaggagagaagagaagcaccgcaaccctaggtcgccgcctcttttcctctccactcgtccgcgggacgcgacgcgacgacaccggagggttttctgcggggatttgtttgtcgccaactcgccggcagccaagatgaggccggtcttcgtggggaacctggactatgacacccgccactcggagctcgaccgcctcttctaccgctacggcagggtcgagcgcatcgacatcaagtcaggaactaccagggcaaaacatagcttccccagggctcttcaactccttccattcaataacctggccatcatttccttcacttgaaaccatctgttcatgtgccctgatgcaaactgttactgctgctcgagcatgtttagcgggatcgtgccatcagtaccatcatgccttaccatgccacgactagaagtatcaccaacatgacaacatgctatgtgtactacattgataagcaagagttctatttatggcgaagcatgtccaatgtctccggtcattctttcttactttggatataagttgttcaacaccatgcttaggtcttatcatgaatggaatctaccactctagtgctcttcataccatcagaactatgcaggctatgcttttgtctactttgaggatgaacgtgatggcaatgatgctatacgggctcttgatggttatccatttggccctggcagacgcaggctttcagtagagtggtcacggggtgagcaagctggtagacgtgatggcaacaaaccagaagcaaatactaagccaactaggacactgtttgtcattaactttgatccaatgaacacaagagtcagtgacatcgaaaggcacttcacaccatttgggaacatatcaagtgttcggataaggaagaactttgcttttgttcagtttgaaactatggaagaagcaagaaaggctcttgaagctactcatgctaccacccttttggacagggtgatttctgtcgagtacgccttcagggatgatagtgaagtgagtgataggtacggcagcccaagaagaggtggtggctatgatctcctgcttatcgatcaaggtccccacctgcgaaacgaagagcatatgactaatcgagaaccctctgttatgccatatatggcctaggaacaccctgtagcaagaacttactgtacctgtaccggagcgtcaccttaatgtccttaaattcccgtgtttaatggtctgtacatggttatgctatgcgactgtcaggtttcactgcatgcaatattgtcatttggctgctaccctttgtttggccttgggatgctcgatctctattttcagatttttaccgtccttgtcatccgctgctatctgttaatagagtgcattggcgatttcatataccggccaagcgtgctagttccaggtttgttaatgggag

SEQ ID NO: 20944 - DNA, 1080 bp, Zea Mays
aaaagtagtccagttcatagccgagccgcaggagagaagagaagcaccgcaaccctaggtcgccgcctcttttcctctccactcgtccgcgggacgcgacgcgacgacaccggagggttttctgcggggatttgtttgtcgccaactcgccggcagccaagatgaggccggtcttcgtggggaacctggactatgacacccgccactcggagctcgaccgcctcttctaccgctacggcagggtcgagcgcatcgacatcaagtcaggctatgcttttgtctactttgaggatgaacgtgatggcaatgatgctatacgggctcttgatggttatccatttggccctggcagacgcaggctttcagtagagtggtcacggggtgagcaagctggtagacgtgatggcaacaaaccagaagcaaatactaagccaactaggacactgtttgtcattaactttgatccaatgaacacaagagtcagtgacatcgaaaggcacttcacaccatttgggaacatatcaagtgttcggataaggaagaactttgcttttgttcagtttgaaactatggaagaagcaagaaaggctcttgaagctactcatgctaccacccttttggacagggtgatttctgtcgagtacgccttcagggatgatagtgaagtgagtgataggtacggcagcccaagaagaggtggtggctatgatctcctgcttatcgatcaaggtccccacctgcgaaacgaagagcatatgactaatcgagaaccctctgttatgccatatatggcctaggaacaccctgtagcaagaacttactgtacctgtaccggagcgtcaccttaatgtccttaaattcccgtgtttaatggtctgtacatggttatgctatgcgactgtcaggtttcactgcatgcaatattgtcatttggctgctaccctttgtttggccttgggatgctcgatctctattttcagatttttaccgtccttgtcatccgctgctatctgttaatagagtgcattggcgatttcatataccggccaagcgtgctagttccaggtttgttaatgggag

SEQ ID NO: 20945 - DNA, 1220 bp, Zea Mays
agagaagcaccgcaaccctaggtcgccgcctcttttcctctccactcgtccgcgggacgcgacgcgacgacaccggagggttttctgcggggatttgtttgtcgccaactcgccggcagccaagatgaggccggtcttcgtggggaacctggactatgacacccgccactcggagctcgaccgcctcttctaccgctacggcagggtcgagcgcatcgacatcaagtcaggtcttatcatgaatggaatctaccactctagtgctcttcataccatcagaactatgcaggctatgcttttgtctactttgaggatgaacgtgatggcaatgatgctatacgggctcttgatggttatccatttggccctggcagacgcaggctttcagtagagtggtcacggggtgagcaagctggtagacgtgatggcaacaaaccagaagcaaatactaagccaactaggacactgtttgtcattaactttgatccaatgaacacaagagtcagtgacatcgaaaggcacttcacaccatttgggaacatatcaagtgttcggataaggaagaactttgcttttgttcagtttgaaactatggaagaagcaagaaaggctcttgaagctactcatgctaccacccttttggacagggtgatttctgtcgagtacgccttcagggatgatagtgaagtgagtgataggtacggcagcccaagaagaggtggtggctatggtaggcggggtgatagcccagtgtaccggtcacgtcctagtccagactatggtcgcccagcaagtcctgtatatggttcatatgacggtcctggtcctgttcgtgatcgctatcggagatctcctgcttatcgatcaaggtccccacctgcgaaacgaagagcatatgactaatcgagaaccctctgttatgccatatatggcctaggaacaccctgtagcaagaacttactgtacctgtaccggagcgtcaccttaatgtccttaaattcccgtgtttaatggtctgtacatggttatgctatgcgactgtcaggtttcactgcatgcaatattgtcatttggctgctaccctttgtttggccttgggatgctcgatctctattttcagatttttaccgtccttgtcatccgctgctatctgttaatagagtgcattggcgatttcatataccggccaagcgtgctagttccaggtttgttaatgggag

SEQ ID NO: 20946 - DNA, 1520 bp, Zea Mays
ccgcaaccctaggtcgccgcctcttttcctctccactcgtccgcgggacgcgacgcgacgacaccggagggttttctgcggggatttgtttgtcgccaactcgccggcagccaagatgaggccggtcttcgtggggaacctggactatgacacccgccactcggagctcgaccgcctcttctaccgctacggcagggtcgagcgcatcgacatcaagtcagggcaaaacatagcttccccagggctcttcaactccttccattcaataacctggccatcatttccttcacttgaaaccatctgttcatgtgccctgatgcaaactgttactgctgctcgagcatgtttagcgggatcgtgccatcagtaccatcatgccttaccatgccacgactagaagtatcaccaacatgacaacatgctatgtgtactacattgataagcaagagttctatttatggcgaagcatgtccaatgtctccggtcattctttcttactttggatataagttgttcaacaccatgcttaggtcttatcatgaatggaatctaccactctagtgctcttcataccatcagaactatgcaggctatgcttttgtctactttgaggatgaacgtgatggcaatgatgctatacgggctcttgatggttatccatttggccctggcagacgcaggctttcagtagagtggtcacggggtgagcaagctggtagacgtgatggcaacaaaccagaagcaaatactaagccaactaggacactgtttgtcattaactttgatccaatgaacacaagagtcagtgacatcgaaaggcacttcacaccatttgggaacatatcaagtgttcggataaggaagaactttgcttttgttcagtttgaaactatggaagaagcaagaaaggctcttgaagctactcatgctaccacccttttggacagggtgatttctgtcgagtacgccttcagggatgatagtgaagtgagtgataggtacggcagcccaagaagaggtggtggctatggtaggcggggtgatagcccagtgtaccggtcacgtcctagtccagactatggtcgcccagcaagtcctgtatatggttcatatgacggtcctggtcctgttcgtgatcgctatcggagatctcctgcttatcgatcaaggtccccacctgcgaaacgaagagcatatgactaatcgagaaccctctgttatgccatatatggcctaggaacaccctgtagcaagaacttactgtacctgtaccggagcgtcaccttaatgtccttaaattcccgtgtttaatggtctgtacatggttatgctatgcgactgtcaggtttcactgcatgcaatattgtcatttggctgctaccctttgtttggccttgggatgctcgatctctattttcagatttttaccgtccttgtcatccgctgctatctgttaatagagtgcattggcgatttcatataccggccaagcgtgctagttccaggtttgttaatgggag

SEQ ID NO: 20947 - DNA, 1614 bp, Zea Mays
caccgtttggtttgttcgtagggttttctgcggggatttgtttgtcgccaactcgccggcagccaagatgaggccggtcttcgtggggaacctggactatgacacccgccactcggagctcgaccgcctcttctaccgctacggcagggtcgagcgcatcgacatcaagtcaggtctgcctgcccttgcattccctccttttgcccacccccttgtttatcttcgtcttcggccggttttagattcgatctcatcttattgtgtacctagccacttggtatatcttcatgtttaaatttcaacgaattgaagaaaaaaaaggtggtggagtaagatactctgatactttgcggttgttgtgctgctccatgcgatgtaactgcagttgcaggcacagatgtttaaatctttactctggcgcaggaactaccagggcaaaacatagcttccccagggctcttcaactccttccattcaataacctggccatcatttccttcacttgaaaccatctgttcatgtgccctgatgcaaactgttactgctgctcgagcatgtttagcgggatcgtgccatcagtaccatcatgccttaccatgccacgactagaagtatcaccaacatgacaacatgctatgtgtactacattgataagcaagagttctatttatggcgaagcatgtccaatgtctccggtcattctttcttactttggatataagttgttcaacaccatgcttaggtcttatcatgaatggaatctaccactctagtgctcttcataccatcagaactatgcaggctatgcttttgtctactttgaggatgaacgtgatggcaatgatgctatacgggctcttgatggttatccatttggccctggcagacgcaggctttcagtagagtggtcacggggtgagcaagctggtagacgtgatggcaacaaaccagaagcaaatactaagccaactaggacactgtttgtcattaactttgatccaatgaacacaagagtcagtgacatcgaaaggcacttcacaccatttgggaacatatcaagtgttcggataaggaagaactttgcttttgttcagtttgaaactatggaagaagcaagaaaggctcttgaagctactcatgctaccacccttttggacagggtgatttctgtcgagtacgccttcagggatgatagtgaagtgagtgataggtacggcagcccaagaagaggtggtggctatgatctcctgcttatcgatcaaggtccccacctgcgaaacgaagagcatatgactaatcgagaaccctctgttatgccatatatggcctaggaacaccctgtagcaagaacttactgtacctgtaccggagcgtcaccttaatgtccttaaattcccgtgtttaatggtctgtacatggttatgctatgcgactgtcaggtttcactgcatgcaatattgtcatttggctgctaccctttgtttggccttgggatgctcgatctctattttcagatttttaccgtccttgtcatccgctgctatctgttaatagagtgcattggcgatttcatataccggccaagcgtgctagttccaggtttgttaatgggag

SEQ ID NO: 20948 - DNA, 1619 bp, Zea Mays
gtctatccctgcacgatccaaatgtgctcccacctcccctgcatgcgcaacaaccccacgccccacccggcgatacggtagccgacgcccctacccctaggtcgtgcccgtttcctcccccaccctcgcgtccccgccgtcacggcgtcacccatccacttcctctccctgctgctgcagctcgcgcaacccccatctcaccctcttccttcctgccacaccgttgctaccaccgccctgccctgagagggcccgacgccatggacctcctcgagaagatgatggggcggggagtgctctcggacctgcagaacttctccggcctgatggagcacctggccagcgttgtcgacctcaatggcatggctggacgatccatacttgaacacagatacaggtacaatgtccccctttgagcatggtgaggtgtctgttcttgattttcttgataacggtggataggttgacttggatttggggaattatgagtgtttcatagatgttactctgacgagggataatattacctctagaaatatataccagtatcttctagctcaaggaaatacttgtgttttctcatttgagattgtaactgatagtttctacttctttcggtctgtcattgagaaggagagaaggggtgattatattggaaagactttataggtgatattgagtcaatgcccttcattgaagatttgcgccaattatccttttctcctgacacattcagtgaagatttgttctcaggttgatctgtgcaattttgatggcactcatggtgtcaagtgaggactggcaatttccaccagggttcaaaatgaaacagaagttcacttggcaacaaactatacaaagccacttattcttcactggtcattagcaaaaaaagactagagaatggaaggttgatttgttatttatatgttgattgctcctgcaaatcagtggtggatttactgcagcgtgcataatctggagtctttcttttacactgcttcgatgaaatctgatgtattcactacatgcaatttctgattattattcatatttcataagagactccatgtggagctccacattgaacatcacaatgcatcaagatgattgggtccctgcatttgaacgggggatgggtccttgagacccctgtgtatcaaagcacgtggcatgctgaattattttctcggctataatgacatcatatattggctaaaatggacaataaatttaagtgttttacaagggaaaaagattttgttgtatctcatattgaaatctaacatgcacctcttgtagaattgattatggataccctagatctaacttgcacctctcgtaatatatagaaaccgtagcaacacacagacattatactatcatatatagaagtttgcatggtactgatggttgcaacgcagtggtgaattagctagattaaaataaaaaaaaattaggtatggctagaatcataaatcgattatgaaatattttctcataagagtataatacacatctgtacataagttattgtgatattatatgttttcgttgcaacgcacgggcattcacctagtagtgtataaaacatctcactgcaaggtctatactggtta

SEQ ID NO: 20949 - DNA, 2063 bp, Zea Mays
gtgctcccacctcccctgcatgcgcaacaaccccacgccccacccggcgatacggtagccgacgcccctacccctaggtcgtgcccgtttcctcccccaccctcgcgtccccgccgtcacggcgtcacccatccacttcctctccctgctgctgcagctcgcgcaacccccatctcaccctcttccttcctgccacaccgttgctaccaccgccctgccctgagagggcccgacgccatggacctcctcgagaagatgatggggcggggagtgctctcggacctgcagaacttctccggcctgatggagcacctggccagcgttgtcgacctcaatggcatggctggacggtaggtttgctggctcattcttgggatcgtcttcgattcgttcgtcgcctccgtggctctggtccgtgcccccctgcccccagcgactgctgatgcggtccgccgtccaatccatacttgaacacagatacaggtacaatgtccccctttgagcatggtgaggtgtctgttcttgattttcttgataacggtggataggttgacttggatttggggaattatgagtgtttcatagatgttactctgacgagggataatattacctctagaaatatataccagtatcttctagctcaaggaaatacttgtgttttctcatttgagattgtaactgatagtttctacttctttcggtctgtcattgagaaggagagaaggggtgattatattggaaagactttataggtgatattgagtcaatgcccttcattgaagatttgcgccaattatccttttctcctgacacattcagtgaagatttgttctcaggttgatctgtgcaattttgatggcactcatggtgtcaagtgaggactggcaatttccaccagggttcaaaatgaaacagaagttcacttggcaacaaactatacaaagccacttattcttcactggtcattagcaaaaaaagactagagaatggaaggtaaaactccaaattttttcatttgtttaagatgcaagcagttgtattaacactgccatcagttccaatgcagtgttatttaagtgtgcaagaactccttcaaatgtattgccatctcctttcaaattgcttgatagggcgtgtgaaattgaatttactagacaagaaaataattaagctcattcattgtttaggagtaaagacaaatgtatgatattctttaggacaaagagaaacaatttcacaaatttcagccaattgattctactaccttaaaaaatttattctaaaagaatactcaaacctggtgaccttatggcaatgagcaaaaaacaatgtttctaggtggatagacttgattttaggtactccttcaataccaaattagaagtcattttagcttttctaaatacaaagcttttgctatgtgtcttattctacagtgtatctacatacacagtaaaagttatgaacctaaaaaggacaaaaatgcctatatacactataaaagccaaaacgacctacaatttagaaaggagggagtggctgaattatgttgaagaagttatcactctgtagtaggtataactggtatgccaaagttcgagctcattttcttttccatcatttcacattattttactaggatgttttttttgttttgggtgtagatagattttagttttcttttttgtgaatcggccatgaggtcctgcttaacatattaccatgaagatgcattaattacttgccttaggggaacttcctgttgcgtctgtgtttcaggcattaaactcaccagaaaaattataacgatcacttacttgccttgaaatcacaatcaatgtggacacttattatcacaactatatggttttgtttgttttgataatgggctcagatccaaagtctgttgccatatattatcagttgtacatttcaacatatttgaatttgtggaagtgtcagctatgtgaaagctctcttgtgggttttggtggtttggatgacaacccaattaaaggactaacaagtgtgctaagtgttgaacaggtgcttaatgcaaa

SEQ ID NO: 20950 - DNA, 1954 bp, Zea Mays
gtgctcccacctcccctgcatgcgcaacaaccccacgccccacccggcgatacggtagccgacgcccctacccctaggtcgtgcccgtttcctcccccaccctcgcgtccccgccgtcacggcgtcacccatccacttcctctccctgctgctgcagctcgcgcaacccccatctcaccctcttccttcctgccacaccgttgctaccaccgccctgccctgagagggcccgacgccatggacctcctcgagaagatgatggggcggggagtgctctcggacctgcagaacttctccggcctgatggagcacctggccagcgttgtcgacctcaatggcatggctggacgatccatacttgaacacagatacaggtacaatgtccccctttgagcatggtgaggtgtctgttcttgattttcttgataacggtggataggttgacttggatttggggaattatgagtgtttcatagatgttactctgacgagggataatattacctctagaaatatataccagtatcttctagctcaaggaaatacttgtgttttctcatttgagattgtaactgatagtttctacttctttcggtctgtcattgagaaggagagaaggggtgattatattggaaagactttataggtgatattgagtcaatgcccttcattgaagatttgcgccaattatccttttctcctgacacattcagtgaagatttgttctcaggttgatctgtgcaattttgatggcactcatggtgtcaagtgaggactggcaatttccaccagggttcaaaatgaaacagaagttcacttggcaacaaactatacaaagccacttattcttcactggtcattagcaaaaaaagactagagaatggaaggtaaaactccaaattttttcatttgtttaagatgcaagcagttgtattaacactgccatcagttccaatgcagtgttatttaagtgtgcaagaactccttcaaatgtattgccatctcctttcaaattgcttgatagggcgtgtgaaattgaatttactagacaagaaaataattaagctcattcattgtttaggagtaaagacaaatgtatgatattctttaggacaaagagaaacaatttcacaaatttcagccaattgattctactaccttaaaaaatttattctaaaagaatactcaaacctggtgaccttatggcaatgagcaaaaaacaatgtttctaggtggatagacttgattttaggtactccttcaataccaaattagaagtcattttagcttttctaaatacaaagcttttgctatgtgtcttattctacagtgtatctacatacacagtaaaagttatgaacctaaaaaggacaaaaatgcctatatacactataaaagccaaaacgacctacaatttagaaaggagggagtggctgaattatgttgaagaagttatcactctgtagtaggtataactggtatgccaaagttcgagctcattttcttttccatcatttcacattattttactaggatgttttttttgttttgggtgtagatagattttagttttcttttttgtgaatcggccatgaggtcctgcttaacatattaccatgaagatgcattaattacttgccttaggggaacttcctgttgcgtctgtgtttcaggcattaaactcaccagaaaaattataacgatcacttacttgccttgaaatcacaatcaatgtggacacttattatcacaactatatggttttgtttgttttgataatgggctcagatccaaagtctgttgccatatattatcagttgtacatttcaacatatttgaatttgtggaagtgtcagctatgtgaaagctctcttgtgggttttggtggtttggatgacaacccaattaaaggactaacaagtgtgctaagtgttgaacaggtgcttaatgcaaa

SEQ ID NO: 20951 - DNA, 2328 bp, Zea Mays
gtgctcccacctcccctgcatgcgcaacaaccccacgccccacccggcgatacggtagccgacgcccctacccctaggtcgtgcccgtttcctcccccaccctcgcgtccccgccgtcacggcgtcacccatccacttcctctccctgctgctgcagctcgcgcaacccccatctcaccctcttccttcctgccacaccgttgctaccaccgccctgccctgagagggcccgacgccatggacctcctcgagaagatgatggggcggggagtgctctcggacctgcagaacttctccggcctgatggagcacctggccagcgttgtcgacctcaatggcatggctggacgatccatacttgaacacagatacaggtacaatgtccccctttgagcatggtgaggtgtctgttcttgattttcttgataacggtggataggtacatctccctaatacttccatttaatacacatttttaaaatttgcagcctcgatggtatctacctaacctgtggtatttgtaggttgacttggatttggggaattatgagtgtttcatagatgttactctgacgagggataatattacctctagaaatatataccagtatcttctagctcaaggaaatacttgtgttttctcatttgagattgtaactgatagtttctacttctttcggtctgtcattgagaaggagagaaggggtgattatattggaaagactttataggtaatttttctgtggcatttattactcatgttgcattggactgtccatatcacataatttaaaatacctatggtttcaaatatccaggttgttcctcatgtcactgatgaaataaaatagtggatacagtcagtgtctttagttcttgtggatgggcagatctatccagctgatgtttgtgttattgaattaggaggcactgtgtgtagggttttatgacatcttacaatatgacacttatgtaattattataatatagcagataaattgatttcactttttattttaggtgatattgagtcaatgcccttcattgaagatttgcgccaattatccttttctcctgacacattcagtgaagatttgttctcaggttgatctgtgcaattttgatggcactcatggtgtcaagtgaggactggcaatttccaccagggttcaaaatgaaacagaagttcacttggcaacaaactatacaaagccacttattcttcactggtcattagcaaaaaaagactagagaatggaaggtaaaactccaaattttttcatttgtttaagatgcaagcagttgtattaacactgccatcagttccaatgcagtgttatttaagtgtgcaagaactccttcaaatgtattgccatctcctttcaaattgcttgatagggcgtgtgaaattgaatttactagacaagaaaataattaagctcattcattgtttaggagtaaagacaaatgtatgatattctttaggacaaagagaaacaatttcacaaatttcagccaattgattctactaccttaaaaaatttattctaaaagaatactcaaacctggtgaccttatggcaatgagcaaaaaacaatgtttctaggtggatagacttgattttaggtactccttcaataccaaattagaagtcattttagcttttctaaatacaaagcttttgctatgtgtcttattctacagtgtatctacatacacagtaaaagttatgaacctaaaaaggacaaaaatgcctatatacactataaaagccaaaacgacctacaatttagaaaggagggagtggctgaattatgttgaagaagttatcactctgtagtaggtataactggtatgccaaagttcgagctcattttcttttccatcatttcacattattttactaggatgttttttttgttttgggtgtagatagattttagttttcttttttgtgaatcggccatgaggtcctgcttaacatattaccatgaagatgcattaattacttgccttaggggaacttcctgttgcgtctgtgtttcaggcattaaactcaccagaaaaattataacgatcacttacttgccttgaaatcacaatcaatgtggacacttattatcacaactatatggttttgtttgttttgataatgggctcagatccaaagtctgttgccatatattatcagttgtacatttcaacatatttgaatttgtggaagtgtcagctatgtgaaagctctcttgtgggttttggtggtttggatgacaacccaattaaaggactaacaagtgtgctaagtgttgaacaggtgcttaatgcaaa

SEQ ID NO: 20952 - DNA, 3130 bp, Zea Mays
gtgctcccacctcccctgcatgcgcaacaaccccacgccccacccggcgatacggtagccgacgcccctacccctaggtcgtgcccgtttcctcccccaccctcgcgtccccgccgtcacggcgtcacccatccacttcctctccctgctgctgcagctcgcgcaacccccatctcaccctcttccttcctgccacaccgttgctaccaccgccctgccctgagagggcccgacgccatggacctcctcgagaagatgatggggcggggagtgctctcggacctgcagaacttctccggcctgatggagcacctggccagcgttgtcgacctcaatggcatggctggacggtaggtttgctggctcattcttgggatcgtcttcgattcgttcgtcgcctccgtggctctggtccgtgcccccctgcccccagcgactgctgatgcggtccgccgtccagtacgtgccgcatcaccgctttcttctatttgcaagtggatgattcaagggtcggtttgtagtgcttgtaaattgttgttcatgaaattatgcgagacagtgtagtgtctctactaggactgttccgccgtgggtttagaaaatttcttagtctgtgttttaaattagggaaccaatgaacgcatgtcgtagtgcattcctaattttagactggaaatgctttgggtgatttagatactgaagtaatgttagtaccttttgcagattggaaatatatctcactgtgatccatgtacagttaatgattcaagtccctctcacttaagtcagaggagactcatccctaaagtcatccagatatacacatcgttctcgcaacttcaccatggaaacaatatagctgccaattattgtagaagatgttgagtagaaacacacataaaaggttgaaagtggtgggagaccatcagaccaaccagatgaacatcctcaaccaacacccttgcacgaatgaaggcacctttctaggatgaatggaacatgcttttaaaagatgaatatggcagcattagctaatagcatcagcactcgttattgatcgaagtctgaaatgtgtcactaagaattcacattatccacaggtggcaaacgagaaaattaaaactgactatttgtaaatggttaagtcaaaatttcaactttctaatgttaaactgtttggagggagcaaagctttgctcggcattggtcttactactttggtttcctatttttgtagatccatacttgaacacagatacaggtacaatgtccccctttgagcatggtgaggtgtctgttcttgattttcttgataacggtggataggttgacttggatttggggaattatgagtgtttcatagatgttactctgacgagggataatattacctctagaaatatataccagtatcttctagctcaaggaaatacttgtgttttctcatttgagattgtaactgatagtttctacttctttcggtctgtcattgagaaggagagaaggggtgattatattggaaagactttataggtaatttttctgtggcatttattactcatgttgcattggactgtccatatcacataatttaaaatacctatggtttcaaatatccaggttgttcctcatgtcactgatgaaataaaatagtggatacagtcagtgtctttagttcttgtggatgggcagatctatccagctgatgtttgtgttattgaattaggaggcactgtgtgtagggttttatgacatcttacaatatgacacttatgtaattattataatatagcagataaattgatttcactttttattttaggtgatattgagtcaatgcccttcattgaagatttgcgccaattatccttttctcctgacacattcagtgaagatttgttctcaggttgatctgtgcaattttgatggcactcatggtgtcaagtgaggactggcaatttccaccagggttcaaaatgaaacagaagttcacttggcaacaaactatacaaagccacttattcttcactggtcattagcaaaaaaagactagagaatggaaggtaaaactccaaattttttcatttgtttaagatgcaagcagttgtattaacactgccatcagttccaatgcagtgttatttaagtgtgcaagaactccttcaaatgtattgccatctcctttcaaattgcttgatagggcgtgtgaaattgaatttactagacaagaaaataattaagctcattcattgtttaggagtaaagacaaatgtatgatattctttaggacaaagagaaacaatttcacaaatttcagccaattgattctactaccttaaaaaatttattctaaaagaatactcaaacctggtgaccttatggcaatgagcaaaaaacaatgtttctaggtggatagacttgattttaggtactccttcaataccaaattagaagtcattttagcttttctaaatacaaagcttttgctatgtgtcttattctacagtgtatctacatacacagtaaaagttatgaacctaaaaaggacaaaaatgcctatatacactataaaagccaaaacgacctacaatttagaaaggagggagtggctgaattatgttgaagaagttatcactctgtagtaggtataactggtatgccaaagttcgagctcattttcttttccatcatttcacattattttactaggatgttttttttgttttgggtgtagatagattttagttttcttttttgtgaatcggccatgaggtcctgcttaacatattaccatgaagatgcattaattacttgccttaggggaacttcctgttgcgtctgtgtttcaggcattaaactcaccagaaaaattataacgatcacttacttgccttgaaatcacaatcaatgtggacacttattatcacaactatatggttttgtttgttttgataatgggctcagatccaaagtctgttgccatatattatcagttgtacatttcaacatatttgaatttgtggaagtgtcagctatgtgaaagctctcttgtgggttttggtggtttggatgacaacccaattaaaggactaacaagtgtgctaagtgttgaacaggtgcttaatgcaaa

SEQ ID NO: 20953 - DNA, 1867 bp, Zea Mays
gtgctcccacctcccctgcatgcgcaacaaccccacgccccacccggcgatacggtagccgacgcccctacccctaggtcgtgcccgtttcctcccccaccctcgcgtccccgccgtcacggcgtcacccatccacttcctctccctgctgctgcagctcgcgcaacccccatctcaccctcttccttcctgccacaccgttgctaccaccgccctgccctgagagggcccgacgccatggacctcctcgagaagatgatggggcggggagtgctctcggacctgcagaacttctccggcctgatggagcacctggccagcgttgtcgacctcaatggcatggctggacgatccatacttgaacacagatacaggtacaatgtccccctttgagcatggtgaggtgtctgttcttgattttcttgataacggtggataggttgacttggatttggggaattatgagtgtttcatagatgttactctgacgagggataatattacctctagaaatatataccagtatcttctagctcaaggaaatacttgtgttttctcatttgagattgtaactgatagtttctacttctttcggtctgtcattgagaaggagagaaggggtgattatattggaaagactttataggtgatattgagtcaatgcccttcattgaagatttgcgccaattatccttttctcctgacacattcagtgaagatttgttctcaggttgatctgtgcaattttgatggcactcatggtgtcaagtgaggactgggttcaaaatgaaacagaagttcacttggcaacaaactatacaaagccacttattcttcactggtcattagcaaaaaaagactagagaatggaagtgttatttaagtgtgcaagaactccttcaaatgtattgccatctcctttcaaattgcttgatagggcgtgtgaaattgaatttactagacaagaaaataattaagctcattcattgtttaggagtaaagacaaatgtatgatattctttaggacaaagagaaacaatttcacaaatttcagccaattgattctactaccttaaaaaatttattctaaaagaatactcaaacctggtgaccttatggcaatgagcaaaaaacaatgtttctaggtggatagacttgattttaggtactccttcaataccaaattagaagtcattttagcttttctaaatacaaagcttttgctatgtgtcttattctacagtgtatctacatacacagtaaaagttatgaacctaaaaaggacaaaaatgcctatatacactataaaagccaaaacgacctacaatttagaaaggagggagtggctgaattatgttgaagaagttatcactctgtagtaggtataactggtatgccaaagttcgagctcattttcttttccatcatttcacattattttactaggatgttttttttgttttgggtgtagatagattttagttttcttttttgtgaatcggccatgaggtcctgcttaacatattaccatgaagatgcattaattacttgccttaggggaacttcctgttgcgtctgtgtttcaggcattaaactcaccagaaaaattataacgatcacttacttgccttgaaatcacaatcaatgtggacacttattatcacaactatatggttttgtttgttttgataatgggctcagatccaaagtctgttgccatatattatcagttgtacatttcaacatatttgaatttgtggaagtgtcagctatgtgaaagctctcttgtgggttttggtggtttggatgacaacccaattaaaggactaacaagtgtgctaagtgttgaacaggtgcttaatgcaaa

SEQ ID NO: 20954 - DNA, 2758 bp, Zea Mays
gtgctcccacctcccctgcatgcgcaacaaccccacgccccacccggcgatacggtagccgacgcccctacccctaggtcgtgcccgtttcctcccccaccctcgcgtccccgccgtcacggcgtcacccatccacttcctctccctgctgctgcagctcgcgcaacccccatctcaccctcttccttcctgccacaccgttgctaccaccgccctgccctgagagggcccgacgccatggacctcctcgagaagatgatggggcggggagtgctctcggacctgcagaacttctccggcctgatggagcacctggccagcgttgtcgacctcaatggcatggctggacgattggaaatatatctcactgtgatccatgtacagttaatgattcaagtccctctcacttaagtcagaggagactcatccctaaagtcatccagatatacacatcgttctcgcaacttcaccatggaaacaatatagctgccaattattgtagaagatgttgagtagaaacacacataaaaggttgaaagtggtgggagaccatcagaccaaccagatgaacatcctcaaccaacacccttgcacgaatgaaggcacctttctaggatgaatggaacatgcttttaaaagatgaatatggcagcattagctaatagcatcagcactcgttattgatcgaagtctgaaatgtgtcactaagaattcacattatccacaggtggcaaacgagaaaattaaaactgactatttgtaaatggttaagtcaaaatttcaactttctaatgttaaactgtttggagggagcaaagctttgctcggcattggtcttactactttggtttcctatttttgtagatccatacttgaacacagatacaggtacaatgtccccctttgagcatggtgaggtgtctgttcttgattttcttgataacggtggataggtacatctccctaatacttccatttaatacacatttttaaaatttgcagcctcgatggtatctacctaacctgtggtatttgtaggttgacttggatttggggaattatgagtgtttcatagatgttactctgacgagggataatattacctctagaaatatataccagtatcttctagctcaaggaaatacttgtgttttctcatttgagattgtaactgatagtttctacttctttcggtctgtcattgagaaggagagaaggggtgattatattggaaagactttataggtaatttttctgtggcatttattactcatgttgcattggactgtccatatcacataatttaaaatacctatggtttcaaatatccaggttgttcctcatgtcactgatgaaataaaatagtggatacagtcagtgtctttagttcttgtggatgggcagatctatccagctgatgtttgtgttattgaattaggaggcactgtgtgtgatattgagtcaatgcccttcattgaagatttgcgccaattatccttttctcctgacacattcagtgaagatttgttctcaggttgatctgtgcaattttgatggcactcatggtgtcaagtgaggactggcaatttccaccagggttcaaaatgaaacagaagttcacttggcaacaaactatacaaagccacttattcttcactggtcattagcaaaaaaagactagagaatggaaggtaaaactccaaattttttcatttgtttaagatgcaagcagttgtattaacactgccatcagttccaatgcagtgttatttaagtgtgcaagaactccttcaaatgtattgccatctcctttcaaattgcttgatagggcgtgtgaaattgaatttactagacaagaaaataattaagctcattcattgtttaggagtaaagacaaatgtatgatattctttaggacaaagagaaacaatttcacaaatttcagccaattgattctactaccttaaaaaatttattctaaaagaatactcaaacctggtgaccttatggcaatgagcaaaaaacaatgtttctaggtggatagacttgattttaggtactccttcaataccaaattagaagtcattttagcttttctaaatacaaagcttttgctatgtgtcttattctacagtgtatctacatacacagtaaaagttatgaacctaaaaaggacaaaaatgcctatatacactataaaagccaaaacgacctacaatttagaaaggagggagtggctgaattatgttgaagaagttatcactctgtagtaggtataactggtatgccaaagttcgagctcattttcttttccatcatttcacattattttactaggatgttttttttgttttgggtgtagatagattttagttttcttttttgtgaatcggccatgaggtcctgcttaacatattaccatgaagatgcattaattacttgccttaggggaacttcctgttgcgtctgtgtttcaggcattaaactcaccagaaaaattataacgatcacttacttgccttgaaatcacaatcaatgtggacacttattatcacaactatatggttttgtttgttttgataatgggctcagatccaaagtctgttgccatatattatcagttgtacatttcaacatatttgaatttgtggaagtgtcagctatgtgaaagctctcttgtgggttttggtggtttggatgacaacccaattaaaggactaacaagtgtgctaagtgttgaacaggtgcttaatgcaaa

SEQ ID NO: 20955 - DNA, 2841 bp, Zea Mays
gtgctcccacctcccctgcatgcgcaacaaccccacgccccacccggcgatacggtagccgacgcccctacccctaggtcgtgcccgtttcctcccccaccctcgcgtccccgccgtcacggcgtcacccatccacttcctctccctgctgctgcagctcgcgcaacccccatctcaccctcttccttcctgccacaccgttgctaccaccgccctgccctgagagggcccgacgccatggacctcctcgagaagatgatggggcggggagtgctctcggacctgcagaacttctccggcctgatggagcacctggccagcgttgtcgacctcaatggcatggctggacggtaggtttgctggctcattcttgggatcgtcttcgattcgttcgtcgcctccgtggctctggtccgtgcccccctgcccccagcgactgctgatgcggtccgccgtccagtacgtgccgcatcaccgctttcttctatttgcaagtggatgattcaagggtcggtttgtagtgcttgtaaattgttgttcatgaaattatgcgagacagtgtagtgtctctactaggactgttccgccgtgggtttagaaaatttcttagtctgtgttttaaattagggaaccaatgaacgcatgtcgtagtgcattcctaattttagactggaaatgctttgggtgatttagatactgaagtaatgttagtaccttttgcagattggaaatatatctcactgtgatccatgtacagttaatgattcaagtccctctcacttaagtcagaggagactcatccctaaagtcatccagatatacacatcgttctcgcaacttcaccatggaaacaatatagctgccaattattgtagaagatgttgagtagaaacacacataaaaggttgaaagtggtgggagaccatcagaccaaccagatgaacatcctcaaccaacacccttgcacgaatgaaggcacctttctaggatgaatggaacatgcttttaaaagatgaatatggcagcattagctaatagcatcagcactcgttattgatcgaagtctgaaatgtgtcactaagaattcacattatccacaggtggcaaacgagaaaattaaaactgactatttgtaaatggttaagtcaaaatttcaactttctaatgttaaactgtttggagggagcaaagctttgctcggcattggtcttactactttggtttcctatttttgtagatccatacttgaacacagatacaggtacaatgtccccctttgagcatggtgaggtgtctgttcttgattttcttgataacggtggataggttgacttggatttggggaattatgagtgtttcatagatgttactctgacgagggataatattacctctagaaatatataccagtatcttctagctcaaggaaatacttgtgttttctcatttgagattgtaactgatagtttctacttctttcggtctgtcattgagaaggagagaaggggtgattatattggaaagactttataggtgatattgagtcaatgcccttcattgaagatttgcgccaattatccttttctcctgacacattcagtgaagatttgttctcaggttgatctgtgcaattttgatggcactcatggtgtcaagtgaggactggcaatttccaccagggttcaaaatgaaacagaagttcacttggcaacaaactatacaaagccacttattcttcactggtcattagcaaaaaaagactagagaatggaaggtaaaactccaaattttttcatttgtttaagatgcaagcagttgtattaacactgccatcagttccaatgcagtgttatttaagtgtgcaagaactccttcaaatgtattgccatctcctttcaaattgcttgatagggcgtgtgaaattgaatttactagacaagaaaataattaagctcattcattgtttaggagtaaagacaaatgtatgatattctttaggacaaagagaaacaatttcacaaatttcagccaattgattctactaccttaaaaaatttattctaaaagaatactcaaacctggtgaccttatggcaatgagcaaaaaacaatgtttctaggtggatagacttgattttaggtactccttcaataccaaattagaagtcattttagcttttctaaatacaaagcttttgctatgtgtcttattctacagtgtatctacatacacagtaaaagttatgaacctaaaaaggacaaaaatgcctatatacactataaaagccaaaacgacctacaatttagaaaggagggagtggctgaattatgttgaagaagttatcactctgtagtaggtataactggtatgccaaagttcgagctcattttcttttccatcatttcacattattttactaggatgttttttttgttttgggtgtagatagattttagttttcttttttgtgaatcggccatgaggtcctgcttaacatattaccatgaagatgcattaattacttgccttaggggaacttcctgttgcgtctgtgtttcaggcattaaactcaccagaaaaattataacgatcacttacttgccttgaaatcacaatcaatgtggacacttattatcacaactatatggttttgtttgttttgataatgggctcagatccaaagtctgttgccatatattatcagttgtacatttcaacatatttgaatttgtggaagtgtcagctatgtgaaagctctcttgtgggttttggtggtttggatgacaacccaattaaaggactaacaagtgtgctaagtgttgaacaggtgcttaatgcaaa

SEQ ID NO: 20956 - DNA, 1705 bp, Zea Mays
gtgctcccacctcccctgcatgcgcaacaaccccacgccccacccggcgatacggtagccgacgcccctacccctaggtcgtgcccgtttcctcccccaccctcgcgtccccgccgtcacggcgtcacccatccacttcctctccctgctgctgcagctcgcgcaacccccatctcaccctcttccttcctgccacaccgttgctaccaccgccctgccctgagagggcccgacgccatggacctcctcgagaagatgatggggcggggagtgctctcggacctgcagaacttctccggcctgatggagcacctggccagcgttgtcgacctcaatggcatggctggacggtaggtttgctggctcattcttgggatcgtcttcgattcgttcgtcgcctccgtggctctggtccgtgcccccctgcccccagcgactgctgatgcggtccgccgtccaatccatacttgaacacagatacaggtacaatgtccccctttgagcatggtgaggtgtctgttcttgattttcttgataacggtggataggttgacttggatttggggaattatgagtgtttcatagatgttactctgacgagggataatattacctctagaaatatataccagtatcttctagctcaaggaaatacttgtgttttctcatttgagattgtaactgatagtttctacttctttcggtctgtcattgagaaggagagaaggggtgattatattggaaagactttataggtgatattgagtcaatgcccttcattgaagatttgcgccaattatccttttctcctgacacattcagtgaagatttgttctcaggttgatctgtgcaattttgatggcactcatggtgtcaagtgaggactggcaatttccaccagggttcaaaatgaaacagaagttcacttggcaacaaactatacaaagccacttattcttcactggtcattagcaaaaaaagactagagaatggaaggttgatttgttatttatatgttgattgctcctgcaaatcagtggtggatttactgcagcgtgcataatctggagtctttcttttacactgcttcgatgaaatctgatgtattcactacatgcaatttctgattattattcatatttcataagagactccatgtggagctccacattgaacatcacaatgcatcaagatgattgggtccctgcatttgaacgggggatgggtccttgagacccctgtgtatcaaagcacgtggcatgctgaattattttctcggctataatgacatcatatattggctaaaatggacaataaatttaagtgttttacaagggaaaaagattttgttgtatctcatattgaaatctaacatgcacctcttgtagaattgattatggataccctagatctaacttgcacctctcgtaatatatagaaaccgtagcaacacacagacattatactatcatatatagaagtttgcatggtactgatggttgcaacgcagtggtgaattagctagattaaaataaaaaaaaattaggtatggctagaatcataaatcgattatgaaatattttctcataagagtataatacacatctgtacataagttattgtgatattatatgttttcgttgcaacgcacgggcattcacctagtagtgtataaaacatctcactgcaaggtctatactggtta

SEQ ID NO: 20957 - DNA, 2316 bp, Zea Mays
gtgctcccacctcccctgcatgcgcaacaaccccacgccccacccggcgatacggtagccgacgcccctacccctaggtcgtgcccgtttcctcccccaccctcgcgtccccgccgtcacggcgtcacccatccacttcctctccctgctgctgcagctcgcgcaacccccatctcaccctcttccttcctgccacaccgttgctaccaccgccctgccctgagagggcccgacgccatggacctcctcgagaagatgatggggcggggagtgctctcggacctgcagaacttctccggcctgatggagcacctggccagcgttgtcgacctcaatggcatggctggacgatccatacttgaacacagatacaggtacaatgtccccctttgagcatggtgaggtgtctgttcttgattttcttgataacggtggataggttgacttggatttggggaattatgagtgtttcatagatgttactctgacgagggataatattacctctagaaatatataccagtatcttctagctcaaggaaatacttgtgttttctcatttgagattgtaactgatagtttctacttctttcggtctgtcattgagaaggagagaaggggtgattatattggaaagactttataggtgatattgagtcaatgcccttcattgaagatttgcgccaattatccttttctcctgacacattcagtgaagatttgttctcaggttgatctgtgcaattttgatggcactcatggtgtcaagtgaggactggcaatttccaccagggttcaaaatgaaacagaagttcacttggcaacaaactatacaaagccacttattcttcactggtcattagcaaaaaaagactagagaatggaaggttgatttgttatttatatgttgattgctcctgcaaatcagtggtggatttactgcagcgtgcataatctggagtctttcttttacactgcttcgatgaaatctgatgtattcactacatgcaatttctgattattattcatatttcataaggaccaaaaatacctagcatttattatcccacgctgatggatgaaaaaagcgacgcacaccggccagcgggcagctcttcctctcaggccaagtctactctcacctcccccgtctctcagatccacgctgcctagttgttcggacttcagaccccgccgtgcgctgcccatggccgcgggtcgcggcgacgcggcgagcatggtggcggtgggtctggtgtggggcgccaccaacgcgctgatgcggcggggcgcgctcgtctgggaccgccgcgcccgtgcctgcccctccggcaacgtcctccggcggtgggcggagctgctcctgacgtggcagtactcggcgccgttcgccgccaacctgagcgcgtccgcggccttcttcgcgctcctcggcggcgcgcccatctccgtggccgtccccgtcaccaacgccgtcactttcgccgccacggccgccgccgccgcggcccttggcgagcgcgtccggccagcgcccgcggtccttggtaccacgctcatcgtcctcggcgtctgggtctgcatctcgtaggcttaggctgaagatctgcttggtttagttctggcattacagtcgtcgcatggggggaaaaaaggaagttttgagggcaattctcagattccatttcactcctctgtgctgtgttgccaattgccatatgagtgaattattcccagtttgttgatggcagcggcgtttcattagctagatggtcagaatataatgcagtttcattctggtaattttggttactgaatccatttctgcttaggtgatgaatgaatataacactacggttccattcattacatcctgagggttgacatcccacagcagagcattcttctacccttggagctaatttgagaaccttattttatcaattgatttctaaattctccttggcattgaattggatcaacagagttgtttttccaaattcatttcaagctgaaatggtattggggcacgtttctgtttcatatgttttgatgttcaattccagcaaataccaagctcctcggttccgtattgggggtgtgtggtttgcttctgtactgatatcatggtgaattgagggtcaaattctaaggctcaattccaagacatccaaacacgtggtggtattggagatatacaattccaattctccaaatcctagcttaatgccagcatccaaatggggtgttaggtttttggggggcaatgcatcaccacaagttacctgaatattcagaaacataggtgctgtttgg

SEQ ID NO: 20958 - DNA, 1862 bp, Zea Mays
gtgctcccacctcccctgcatgcgcaacaaccccacgccccacccggcgatacggtagccgacgcccctacccctaggtcgtgcccgtttcctcccccaccctcgcgtccccgccgtcacggcgtcacccatccacttcctctccctgctgctgcagctcgcgcaacccccatctcaccctcttccttcctgccacaccgttgctaccaccgccctgccctgagagggcccgacgccatggacctcctcgagaagatgatggggcggggagtgctctcggacctgcagaacttctccggcctgatggagcacctggccagcgttgtcgacctcaatggcatggctggacgatccatacttgaacacagatacaggtacaatgtccccctttgagcatggtgaggtgtctgttcttgattttcttgataacggtggataggttgacttggatttggggaattatgagtgtttcatagatgttactctgacgagggataatattacctctagaaatatataccagtatcttctagctcaaggaaatacttgtgttttctcatttgagattgtaactgatagtttctacttctttcggtctgtcattgagaaggagagaaggggtgattatattggaaagactttataggtaatttttctgtggcatttattactcatgttgcattggactgtccatatcacataatttaaaatacctatggtttcaaatatccaggttgttcctcatgtcactgatgaaataaaatagtggatacagtcagtgtctttagttcttgtggatgggcagatctatccagctgatgtttgtgttattgaattaggaggcactgtgtgtagggttttatgacatcttacaatatgacacttatgtaattattataatatagcagataaattgatttcactttttattttaggtgatattgagtcaatgcccttcattgaagatttgcgccaattatccttttctcctgacacattcagtgaagatttgttctcaggttgatctgtgcaattttgatggcactcatggtgtcaagtgaggactggcaatttccaccagggttcaaaatgaaacagaagttcacttggcaacaaactatacaaagccacttattcttcactggtcattagcaaaaaaagactagagaatggaaggtgtttctcgatgttattgaatgaattgatcttgcatggacaagcagtcctgaagctcaatgcttgatggatcagatcgcttatggaatcttgcttgcttgatcgatcacaaggcgcttattgacatcctgccatgtcctggtcctacatgttgaagttacttcatgatcattctggttcctggaaaattatgctcaaggcaatggatactcatcatagtacatagcaagggcaccttgcagctgatctacattatttaggccctgtttgtttgggattataatctaggtagattatataatccaatgtaaataagctagtgaggaaacaaacaagcaacttatctgataagattatataatctagcaattgagattatgataatctataaactcatcaaaaggtgcttatttcagtttattttttatgaaagacccactacacatggcaagttgattaaaattacttccaattgccatccacctgtctatagacgttctcacccaccagacaaataaaacagccgagggtattgttgtatttgtatgcatatgaataataagccaagtccaaataatctgagctaacaaacagcagcacctagcttatttaatctagagcaaataatccagattatacaatctagagtataatttagattatataatctataagtgaaaacgaac

SEQ ID NO: 20959 - DNA, 6353 bp, Zea Mays
caacaacacaagtgcagccaacaattgtatacatcactcggatcgattctctctctccctcttgtgtaaatctctctagtttgtgtgaaggcaaagttataagcctttagagagtggagaggtgctgcaaagagctagagcaaagtcttgagcgcattgttactccgccggagtgctgtcaagaagattgtaagcagccgcggctttgttgtaacccaactcaacatagtggaaggctctatctgtcatactgacagatctgagcaaacggaggaaggagttgaaatagactccaagcccaggtgtggctaactccaacgaggactaggcaagcatttcaggcttggccgaacctcgggataaattcctgcgtctgtgtgcttcgctctgtattgtgtgctgactctctgtcttactcactttttatatctgcacttcaacacttatctgtggtacaagttatatttgaagtgcagggcattttgagacaggatcttctattccgctgcaacctactcgaaggatctttcattccactgcgatctggtccttgagtagagtaagaactaaagttttaaagtgataattttttattcgcctattcaccccccctctaggcgacatccagatcctgttcccgggcaaagggaactttcactatgtactcaccaaggcacccattacgaggcgtggaacatcgtcgtgcttgttccggtgacgttgtcctgcctctatgagaggaagagggaactcaacaaccaaaaatggacctaccagatcagcctgcaccgtgaggtgctaggcgtgcgttccatcgtcaggagctcctccgtcgagtggggttctgtggccaaaaagcagcccatgacatggcacaaggacacaaggttgatttgttatttatatgttgattgctcctgcaaatcagtggtggatttactgcagcgtgcataatctggagtctttcttttacactgcttcgatgaaatctgatgtattcactacatgcaatttctgattattattcatatttcataaggaccaaaaatacctagcatttattatcccacgctgatggatgaaaaaagcgacgcacaccggccagcgggcagctcttcctctcaggccaagtctactctcacctcccccgtctctcagatccacgctgcctagttgttcggacttcagaccccgccgtgcgctgcccatggccgcgggtcgcggcgacgcggcgagcatggtggcggtgggtctggtgtggggcgccaccaacgcgctgatgcggcggggcgcgctcgtctgggaccgccgcgcccgtgcctgcccctccggcaacgtcctccggcggtgggcggagctgctcctgacgtggcagtactcggcgccgttcgccgccaacctgagcgcgtccgcggccttcttcgcgctcctcggcggcgcgcccatctccgtggccgtccccgtcaccaacgccgtcactttcgccgccacggccgccgccgccgcggcccttggcgagcgcgtccggccagcgcccgcggtccttggtaccacgctcatcgtcctcggcgtctgggtctgcatctcgtaggcttaggctgaagatctgcttggtttagttctggcattacagtcgtcgcatggggggaaaaaaggaagttttgagggcaattctcagattccatttcactcctctgtgctgtgttgccaattgccatatgagtgaattattcccagtttgttgatggcagcggcgtttcattagctagatggtcagaatataatgcagtttcattctggtaattttggttactgaatccatttctgcttaggtgatgaatgaatataacactacggttccattcattacatcctgagggttgacatcccacagcagagcattcttctacccttggagctaatttgagaaccttattttatcaattgatttctaaattctccttggcattgaattggatcaacagagttgtttttccaaattcatttcaagctgaaatggtattggggcacgtttctgtttcatatgttttgatgttcaattccagcaaataccaagctcctcggttccgtattgggggtgtgtggtttgcttctgtactgatatcatggtgaattgagggtcaaattctaaggctcaattccaagacatccaaacacgtggtggtattggagatatacaattccaattctccaaatcctagcttaatgccagcatccaaatggggtgttaggtttttggggggcaatgcatcaccacaagttacctgaatattcagaaacataggtgctgtttggttcgtccggtttgctccaacgcaagacgattacgttactttgtgtttggttctagcatgctgaagattccattcacgtaatcctagccaaacaacaccataatacttgtaacaattgacattacaatgacttgttggtatggctaaaaatcagaaccagttcctggttgttttgtctttagatcatatacggtttggtattcagatcaaccttatccagtttgttcattggcgccacgccatttacactaaaaggaaagtaaatgctattcatccatacagagttacagactaccttgaaaaggagggttatttttcatatacaaacttgaactttattttttttatttctttgagaacacaactacatacgtacaaacagacttgcccatgcatacactatgcgcaatgccataccatacgacacgtagacagatgtaggatttgtctttgtgggtcttaatggtgagttgagagcgagggcgccacgctaggcaacggcgaagagatggctggcttaggtaggacgggagccagaggggaggacgaataaggcgacacggaggtggagcggcggaaggtggcaacctctgcgtcgtcactgacggccggtgggcgaggggaagtggtggtggaagggcgaggcgataatggtgacgacgaaaaggaggagctgcgggaggagaacggggaagaagattctgtgtcgtgatgtgactgtgagagcacactgggcctccaacgatcttcctttctgcttcttgggctgacgatggatcgagcgggagacgtcgccgtcgaggtgggggcaccgccaaatatgatctgcgtttgggggcccatatagacatgagtagggcccggctggccaagcccgttcatcggcggcggagccggagcagaagaagcctcgtggacggtcgcagtacgtggacgcggcggcgtcggcgtccggtatggatccggtttcgccggaggatgcgacgcctgctgcggcacgcctaccgggtaggccatgacgggtgacttattctgagccgcctcgtcgtgctgcggcacgcccaccggtgcataggcgctgaagttggccgccttgtccgggacccgctttaccaccggcgcgacgacggggcccaggcggtaggacacgttcagcacgccgcgcggttcccaccggtgcaccttccggacctggtacgacgccacctgcggcggctggggcccggcgccggtcgcgccggcgaggatgtcggcgagcgggacgacgacctcgcccacgtcgcggtcacccaggagccgctcggcccggagcagcacgtggagggacgcgccggacgccgtcggagggacggcgaaccggaacgtcgcgttccagcacgggttccgcccgccgtatgggtccggctccgtgcactgccgcgtcagcgggtcgccggagatgctcaccacggcgtacacgtgcatgcgcgtcatcaggttcacgctcttcagctcctgcgctgacaggaggctcagctccaactcccggtgatcaggtggtggcttcaacttgaagcataagcaggtcccgatgtgcttacagggggagagggtttgatcaactagagctaacagttaattggctaaaatttgtcagtggaattagctagctaactattaactaatttactaaaaatagctaatagttgaactattagctagagtgtttggatttctccagctaattttaggcattaactattaactttagcgccttcaaacaccccttaaatatgcttaaaggctggtttgcagttttttgctgatggaatctgattagttttatgatgaaaataaatatacttgctacccctttggtaatcaggaggtcacattattttgagtagtgtgcagccagaatgtttgagcttcgagcatcgattcctctttgaattttgagatatatggatcctttggtatggtatatggccatatttgcattagggaagcagttccagaacaatattcagttgctactttttatagttatgttatgaactagaaagatttcagagaccatgtagatatccgaaatggatcttttttgttgcaactgaagggagtaacttttaaggttttagttactttctcaaaaaaattaagactcactcttctgttcatgttcactgcaactacaaattagtaatctggggtgtattgcaagaacaatgtccttctcgaatactcaagaacaatgtccatcatggaatttgctacgtgacgatgtggtccagcttgtttggtacacgatcgaggccatatctttgtgttcgctttatgtatatgttcccttttattcctcggattattcacttctatcttgttgttgcagggttctgagtcctggataagtaccatttgttttaaacagctttagaccatcaccttttgatgtctccttttgtctgttattattttcctatgaatattttttttgggggggaatactattaagtttcccactaatctttgatatcctctaaaccaaacgatttgtgacagatgtttcttgaggttattgaatgaattggtcttgcacggacaagcagccctgaagctcaccaggaagcgacattattttgagcttccagcattgatttctctttgaatttcgtgattcattgatcctttctattagaagaacagtttcggaacagtattcagtcactacttttttacaattatgttatgtactagaaaggtttcggagaccatgaagatgtccaaaaatggatcttttttttttgacgactgaaggaagtatcttttaaggttttgttgttactttttcaaaaattaagattcactcttttgtttactgaaactacaaaatagtgataaataagagctgtcacaatagcttacaaagcacaagaagcaaaactctctggcatgtttggaagagggtagttgctccaaaaaaaatttaagaactttgaggggacagggggctacaatggacagtagacagccttagtgtcatatctccaacagattgtggatgcggaaaatgtgctttaatatgcttaaggactggtttgcagtttttgctggtggaatctgattagttttatgatgaaaataaatatactactccctttggtcaccaggaaaataaatattcagttgctactctttattcctcggtttattcgcgcgcttctctcttgttgctgcagggaacagctttagagcctcacctattgatatatccttttgattgcgatcattttcctaggaattgtttttcctggaatattattaagattcccactaatctttgatatcctcgaaaccaaacgtgttgtgacaggtgtttctcgatgttattgaatgaattgatcttgcatggacaagcagtcctgaagctcaatgcttgatggatcagatcgcttatggaatcttgcttgcttgatcgatcacaaggcgcttattgacatcctgccatgtcctggtcctacatgttgaagttacttcatgatcattctggttcctggaaaattatgctcaaggcaatggatactcatcatagtacatagcaagggcaccttgcagctgatctacattatttaggccctgtttgtttgggattataatctaggtagattatataatccaatgtaaataagctagtgaggaaacaaacaagcaacttatctgataagattatataatctagcaattgagattatgataatctataaactcatcaaaaggtgcttatttcagtttattttttatgaaagacccactacacatggcaagttgattaaaattacttccaattgccatccacctgtctatagacgttctcacccaccagacaaataaaacagccgagggtattgttgtatttgtatgcatatgaataataagccaagtccaaataatctgagctaacaaacagcagcacctagcttatttaatctagagcaaataatccagattatacaatctagagtataatttagattatataatctataagtgaaaacgaac

SEQ ID NO: 20960 - DNA, 6035 bp, Zea Mays
caacaacacaagtgcagccaacaattgtatacatcactcggatcgattctctctctccctcttgtgtaaatctctctagtttgtgtgaaggcaaagttataagcctttagagagtggagaggtgctgcaaagagctagagcaaagtcttgagcgcattgttactccgccggagtgctgtcaagaagattgtaagcagccgcggctttgttgtaacccaactcaacatagtggaaggctctatctgtcatactgacagatctgagcaaacggaggaaggagttgaaatagactccaagcccaggtgtggctaactccaacgaggactaggcaagcatttcaggcttggccgaacctcgggataaattcctgcgtctgtgtgcttcgctctgtattgtgtgctgactctctgtcttactcactttttatatctgcacttcaacacttatctgtggtacaagttatatttgaagtgcagggcattttgagacaggatcttctattccgctgcaacctactcgaaggatctttcattccactgcgatctggtccttgagtagagtaagaactaaagttttaaagtgataattttttattcgcctattcaccccccctctaggcgacatccagatcctgttcccgggcaaagggaactttcactatgtactcaccaaggcacccattacgaggcgtggaacatcgtcgtgcttgttccggtgacgttgtcctgcctctatgagaggaagagggaactcaacaaccaaaaatggacctaccagatcagcctgcaccgtgaggtgctaggcgtgcgttccatcgtcaggagctcctccgtcgagtggggttctgtggccaaaaagcagcccatgacatggcacaaggacacaaggttgatttgttatttatatgttgattgctcctgcaaatcagtggtggatttactgcagcgtgcataatctggagtctttcttttacactgcttcgatgaaatctgatgtattcactacatgcaatttctgattattattcatatttcataaggaccaaaaatacctagcatttattatcccacgctgatggatgaaaaaagcgacgcacaccggccagcgggcagctcttcctctcaggccaagtctactctcacctcccccgtctctcagatccacgctgcctagttgttcggacttcagaccccgccgtgcgctgcccatggccgcgggtcgcggcgacgcggcgagcatggtggcggtgggtctggtgtggggcgccaccaacgcgctgatgcggcggggcgcgctcgtctgggaccgccgcgcccgtgcctgcccctccggcaacgtcctccggcggtgggcggagctgctcctgacgtggcagtactcggcgccgttcgccgccaacctgagcgcgtccgcggccttcttcgcgctcctcggcggcgcgcccatctccgtggccgtccccgtcaccaacgccgtcactttcgccgccacggccgccgccgccgcggcccttggcgagcgcgtccggccagcgcccgcggtccttggtaccacgctcatcgtcctcggcgtctgggtctgcatctcgtaggcttaggctgaagatctgcttggtttagttctggcattacagtcgtcgcatggggggaaaaaaggaagttttgagggcaattctcagattccatttcactcctctgtgctgtgttgccaattgccatatgagtgaattattcccagtttgttgatggcagcggcgtttcattagctagatggtcagaatataatgcagtttcattctggtaattttggttactgaatccatttctgcttaggtgatgaatgaatataacactacggttccattcattacatcctgagggttgacatcccacagcagagcattcttctacccttggagctaatttgagaaccttattttatcaattgatttctaaattctccttggcattgaattggatcaacagagttgtttttccaaattcatttcaagctgaaatggtattggggcacgtttctgtttcatatgttttgatgttcaattccagcaaataccaagctcctcggttccgtattgggggtgtgtggtttgcttctgtactgatatcatggtgaattgagggtcaaattctaaggctcaattccaagacatccaaacacgtggtggtattggagatatacaattccaattctccaaatcctagcttaatgccagcatccaaatggggtgttaggtttttggggggcaatgcatcaccacaagttacctgaatattcagaaacataggtgctgtttggttcgtccggtttgctccaacgcaagacgattacgttactttgtgtttggttctagcatgctgaagattccattcacgtaatcctagccaaacaacaccataatacttgtaacaattgacattacaatgacttgttggtatggctaaaaatcagaaccagttcctggttgttttgtctttagatcatatacggtttggtattcagatcaaccttatccagtttgttcattggcgccacgccatttacactaaaaggaaagtaaatgctattcatccatacagagttacagactaccttgaaaaggagggttatttttcatatacaaacttgaactttattttttttatttctttgagaacacaactacatacgtacaaacagacttgcccatgcatacactatgcgcaatgccataccatacgacacgtagacagatgtaggatttgtctttgtgggtcttaatggtgagttgagagcgagggcgccacgctaggcaacggcgaagagatggctggcttaggtaggacgggagccagaggggaggacgaataaggcgacacggaggtggagcggcggaaggtggcaacctctgcgtcgtcactgacggccggtgggcgaggggaagtggtggtggaagggcgaggcgataatggtgacgacgaaaaggaggagctgcgggaggagaacggggaagaagattctgtgtcgtgatgtgactgtgagagcacactgggcctccaacgatcttcctttctgcttcttgggctgacgatggatcgagcgggagacgtcgccgtcgaggtgggggcaccgccaaatatgatctgcgtttgggggcccatatagacatgagtagggcccggctggccaagcccgttcatcggcggcggagccggagcagaagaagcctcgtggacggtcgcagtacgtggacgcggcggcgtcggcgtccggtatggatccggtttcgccggaggatgcgacgcctgctgcggcacgcctaccgggtaggccatgacgggtgacttattctgagccgcctcgtcgtgctgcggcacgcccaccggtgcataggcgctgaagttggccgccttgtccgggacccgctttaccaccggcgcgacgacggggcccaggcggtaggacacgttcagcacgccgcgcggttcccaccggtgcaccttccggacctggtacgacgccacctgcggcggctggggcccggcgccggtcgcgccggcgaggatgtcggcgagcgggacgacgacctcgcccacgtcgcggtcacccaggagccgctcggcccggagcagcacgtggagggacgcgccggacgccgtcggagggacggcgaaccggaacgtcgcgttccagcacgggttccgcccgccgtatgggtccggctccgtgcactgccgcgtcagcgggtcgccggagatgctcaccacggcgtacacgtgcatgcgcgtcatcaggttcacgctcttcagctcctgcgctgacaggaggctcagctccaactcccggtgatcaggtggtggcttcaacttgaagcataagcaggtcccgatgtgcttacagggggagagggtttgatcaactagagctaacagttaattggctaaaatttgtcagtggaattagctagctaactattaactaatttactaaaaatagctaatagttgaactattagctagagtgtttggatttctccagctaattttaggcattaactattaactttagcgccttcaaacaccccttaaatatgcttaaaggctggtttgcagttttttgctgatggaatctgattagttttatgatgaaaataaatatacttgctacccctttggtaatcaggaggtcacattattttgagtagtgtgcagccagaatgtttgagcttcgagcatcgattcctctttgaattttgagatatatggatcctttggtatggtatatggccatatttgcattagggaagcagttccagaacaatattcagttgctactttttatagttatgttatgaactagaaagatttcagagaccatgtagatatccgaaatggatcttttttgttgcaactgaagggagtaacttttaaggttttagttactttctcaaaaaaattaagactcactcttctgttcatgttcactgcaactacaaattagtaatctggggtgtattgcaagaacaatgtccttctcgaatactcaagaacaatgtccatcatggaatttgctacgtgacgatgtggtccagcttgtttggtacacgatcgaggccatatctttgtgttcgctttatgtatatgttcccttttattcctcggattattcacttctatcttgttgttgcagggttctgagtcctggataagtaccatttgttttaaacagctttagaccatcaccttttgatgtctccttttgtctgttattattttcctatgaatattttttttgggggggaatactattaagtttcccactaatctttgatatcctctaaaccaaacgatttgtgacagatgtttcttgaggttattgaatgaattggtcttgcacggacaagcagccctgaagctcaccaggaagcgacattattttgagcttccagcattgatttctctttgaatttcgtgattcattgatcctttctattagaagaacagtttcggaacagtattcagtcactacttttttacaattatgttatgtactagaaaggtttcggagaccatgaagatgtccaaaaatggatcttttttttttgacgactgaaggaagtatcttttaaggttttgttgttactttttcaaaaattaagattcactcttttgtttactgaaactacaaaatagtgataaataagagctgtcacaatagcttacaaagcacaagaagcaaaactctctggcatgtttggaagagggtagttgctccaaaaaaaatttaagaactttgaggggacagggggctacaatggacagtagacagccttagtgtcatatctccaacagattgtggatgcggaaaatgtgctttaatatgcttaaggactggtttgcagtttttgctggtggaatctgattagttttatgatgaaaataaatatactactccctttggtcaccaggaaaataaatattcagttgctactctttattcctcggtttattcgcgcgcttctctcttgttgctgcagggaacagctttagagcctcacctattgatatatccttttgattgcgatcattttcctaggaattgtttttcctggaatattattaagattcccactaatctttgatatcctcgaaaccaaacgtgttgtgacaggtgtttctcgatgttattgaatgaattgatcttgcatggacaagcagtcctgaagctcaatgcttgatggatcagatcgcttatggaatcttgcttgcttgatcgatcacaaggtgtcttcgtccttggtgtcactttgctcgtggatcagaggtgtcgcttcggggtgcaccaaacggctgggaccattcacggcacggatgttatagtaagcccaggattagtgtttctttcttagcaagtagattagcacacaatcaccttccaggtattgtgatttacttaccatatacaactgcgtgtaatttctttatatagagatagagaacaaacagaaaacgttgtctcattaacagcaccaaacccat

SEQ ID NO: 20961 - DNA, 1471 bp, Zea Mays
agcgcattgttactccgccggagtgctgtcaagaagattgtaagcagccgcggctttgttgtaacccaactcaacatagtggaaggctctatctgtcatactgacagatctgagcaaacggaggaaggagttgaaatagactccaagcccaggtgtggctaactccaacgaggactaggcaagcatttcaggcttggccgaacctcgggataaattcctgcgtctgtgtgcttcgctctgtattgtgtgctgactctctgtcttactcactttttatatctgcacttcaacacttatctgtggtacaagttatatttgaagtgcagggcattttgagacaggatcttctattccgctgcaacctactcgaaggatctttcattccactgcgatctggtccttgagtagagtaagaactaaagttttaaagtgataattttttattcgcctattcaccccccctctaggcgacatccagatcctgttcccgggcaaagggaactttcactatgtactcaccaaggcacccattacgaggcgtggaacatcgtcgtgcttgttccggtgacgttgtcctgcctctatgagaggaagagggaactcaacaaccaaaaatggacctaccagatcagcctgcaccgtgaggtgctaggcgtgcgttccatcgtcaggagctcctccgtcgagtggggttctgtggccaaaaagcagcccatgacatggcacaaggacacaaggtcagtggtgtactaatactacagggttgatttgttatttatatgttgattgctcctgcaaatcagtggtggatttactgcagcgtgcataatctggagtctttcttttacactgcttcgatgaaatctgatgtattcactacatgcaatttctgattattattcatatttcataagagactccatgtggagctccacattgaacatcacaatgcatcaagatgattgggtccctgcatttgaacgggggatgggtccttgagacccctgtgtatcaaagcacgtggcatgctgaattattttctcggctataatgacatcatatattggctaaaatggacaataaatttaagtgttttacaagggaaaaagattttgttgtatctcatattgaaatctaacatgcacctcttgtagaattgattatggataccctagatctaacttgcacctctcgtaatatatagaaaccgtagcaacacacagacattatactatcatatatagaagtttgcatggtactgatggttgcaacgcagtggtgaattagctagattaaaataaaaaaaaattaggtatggctagaatcataaatcgattatgaaatattttctcataagagtataatacacatctgtacataagttattgtgatattatatgttttcgttgcaacgcacgggcattcacctagtagtgtataaaacatctcactgcaaggtctatactggtta

SEQ ID NO: 20962 - DNA, 1446 bp, Zea Mays
agcgcattgttactccgccggagtgctgtcaagaagattgtaagcagccgcggctttgttgtaacccaactcaacatagtggaaggctctatctgtcatactgacagatctgagcaaacggaggaaggagttgaaatagactccaagcccaggtgtggctaactccaacgaggactaggcaagcatttcaggcttggccgaacctcgggataaattcctgcgtctgtgtgcttcgctctgtattgtgtgctgactctctgtcttactcactttttatatctgcacttcaacacttatctgtggtacaagttatatttgaagtgcagggcattttgagacaggatcttctattccgctgcaacctactcgaaggatctttcattccactgcgatctggtccttgagtagagtaagaactaaagttttaaagtgataattttttattcgcctattcaccccccctctaggcgacatccagatcctgttcccgggcaaagggaactttcactatgtactcaccaaggcacccattacgaggcgtggaacatcgtcgtgcttgttccggtgacgttgtcctgcctctatgagaggaagagggaactcaacaaccaaaaatggacctaccagatcagcctgcaccgtgaggtgctaggcgtgcgttccatcgtcaggagctcctccgtcgagtggggttctgtggccaaaaagcagcccatgacatggcacaaggacacaaggttgatttgttatttatatgttgattgctcctgcaaatcagtggtggatttactgcagcgtgcataatctggagtctttcttttacactgcttcgatgaaatctgatgtattcactacatgcaatttctgattattattcatatttcataagagactccatgtggagctccacattgaacatcacaatgcatcaagatgattgggtccctgcatttgaacgggggatgggtccttgagacccctgtgtatcaaagcacgtggcatgctgaattattttctcggctataatgacatcatatattggctaaaatggacaataaatttaagtgttttacaagggaaaaagattttgttgtatctcatattgaaatctaacatgcacctcttgtagaattgattatggataccctagatctaacttgcacctctcgtaatatatagaaaccgtagcaacacacagacattatactatcatatatagaagtttgcatggtactgatggttgcaacgcagtggtgaattagctagattaaaataaaaaaaaattaggtatggctagaatcataaatcgattatgaaatattttctcataagagtataatacacatctgtacataagttattgtgatattatatgttttcgttgcaacgcacgggcattcacctagtagtgtataaaacatctcactgcaaggtctatactggtta

SEQ ID NO: 20963 - DNA, 2161 bp, Zea Mays
agcgcattgttactccgccggagtgctgtcaagaagattgtaagcagccgcggctttgttgtaacccaactcaacatagtggaaggctctatctgtcatactgacagatctgagcaaacggaggaaggagttgaaatagactccaagcccaggtgtggctaactccaacgaggactaggcaagcatttcaggcttggccgaacctcgggataaattcctgcgtctgtgtgcttcgctctgtattgtgtgctgactctctgtcttactcactttttatatctgcacttcaacacttatctgtggtacaagttatatttgaagtgcagggcattttgagacaggatcttctattccgctgcaacctactcgaaggatctttcattccactgcgatctggtccttgagtagagtaagaactaaagttttaaagtgataattttttattcgcctattcaccccccctctaggcgacatccagatcctgttcccgggcaaagggaactttcactatgtactcaccaaggcacccattacgaggcgtggaacatcgtcgtgcttgttccggtgacgttgtcctgcctctatgagaggaagagggaactcaacaaccaaaaatggacctaccagcctgcaccgtgaggtgctaggcgtgcgttccatcgtcaggagctcctccgtcgagtggggttctgtggccaaaaagcagcccatgacatggcacaaggacacaaggttgatttgttatttatatgttgattgctcctgcaaatcagtggtggatttactgcagcgtgcataatctggagtctttcttttacactgcttcgatgaaatctgatgtattcactacatgcaatttctgattattattcatatttcataaggaccaaaaatacctagcatttattatcccacgctgatggatgaaaaaagcgacgcacaccggccagcgggcagctcttcctctcaggccaagtctactctcacctcccccgtctctcagatccacgctgcctagttgttcggacttcagaccccgccgtgcgctgcccatggccgcgggtcgcggcgacgcggcgagcatggtggcggtgggtctggtgtggggcgccaccaacgcgctgatgcggcggggcgcgctcgtctgggaccgccgcgcccgtgcctgcccctccggcaacgtcctccggcggtgggcggagctgctcctgacgtggcagtactcggcgccgttcgccgccaacctgagcgcgtccgcggccttcttcgcgctcctcggcggcgcgcccatctccgtggccgtccccgtcaccaacgccgtcactttcgccgccacggccgccgccgccgcggcccttggcgagcgcgtccggccagcgcccgcggtccttggtaccacgctcatcgtcctcggcgtctgggtctgcatctcgtaggcttaggctgaagatctgcttggtttagttctggcattacagtcgtcgcatggggggaaaaaaggaagttttgagggcaattctcagattccatttcactcctctgtgctgtgttgccaattgccatatgagtgaattattcccagtttgttgatggcagcggcgtttcattagctagatggtcagaatataatgcagtttcattctggtaattttggttactgaatccatttctgcttaggtgatgaatgaatataacactacggttccattcattacatcctgagggttgacatcccacagcagagcattcttctacccttggagctaatttgagaaccttattttatcaattgatttctaaattctccttggcattgaattggatcaacagagttgtttttccaaattcatttcaagctgaaatggtattggggcacgtttctgtttcatatgttttgatgttcaattccagcaaataccaagctcctcggttccgtattgggggtgtgtggtttgcttctgtactgatatcatggtgaattgagggtcaaattctaaggctcaattccaagacatccaaacacgtggtggtattggagatatacaattccaattctccaaatcctagcttaatgccagcatccaaatggggtgttaggtttttggggggcaatgcatcaccacaagttacctgaatattcagaaacataggtgctgtttgg

SEQ ID NO: 20964 - DNA, 2191 bp, Zea Mays
agcgcattgttactccgccggagtgctgtcaagaagattgtaagcagccgcggctttgttgtaacccaactcaacatagtggaaggctctatctgtcatactgacagatctgagcaaacggaggaaggagttgaaatagactccaagcccaggtgtggctaactccaacgaggactaggcaagcatttcaggcttggccgaacctcgggataaattcctgcgtctgtgtgcttcgctctgtattgtgtgctgactctctgtcttactcactttttatatctgcacttcaacacttatctgtggtacaagttatatttgaagtgcagggcattttgagacaggatcttctattccgctgcaacctactcgaaggatctttcattccactgcgatctggtccttgagtagagtaagaactaaagttttaaagtgataattttttattcgcctattcaccccccctctaggcgacatccagatcctgttcccgggcaaagggaactttcactatgtactcaccaaggcacccattacgaggcgtggaacatcgtcgtgcttgttccggtgacgttgtcctgcctctatgagaggaagagggaactcaacaaccaaaaatggacctaccagatcagcctgcaccgtgaggtgctaggcgtgcgttccatcgtcaggagctcctccgtcgagtggggttctgtggccaaaaagcagcccatgacatggcacaaggacacaaggtcagtggtgtactaatactacagggttgatttgttatttatatgttgattgctcctgcaaatcagtggtggatttactgcagcgtgcataatctggagtctttcttttacactgcttcgatgaaatctgatgtattcactacatgcaatttctgattattattcatatttcataaggaccaaaaatacctagcatttattatcccacgctgatggatgaaaaaagcgacgcacaccggccagcgggcagctcttcctctcaggccaagtctactctcacctcccccgtctctcagatccacgctgcctagttgttcggacttcagaccccgccgtgcgctgcccatggccgcgggtcgcggcgacgcggcgagcatggtggcggtgggtctggtgtggggcgccaccaacgcgctgatgcggcggggcgcgctcgtctgggaccgccgcgcccgtgcctgcccctccggcaacgtcctccggcggtgggcggagctgctcctgacgtggcagtactcggcgccgttcgccgccaacctgagcgcgtccgcggccttcttcgcgctcctcggcggcgcgcccatctccgtggccgtccccgtcaccaacgccgtcactttcgccgccacggccgccgccgccgcggcccttggcgagcgcgtccggccagcgcccgcggtccttggtaccacgctcatcgtcctcggcgtctgggtctgcatctcgtaggcttaggctgaagatctgcttggtttagttctggcattacagtcgtcgcatggggggaaaaaaggaagttttgagggcaattctcagattccatttcactcctctgtgctgtgttgccaattgccatatgagtgaattattcccagtttgttgatggcagcggcgtttcattagctagatggtcagaatataatgcagtttcattctggtaattttggttactgaatccatttctgcttaggtgatgaatgaatataacactacggttccattcattacatcctgagggttgacatcccacagcagagcattcttctacccttggagctaatttgagaaccttattttatcaattgatttctaaattctccttggcattgaattggatcaacagagttgtttttccaaattcatttcaagctgaaatggtattggggcacgtttctgtttcatatgttttgatgttcaattccagcaaataccaagctcctcggttccgtattgggggtgtgtggtttgcttctgtactgatatcatggtgaattgagggtcaaattctaaggctcaattccaagacatccaaacacgtggtggtattggagatatacaattccaattctccaaatcctagcttaatgccagcatccaaatggggtgttaggtttttggggggcaatgcatcaccacaagttacctgaatattcagaaacataggtgctgtttgg

SEQ ID NO: 20965 - DNA, 2014 bp, Zea Mays
agcgcattgttactccgccggagtgctgtcaagaagattgtaagcagccgcggctttgttgtaacccaactcaacatagtggaaggctctatctgtcatactgacagatctgagcaaacggaggaaggagttgaaatagactccaagcccaggtgtggctaactccaacgaggactaggcaagcatttcaggcttggccgaacctcgggataaattcctgcgtctgtgtgcttcgctctgtattgtgtgctgactctctgtcttactcactttttatatctgcacttcaacacttatctgtggtacaagttatatttgaagtgcagggcattttgagacaggatcttctattccgctgcaacctactcgaaggatctttcattccactgcgatctggtccttgagtagagtaagaactaaagttttaaagtgataattttttattcgcctattcaccccccctctaggcgacatccagatcctgttcccgggcaaagggaactttcactatgtactcaccaaggcacccattacgaggcgtggaacatcgtcgtgcttgttccggtgacgttgtcctgcctctatgagaggaagagggaactcaacaaccaaaaatggacctaccagatcagcctgcaccgtgaggtgctaggcgtgcgttccatcgtcaggagctcctccgtcgagtggggttctgtggccaaaaagcagcccatgacatggcacaaggacacaaggaccaaaaatacctagcatttattatcccacgctgatggatgaaaaaagcgacgcacaccggccagcgggcagctcttcctctcaggccaagtctactctcacctcccccgtctctcagatccacgctgcctagttgttcggacttcagaccccgccgtgcgctgcccatggccgcgggtcgcggcgacgcggcgagcatggtggcggtgggtctggtgtggggcgccaccaacgcgctgatgcggcggggcgcgctcgtctgggaccgccgcgcccgtgcctgcccctccggcaacgtcctccggcggtgggcggagctgctcctgacgtggcagtactcggcgccgttcgccgccaacctgagcgcgtccgcggccttcttcgcgctcctcggcggcgcgcccatctccgtggccgtccccgtcaccaacgccgtcactttcgccgccacggccgccgccgccgcggcccttggcgagcgcgtccggccagcgcccgcggtccttggtaccacgctcatcgtcctcggcgtctgggtctgcatctcgtaggcttaggctgaagatctgcttggtttagttctggcattacagtcgtcgcatggggggaaaaaaggaagttttgagggcaattctcagattccatttcactcctctgtgctgtgttgccaattgccatatgagtgaattattcccagtttgttgatggcagcggcgtttcattagctagatggtcagaatataatgcagtttcattctggtaattttggttactgaatccatttctgcttaggtgatgaatgaatataacactacggttccattcattacatcctgagggttgacatcccacagcagagcattcttctacccttggagctaatttgagaaccttattttatcaattgatttctaaattctccttggcattgaattggatcaacagagttgtttttccaaattcatttcaagctgaaatggtattggggcacgtttctgtttcatatgttttgatgttcaattccagcaaataccaagctcctcggttccgtattgggggtgtgtggtttgcttctgtactgatatcatggtgaattgagggtcaaattctaaggctcaattccaagacatccaaacacgtggtggtattggagatatacaattccaattctccaaatcctagcttaatgccagcatccaaatggggtgttaggtttttggggggcaatgcatcaccacaagttacctgaatattcagaaacataggtgctgtttgg

SEQ ID NO: 20966 - DNA, 1593 bp, Zea Mays
gggaagtggtggtggaagggcgaggcgataatggtgacgacgaaaaggaggagctgcgggaggagaacggggaagaagattctgtgtcgtgatgtgactgtgagagcacactgggcctccaacgatcttcctttctgcttcttgggctgacgatggatcgagcgggagacgtcgccgtcgaggtgggggcaccgccaaatatgatctgcgtttgggggcccatatagacatgagtagggcccggctggccaagcccgttcatcggcggcggagccggagcagaagaagcctcgtggacggtcgcagtacgtggacgcggcggcgtcggcgtccggtatggatccggtttcgccggaggatgcgacgcctgctgcggcacgcctaccgggtaggccatgacgggtgacttattctgagccgcctcgtcgtgctgcggcacgcccaccggtgcataggcgctgaagttggccgccttgtccgggacccgctttaccaccggcgcgacgacggggcccaggcggtaggacacgttcagcacgccgcgcggttcccaccggtgcaccttccggacctggtacgacgccacctgcggcggctggggcccggcgccggtcgcgccggcgaggatgtcggcgagcgggacgacgacctcgcccacgtcgcggtcacccaggagccgctcggcccggagcagcacgtggagggacgcgccggacgccgtcggagggacggcgaaccggaacgtcgcgttccagcacgggttccgcccgccgtatgggtccggctccgtgcactgccgcgtcagcgggtcgccggagatgctcaccacggcgtacacgtgcatgcgcgtcatcaggttcacgctcttcagctcctgcgctgacaggaggctcagctccaactcccggtgtttctcgatgttattgaatgaattgatcttgcatggacaagcagtcctgaagctcaatgcttgatggatcagatcgcttatggaatcttgcttgcttgatcgatcacaaggcgcttattgacatcctgccatgtcctggtcctacatgttgaagttacttcatgatcattctggttcctggaaaattatgctcaaggcaatggatactcatcatagtacatagcaagggcaccttgcagctgatctacattatttaggccctgtttgtttgggattataatctaggtagattatataatccaatgtaaataagctagtgaggaaacaaacaagcaacttatctgataagattatataatctagcaattgagattatgataatctataaactcatcaaaaggtgcttatttcagtttattttttatgaaagacccactacacatggcaagttgattaaaattacttccaattgccatccacctgtctatagacgttctcacccaccagacaaataaaacagccgagggtattgttgtatttgtatgcatatgaataataagccaagtccaaataatctgagctaacaaacagcagcacctagcttatttaatctagagcaaataatccagattatacaatctagagtataatttagattatataatctataagtgaaaacgaac

SEQ ID NO: 20967 - DNA, 1549 bp, Zea Mays
gggaagtggtggtggaagggcgaggcgataatggtgacgacgaaaaggaggagctgcgggaggagaacggggaagaagattctgtgtcgtgatgtgactgtgagagcacactgggcctccaacgatcttcctttctgcttcttgggctgacgatggatcgagcgggagacgtcgccgtcgaggtgggggcaccgccaaatatgatctgcgtttgggggcccatatagacatgagtagggcccggctggccaagcccgttcatcggcggcggagccggagcagaagaagcctcgtggacggtcgcagtacgtggacgcggcggcgtcggcgtccggtatggatccggtttcgccggaggatgcgacgcctgctgcggcacgcctaccgggtaggccatgacgggtgacttattctgagccgcctcgtcgtgctgcggcacgcccaccggtgcataggcgctgaagttggccgccttgtccgggacccgctttaccaccggcgcgacgacggggcccaggcggtaggacacgttcagcacgccgcgcggttcccaccggtgcaccttccggacctggtacgacgccacctgcggcggctggggcccggcgccggtcgcgccggcgaggatgtcggcgagcgggacgacgacctcgcccacgtcgcggtcacccaggagccgctcggcccggagcagcacgtggagggacgcgccggacgccgtcggagggacggcgaaccggaacgtcgcgttccagcacgggttccgcccgccgtatgggtccggctccgtgcactgccgcgtcagcgggtcgccggagatgctcaccacggcgtacacgtgcatgcgcgtcatcaggttcacgctcttcagctcctgcgctgacaggaggctcagctccaactcccggtgtttctcgatgttattgaatgaattgatcttgcatggacaagcagtcctgaagctcaatgcttgatggatcagatcgcttatggaatcttgcttgcttgatcgatcacaagttacttcatgatcattctggttcctggaaaattatgctcaaggcaatggatactcatcatagtacatagcaagggcaccttgcagctgatctacattatttaggccctgtttgtttgggattataatctaggtagattatataatccaatgtaaataagctagtgaggaaacaaacaagcaacttatctgataagattatataatctagcaattgagattatgataatctataaactcatcaaaaggtgcttatttcagtttattttttatgaaagacccactacacatggcaagttgattaaaattacttccaattgccatccacctgtctatagacgttctcacccaccagacaaataaaacagccgagggtattgttgtatttgtatgcatatgaataataagccaagtccaaataatctgagctaacaaacagcagcacctagcttatttaatctagagcaaataatccagattatacaatctagagtataatttagattatataatctataagtgaaaacgaac

SEQ ID NO: 20968 - DNA, 1275 bp, Zea Mays
gggaagtggtggtggaagggcgaggcgataatggtgacgacgaaaaggaggagctgcgggaggagaacggggaagaagattctgtgtcgtgatgtgactgtgagagcacactgggcctccaacgatcttcctttctgcttcttgggctgacgatggatcgagcgggagacgtcgccgtcgaggtgggggcaccgccaaatatgatctgcgtttgggggcccatatagacatgagtagggcccggctggccaagcccgttcatcggcggcggagccggagcagaagaagcctcgtggacggtcgcagtacgtggacgcggcggcgtcggcgtccggtatggatccggtttcgccggaggatgcgacgcctgctgcggcacgcctaccgggtaggccatgacgggtgacttattctgagccgcctcgtcgtgctgcggcacgcccaccggtgcataggcgctgaagttggccgccttgtccgggacccgctttaccaccggcgcgacgacggggcccaggcggtaggacacgttcagcacgccgcgcggttcccaccggtgcaccttccggacctggtacgacgccacctgcggcggctggggcccggcgccggtcgcgccggcgaggatgtcggcgagcgggacgacgacctcgcccacgtcgcggtcacccaggagccgctcggcccggagcagcacgtggagggacgcgccggacgccgtcggagggacggcgaaccggaacgtcgcgttccagcacgggttccgcccgccgtatgggtccggctccgtgcactgccgcgtcagcgggtcgccggagatgctcaccacggcgtacacgtgcatgcgcgtcatcaggttcacgctcttcagctcctgcgctgacaggaggctcagctccaactcccggtgtttctcgatgttattgaatgaattgatcttgcatggacaagcagtcctgaagctcaatgcttgatggatcagatcgcttatggaatcttgcttgcttgatcgatcacaaggtgtcttcgtccttggtgtcactttgctcgtggatcagaggtgtcgcttcggggtgcaccaaacggctgggaccattcacggcacggatgttatagtaagcccaggattagtgtttctttcttagcaagtagattagcacacaatcaccttccaggtattgtgatttacttaccatatacaactgcgtgtaatttctttatatagagatagagaacaaacagaaaacgttgtctcattaacagcaccaaacccat

SEQ ID NO: 20969 - DNA, 2488 bp, Zea Mays
gtcgctgctcgcttcgcatcaaccgtatccgcttcttgggaaggctccatgcctcgccccgccgcaacaaactcctccgctccacacctctcaccaagaccgccccttccctgcccgcacacggcggcgccccaatctctccaccacgtgtgacggcgacggcgccccatccctctccagcgcgcgtagaggcggcgtccctccctctcccgtgcgtggcggtggccggatgcggtggaggcggagggtatcgccatcggcggtagcggcggcggcggaggaggcggcgccatgaggggggcgcgggcgggagtgggcgctggctgcggcggcaggaggtgggacagcgagcctgtgagctctcaagataatttccaggcttcagaactttgacaggagcagtgttgcatctgttgtcacagctgcagataaggtgtttaaccaaaatttgtctaaatcggtggaaataaagctgttattggtctactcaaccttattcatgatcatgttacaagtccattacttgtaagccaccataacaaacttgctgcagggaggtgcaacccatgttgacatagcatgtgacaaggacttagtaaagcttgccatggatgttaccaaccttccggtaagctatccattcatagggtgattggaacctgtggttgtaattgccgttatggtttcgcctagcatcagagttggttgtgctaagtgcatttctggggaaaactgcatattgcagatctatgtctcatttgtagatccttcagcgttccattctgcagtacaagcaggagctaaaatggccaggcactaaacttccgatgctaaccatgcaaaaatttcaaaagaaagtcatttttctataacatatgtttgcacccttaaaccatctttctttatggtctgttttatttggtaatttatctatctgatcagttttcaattttgtatcgcatttcaaaattttcagaacatagggagcatcagcatgcttggtagttggcacttcttagtcttaatttgaatgtgttcacagctatactgatatacaattctccaaattgttaatgaatatgttctcaacaagtatgatattgcatcaattggatttaggaattatgaataagtatattattgccctagcattctgaactctgtacctaaatttagctttatttctctaagcctgtttcattcagttaccttggccgcaacagttgtaaagtaaaactgaatgctactaaaaacattagttctatttttatgtattttgattgttccaagcagcataattaattacatagtgattttgaagtgttcttttcagttagtcagtactttgatgtatatcaggattaatctctggtgtttaatacagtgttttgtagcgattaatggtgttgtctcaatgaactcatacatgcgttttcttcgatcgtaccaggaatcgaatgttgctggttagattcatttatgttctgttcgtgctcatggtgtcttgtagaatagatagagtgtatgcctgtgttctctttggaaagtgtattttggtgcaacaacctctattttttgaactcaggttgatgcttctgtttttgaatgtttctccacatataatgaatatgggttgggtttagaaggtgctagacagagaccgattttttaaggttgacagcctaattatgaggcatacaattttttggctctcctgtatgacatttcatggaaacaataattttctctgtatcgatgtttgaaagaccgtaactatttgttgataagctctagatggtgttggttgacctcttactgatgctattttattttagaatatttttttgtggaagtggaagggttctagcagggattctcttcccttcagccgaaaatcaacaaggatctattcagggtggaactaactgacatcgaggtttgctcgagctccctcagcacatagctgaacaaggtcccgatgaccgctgttatctgcgtacactggtccaaatcatctgcactgaccagaagaggctcagctacgacacttgaggacgatgacagtgaactgaatatattttcacaattagtctagatttatggatgtgtgccttcattaatggtgacagtagtactcatgtggctccattgctcattgagatatggtggcatgttgaattgttgaccccccctacgttgtatcacatattcacatctactagcactggtagttatgaactaggacaacaactctttttatttttcgtattagccttctttgaaatgatcatgcgaatattgatattttcacattgtttttttttgcgattttagccttaattttcatataactagctcatatcgtcattgaatataagtctttaggttgttatgtttaggctgtctctagcatcctttgtatcccacaccttatctcattccctatatcgaacttcattgtagtctacaatgcaaaacaatatttttg

SEQ ID NO: 20970 - DNA, 1057 bp, Zea Mays
gtcgctgctcgcttcgcatcaaccgtatccgcttcttgggaaggctccatgcctcgccccgccgcaacaaactcctccgctccacacctctcaccaagaccgccccttccctgcccgcacacggcggcgccccaatctctccaccacgtgtgacggcgacggcgccccatccctctccagcgcgcgtagaggcggcgtccctccctctcccgtgcgtggcggtggccggatgcggtggaggcggagggtatcgccatcggcggtagcggcggcggcggaggaggcggcgccatgaggggggcgcgggcgggagtgggcgctggctgcggcggcaggagataatttccaggcttcagaactttgacaggagcagtgttgcatctgttgtcacagctgcagataagaatatttttttgtggaagtggaagggttctagcagggattctcttcccttcagccgaaaatcaacaaggatctattcagggtggaactaactgacatcgaggtttgctcgagctccctcagcacatagctgaacaaggtcccgatgaccgctgttatctgcgtacactggtccaaatcatctgcactgaccagaagaggctcagctacgacacttgaggacgatgacagtgaactgaatatattttcacaattagtctagatttatggatgtgtgccttcattaatggtgacagtagtactcatgtggctccattgctcattgagatatggtggcatgttgaattgttgaccccccctacgttgtatcacatattcacatctactagcactggtagttatgaactaggacaacaactctttttatttttcgtattagccttctttgaaatgatcatgcgaatattgatattttcacattgtttttttttgcgattttagccttaattttcatataactagctcatatcgtcattgaatataagtctttaggttgttatgtttaggctgtctctagcatcctttgtatcccacaccttatctcattccctatatcgaacttcattgtagtctacaatgcaaaacaatatttttg

SEQ ID NO: 20971 - DNA, 2679 bp, Zea Mays
gtcgctgctcgcttcgcatcaaccgtatccgcttcttgggaaggctccatgcctcgccccgccgcaacaaactcctccgctccacacctctcaccaagaccgccccttccctgcccgcacacggcggcgccccaatctctccaccacgtgtgacggcgacggcgccccatccctctccagcgcgcgtagaggcggcgtccctccctctcccgtgcgtggcggtggccggatgcggtggaggcggagggtatcgccatcggcggtagcggcggcggcggaggaggcggcgccatgaggggggcgcgggcgggagtgggcgctggctgcggcggcaggagataatttccaggcttcagaactttgacaggagcagtgttgcatctgttgtcacagctgcagataagaggtacgaataatctaagattgtgtcgctgatgattttgtcaagaaagaagtctagaatcagacggcaggtcattgtgcaggactcaagtttccttattcttcatccaagatgttaattgaagtcattatcaacacaagttagctgtataatcaacctactctcttcgcatacaatcaacatctatgaaaaccaggaagcaacctataattttctcacatgtgtttaaccaaaatttgtctaaatcggtggaaataaagctgttattggtctactcaaccttattcatgatcatgttacaagtccattacttgtaagccaccataacaaacttgctgcagggaggtgcaacccatgttgacatagcatgtgacaaggacttagtaaagcttgccatggatgttaccaaccttccggtaagctatccattcatagggtgattggaacctgtggttgtaattgccgttatggtttcgcctagcatcagagttggttgtgctaagtgcatttctggggaaaactgcatattgcagatctatgtctcatttgtagatccttcagcgttccattctgcagtacaagcaggagctaaaatggccaggcactaaacttccgatgctaaccatgcaaaaatttcaaaagaaagtcatttttctataacatatgtttgcacccttaaaccatctttctttatggtctgttttatttggtaatttatctatctgatcagttttcaattttgtatcgcatttcaaaattttcagaacatagggagcatcagcatgcttggtagttggcacttcttagtcttaatttgaatgtgttcacagctatactgatatacaattctccaaattgttaatgaatatgttctcaacaagtatgatattgcatcaattggatttaggaattatgaataagtatattattgccctagcattctgaactctgtacctaaatttagctttatttctctaagcctgtttcattcagttaccttggccgcaacagttgtaaagtaaaactgaatgctactaaaaacattagttctatttttatgtattttgattgttccaagcagcataattaattacatagtgattttgaagtgttcttttcagttagtcagtactttgatgtatatcaggattaatctctggtgtttaatacagtgttttgtagcgattaatggtgttgtctcaatgaactcatacatgcgttttcttcgatcgtaccaggaatcgaatgttgctggttagattcatttatgttctgttcgtgctcatggtgtcttgtagaatagatagagtgtatgcctgtgttctctttggaaagtgtattttggtgcaacaacctctattttttgaactcaggttgatgcttctgtttttgaatgtttctccacatataatgaatatgggttgggtttagaaggtgctagacagagaccgattttttaaggttgacagcctaattatgaggcatacaattttttggctctcctgtatgacatttcatggaaacaataattttctctgtatcgatgtttgaaagaccgtaactatttgttgataagctctagatggtgttggttgacctcttactgatgctattttattttagaatatttttttgtggaagtggaagggttctagcagggattctcttcccttcagccgaaaatcaacaaggatctattcagggtggaactaactgacatcgaggtttgctcgagctccctcagcacatagctgaacaaggtcccgatgaccgctgttatctgcgtacactggtccaaatcatctgcactgaccagaagaggctcagctacgacacttgaggacgatgacagtgaactgaatatattttcacaattagtctagatttatggatgtgtgccttcattaatggtgacagtagtactcatgtggctccattgctcattgagatatggtggcatgttgaattgttgaccccccctacgttgtatcacatattcacatctactagcactggtagttatgaactaggacaacaactctttttatttttcgtattagccttctttgaaatgatcatgcgaatattgatattttcacattgtttttttttgcgattttagccttaattttcatataactagctcatatcgtcattgaatataagtctttaggttgttatgtttaggctgtctctagcatcctttgtatcccacaccttatctcattccctatatcgaacttcattgtagtctacaatgcaaaacaatatttttg

SEQ ID NO: 20972 - DNA, 2251 bp, Zea Mays
gtcgctgctcgcttcgcatcaaccgtatccgcttcttgggaaggctccatgcctcgccccgccgcaacaaactcctccgctccacacctctcaccaagaccgccccttccctgcccgcacacggcggcgccccaatctctccaccacgtgtgacggcgacggcgccccatccctctccagcgcgcgtagaggcggcgtccctccctctcccgtgcgtggcggtggccggatgcggtggaggcggagggtatcgccatcggcggtagcggcggcggcggaggaggcggcgccatgaggggggcgcgggcgggagtgggcgctggctgcggcggcaggaggtgggacagcgagcctgtgagctctcaagataatttccaggcttcagaactttgacaggagcagtgttgcatctgttgtcacagctgcagataagggaggtgcaacccatgttgacatagcatgtgacaaggacttagtaaagcttgccatggatgttaccaaccttccgatctatgtctcatttgtagatccttcagcgttccattctgcagtacaagcaggagctaaaatggccaggcactaaacttccgatgctaaccatgcaaaaatttcaaaagaaagtcatttttctataacatatgtttgcacccttaaaccatctttctttatggtctgttttatttggtaatttatctatctgatcagttttcaattttgtatcgcatttcaaaattttcagaacatagggagcatcagcatgcttggtagttggcacttcttagtcttaatttgaatgtgttcacagctatactgatatacaattctccaaattgttaatgaatatgttctcaacaagtatgatattgcatcaattggatttaggaattatgaataagtatattattgccctagcattctgaactctgtacctaaatttagctttatttctctaagcctgtttcattcagttaccttggccgcaacagttgtaaagtaaaactgaatgctactaaaaacattagttctatttttatgtattttgattgttccaagcagcataattaattacatagtgattttgaagtgttcttttcagttagtcagtactttgatgtatatcaggattaatctctggtgtttaatacagtgttttgtagcgattaatggtgttgtctcaatgaactcatacatgcgttttcttcgatcgtaccaggaatcgaatgttgctggttagattcatttatgttctgttcgtgctcatggtgtcttgtagaatagatagagtgtatgcctgtgttctctttggaaagtgtattttggtgcaacaacctctattttttgaactcaggttgatgcttctgtttttgaatgtttctccacatataatgaatatgggttgggtttagaaggtgctagacagagaccgattttttaaggttgacagcctaattatgaggcatacaattttttggctctcctgtatgacatttcatggaaacaataattttctctgtatcgatgtttgaaagaccgtaactatttgttgataagctctagatggtgttggttgacctcttactgatgctattttattttagaatatttttttgtggaagtggaagggttctagcagggattctcttcccttcagccgaaaatcaacaaggatctattcagggtggaactaactgacatcgaggtttgctcgagctccctcagcacatagctgaacaaggtcccgatgaccgctgttatctgcgtacactggtccaaatcatctgcactgaccagaagaggctcagctacgacacttgaggacgatgacagtgaactgaatatattttcacaattagtctagatttatggatgtgtgccttcattaatggtgacagtagtactcatgtggctccattgctcattgagatatggtggcatgttgaattgttgaccccccctacgttgtatcacatattcacatctactagcactggtagttatgaactaggacaacaactctttttatttttcgtattagccttctttgaaatgatcatgcgaatattgatattttcacattgtttttttttgcgattttagccttaattttcatataactagctcatatcgtcattgaatataagtctttaggttgttatgtttaggctgtctctagcatcctttgtatcccacaccttatctcattccctatatcgaacttcattgtagtctacaatgcaaaacaatatttttg

SEQ ID NO: 20973 - DNA, 2339 bp, Zea Mays
gtcgctgctcgcttcgcatcaaccgtatccgcttcttgggaaggctccatgcctcgccccgccgcaacaaactcctccgctccacacctctcaccaagaccgccccttccctgcccgcacacggcggcgccccaatctctccaccacgtgtgacggcgacggcgccccatccctctccagcgcgcgtagaggcggcgtccctccctctcccgtgcgtggcggtggccggatgcggtggaggcggagggtatcgccatcggcggtagcggcggcggcggaggaggcggcgccatgaggggggcgcgggcgggagtgggcgctggctgcggcggcaggagataatttccaggcttcagaactttgacaggagcagtgttgcatctgttgtcacagctgcagataagggaggtgcaacccatgttgacatagcatgtgacaaggacttagtaaagcttgccatggatgttaccaaccttccggtaagctatccattcatagggtgattggaacctgtggttgtaattgccgttatggtttcgcctagcatcagagttggttgtgctaagtgcatttctggggaaaactgcatattgcagatctatgtctcatttgtagatccttcagcgttccattctgcagtacaagcaggagctaaaatggccaggcactaaacttccgatgctaaccatgcaaaaatttcaaaagaaagtcatttttctataacatatgtttgcacccttaaaccatctttctttatggtctgttttatttggtaatttatctatctgatcagttttcaattttgtatcgcatttcaaaattttcagaacatagggagcatcagcatgcttggtagttggcacttcttagtcttaatttgaatgtgttcacagctatactgatatacaattctccaaattgttaatgaatatgttctcaacaagtatgatattgcatcaattggatttaggaattatgaataagtatattattgccctagcattctgaactctgtacctaaatttagctttatttctctaagcctgtttcattcagttaccttggccgcaacagttgtaaagtaaaactgaatgctactaaaaacattagttctatttttatgtattttgattgttccaagcagcataattaattacatagtgattttgaagtgttcttttcagttagtcagtactttgatgtatatcaggattaatctctggtgtttaatacagtgttttgtagcgattaatggtgttgtctcaatgaactcatacatgcgttttcttcgatcgtaccaggaatcgaatgttgctggttagattcatttatgttctgttcgtgctcatggtgtcttgtagaatagatagagtgtatgcctgtgttctctttggaaagtgtattttggtgcaacaacctctattttttgaactcaggttgatgcttctgtttttgaatgtttctccacatataatgaatatgggttgggtttagaaggtgctagacagagaccgattttttaaggttgacagcctaattatgaggcatacaattttttggctctcctgtatgacatttcatggaaacaataattttctctgtatcgatgtttgaaagaccgtaactatttgttgataagctctagatggtgttggttgacctcttactgatgctattttattttagaatatttttttgtggaagtggaagggttctagcagggattctcttcccttcagccgaaaatcaacaaggatctattcagggtggaactaactgacatcgaggtttgctcgagctccctcagcacatagctgaacaaggtcccgatgaccgctgttatctgcgtacactggtccaaatcatctgcactgaccagaagaggctcagctacgacacttgaggacgatgacagtgaactgaatatattttcacaattagtctagatttatggatgtgtgccttcattaatggtgacagtagtactcatgtggctccattgctcattgagatatggtggcatgttgaattgttgaccccccctacgttgtatcacatattcacatctactagcactggtagttatgaactaggacaacaactctttttatttttcgtattagccttctttgaaatgatcatgcgaatattgatattttcacattgtttttttttgcgattttagccttaattttcatataactagctcatatcgtcattgaatataagtctttaggttgttatgtttaggctgtctctagcatcctttgtatcccacaccttatctcattccctatatcgaacttcattgtagtctacaatgcaaaacaatatttttg

SEQ ID NO: 20974 - DNA, 1591 bp, Zea Mays
gtcgctgctcgcttcgcatcaaccgtatccgcttcttgggaaggctccatgcctcgccccgccgcaacaaactcctccgctccacacctctcaccaagaccgccccttccctgcccgcacacggcggcgccccaatctctccaccacgtgtgacggcgacggcgccccatccctctccagcgcgcgtagaggcggcgtccctccctctcccgtgcgtggcggtggccggatgcggtggaggcggagggtatcgccatcggcggtagcggcggcggcggaggaggcggcgccatgaggggggcgcgggcgggagtgggcgctggctgcggcggcaggaggtgggacagcgagcctgtgagctctcaagataatttccaggcttcagaactttgacaggagcagtgttgcatctgttgtcacagctgcagataagaggtacgaataatctaagattgtgtcgctgatgattttgtcaagaaagaagtctagaatcagacggcaggtcattgtgcaggactcaagtttccttattcttcatccaagatgttaattgaagtcattatcaacacaagttagctgtataatcaacctactctcttcgcatacaatcaacatctatgaaaaccaggaagcaacctataattttctcacatgtgtgtattttttaaagacaaaatagaatgcggcctataaattagttaaatttagaaagtgcctgttaaaagagccttttttctgcacaggtgtttaaccaaaatttgtctaaatcggtggaaataaagctgttattggtctactcaaccttattcatgatcatgttacaagtccattacttgtaagccaccataacaaacttgctgcagggaggtgcaacccatgttgacatagcatgtgacaaggacttagtaaagcttgccatggatgttaccaaccttccgaatatttttttgtggaagtggaagggttctagcagggattctcttcccttcagccgaaaatcaacaaggatctattcagggtggaactaactgacatcgaggtttgctcgagctccctcagcacatagctgaacaaggtcccgatgaccgctgttatctgcgtacactggtccaaatcatctgcactgaccagaagaggctcagctacgacacttgaggacgatgacagtgaactgaatatattttcacaattagtctagatttatggatgtgtgccttcattaatggtgacagtagtactcatgtggctccattgctcattgagatatggtggcatgttgaattgttgaccccccctacgttgtatcacatattcacatctactagcactggtagttatgaactaggacaacaactctttttatttttcgtattagccttctttgaaatgatcatgcgaatattgatattttcacattgtttttttttgcgattttagccttaattttcatataactagctcatatcgtcattgaatataagtctttaggttgttatgtttaggctgtctctagcatcctttgtatcccacaccttatctcattccctatatcgaacttcattgtagtctacaatgcaaaacaatatttttg

SEQ ID NO: 20975 - DNA, 1161 bp, Zea Mays
gtcgctgctcgcttcgcatcaaccgtatccgcttcttgggaaggctccatgcctcgccccgccgcaacaaactcctccgctccacacctctcaccaagaccgccccttccctgcccgcacacggcggcgccccaatctctccaccacgtgtgacggcgacggcgccccatccctctccagcgcgcgtagaggcggcgtccctccctctcccgtgcgtggcggtggccggatgcggtggaggcggagggtatcgccatcggcggtagcggcggcggcggaggaggcggcgccatgaggggggcgcgggcgggagtgggcgctggctgcggcggcaggaggtgggacagcgagcctgtgagctctcaagataatttccaggcttcagaactttgacaggagcagtgttgcatctgttgtcacagctgcagataagggaggtgcaacccatgttgacatagcatgtgacaaggacttagtaaagcttgccatggatgttaccaaccttccgaatatttttttgtggaagtggaagggttctagcagggattctcttcccttcagccgaaaatcaacaaggatctattcagggtggaactaactgacatcgaggtttgctcgagctccctcagcacatagctgaacaaggtcccgatgaccgctgttatctgcgtacactggtccaaatcatctgcactgaccagaagaggctcagctacgacacttgaggacgatgacagtgaactgaatatattttcacaattagtctagatttatggatgtgtgccttcattaatggtgacagtagtactcatgtggctccattgctcattgagatatggtggcatgttgaattgttgaccccccctacgttgtatcacatattcacatctactagcactggtagttatgaactaggacaacaactctttttatttttcgtattagccttctttgaaatgatcatgcgaatattgatattttcacattgtttttttttgcgattttagccttaattttcatataactagctcatatcgtcattgaatataagtctttaggttgttatgtttaggctgtctctagcatcctttgtatcccacaccttatctcattccctatatcgaacttcattgtagtctacaatgcaaaacaatatttttg

SEQ ID NO: 20976 - DNA, 2798 bp, Zea Mays
gtcgctgctcgcttcgcatcaaccgtatccgcttcttgggaaggctccatgcctcgccccgccgcaacaaactcctccgctccacacctctcaccaagaccgccccttccctgcccgcacacggcggcgccccaatctctccaccacgtgtgacggcgacggcgccccatccctctccagcgcgcgtagaggcggcgtccctccctctcccgtgcgtggcggtggccggatgcggtggaggcggagggtatcgccatcggcggtagcggcggcggcggaggaggcggcgccatgaggggggcgcgggcgggagtgggcgctggctgcggcggcaggaggtgggacagcgagcctgtgagctctcaagataatttccaggcttcagaactttgacaggagcagtgttgcatctgttgtcacagctgcagataagaggtacgaataatctaagattgtgtcgctgatgattttgtcaagaaagaagtctagaatcagacggcaggtcattgtgcaggactcaagtttccttattcttcatccaagatgttaattgaagtcattatcaacacaagttagctgtataatcaacctactctcttcgcatacaatcaacatctatgaaaaccaggaagcaacctataattttctcacatgtgtgtattttttaaagacaaaatagaatgcggcctataaattagttaaatttagaaagtgcctgttaaaagagccttttttctgcacaggtgtttaaccaaaatttgtctaaatcggtggaaataaagctgttattggtctactcaaccttattcatgatcatgttacaagtccattacttgtaagccaccataacaaacttgctgcagggaggtgcaacccatgttgacatagcatgtgacaaggacttagtaaagcttgccatggatgttaccaaccttccggtaagctatccattcatagggtgattggaacctgtggttgtaattgccgttatggtttcgcctagcatcagagttggttgtgctaagtgcatttctggggaaaactgcatattgcagatctatgtctcatttgtagatccttcagcgttccattctgcagtacaagcaggagctaaaatggccaggcactaaacttccgatgctaaccatgcaaaaatttcaaaagaaagtcatttttctataacatatgtttgcacccttaaaccatctttctttatggtctgttttatttggtaatttatctatctgatcagttttcaattttgtatcgcatttcaaaattttcagaacatagggagcatcagcatgcttggtagttggcacttcttagtcttaatttgaatgtgttcacagctatactgatatacaattctccaaattgttaatgaatatgttctcaacaagtatgatattgcatcaattggatttaggaattatgaataagtatattattgccctagcattctgaactctgtacctaaatttagctttatttctctaagcctgtttcattcagttaccttggccgcaacagttgtaaagtaaaactgaatgctactaaaaacattagttctatttttatgtattttgattgttccaagcagcataattaattacatagtgattttgaagtgttcttttcagttagtcagtactttgatgtatatcaggattaatctctggtgtttaatacagtgttttgtagcgattaatggtgttgtctcaatgaactcatacatgcgttttcttcgatcgtaccaggaatcgaatgttgctggttagattcatttatgttctgttcgtgctcatggtgtcttgtagaatagatagagtgtatgcctgtgttctctttggaaagtgtattttggtgcaacaacctctattttttgaactcaggttgatgcttctgtttttgaatgtttctccacatataatgaatatgggttgggtttagaaggtgctagacagagaccgattttttaaggttgacagcctaattatgaggcatacaattttttggctctcctgtatgacatttcatggaaacaataattttctctgtatcgatgtttgaaagaccgtaactatttgttgataagctctagatggtgttggttgacctcttactgatgctattttattttagaatatttttttgtggaagtggaagggttctagcagggattctcttcccttcagccgaaaatcaacaaggatctattcagggtggaactaactgacatcgaggtttgctcgagctccctcagcacatagctgaacaaggtcccgatgaccgctgttatctgcgtacactggtccaaatcatctgcactgaccagaagaggctcagctacgacacttgaggacgatgacagtgaactgaatatattttcacaattagtctagatttatggatgtgtgccttcattaatggtgacagtagtactcatgtggctccattgctcattgagatatggtggcatgttgaattgttgaccccccctacgttgtatcacatattcacatctactagcactggtagttatgaactaggacaacaactctttttatttttcgtattagccttctttgaaatgatcatgcgaatattgatattttcacattgtttttttttgcgattttagccttaattttcatataactagctcatatcgtcattgaatataagtctttaggttgttatgtttaggctgtctctagcatcctttgtatcccacaccttatctcattccctatatcgaacttcattgtagtctacaatgcaaaacaatatttttg

SEQ ID NO: 20977 - DNA, 1086 bp, Zea Mays
gtcgctgctcgcttcgcatcaaccgtatccgcttcttgggaaggctccatgcctcgccccgccgcaacaaactcctccgctccacacctctcaccaagaccgccccttccctgcccgcacacggcggcgccccaatctctccaccacgtgtgacggcgacggcgccccatccctctccagcgcgcgtagaggcggcgtccctccctctcccgtgcgtggcggtggccggatgcggtggaggcggagggtatcgccatcggcggtagcggcggcggcggaggaggcggcgccatgaggggggcgcgggcgggagtgggcgctggctgcggcggcaggaggtgggacagcgagcctgtgagctctcaagataatttccaggcttcagaactttgacaggagcagtgttgcatctgttgtcacagctgcagataagaatatttttttgtggaagtggaagggttctagcagggattctcttcccttcagccgaaaatcaacaaggatctattcagggtggaactaactgacatcgaggtttgctcgagctccctcagcacatagctgaacaaggtcccgatgaccgctgttatctgcgtacactggtccaaatcatctgcactgaccagaagaggctcagctacgacacttgaggacgatgacagtgaactgaatatattttcacaattagtctagatttatggatgtgtgccttcattaatggtgacagtagtactcatgtggctccattgctcattgagatatggtggcatgttgaattgttgaccccccctacgttgtatcacatattcacatctactagcactggtagttatgaactaggacaacaactctttttatttttcgtattagccttctttgaaatgatcatgcgaatattgatattttcacattgtttttttttgcgattttagccttaattttcatataactagctcatatcgtcattgaatataagtctttaggttgttatgtttaggctgtctctagcatcctttgtatcccacaccttatctcattccctatatcgaacttcattgtagtctacaatgcaaaacaatatttttg

SEQ ID NO: 20978 - DNA, 1562 bp, Zea Mays
gtcgctgctcgcttcgcatcaaccgtatccgcttcttgggaaggctccatgcctcgccccgccgcaacaaactcctccgctccacacctctcaccaagaccgccccttccctgcccgcacacggcggcgccccaatctctccaccacgtgtgacggcgacggcgccccatccctctccagcgcgcgtagaggcggcgtccctccctctcccgtgcgtggcggtggccggatgcggtggaggcggagggtatcgccatcggcggtagcggcggcggcggaggaggcggcgccatgaggggggcgcgggcgggagtgggcgctggctgcggcggcaggagataatttccaggcttcagaactttgacaggagcagtgttgcatctgttgtcacagctgcagataagaggtacgaataatctaagattgtgtcgctgatgattttgtcaagaaagaagtctagaatcagacggcaggtcattgtgcaggactcaagtttccttattcttcatccaagatgttaattgaagtcattatcaacacaagttagctgtataatcaacctactctcttcgcatacaatcaacatctatgaaaaccaggaagcaacctataattttctcacatgtgtgtattttttaaagacaaaatagaatgcggcctataaattagttaaatttagaaagtgcctgttaaaagagccttttttctgcacaggtgtttaaccaaaatttgtctaaatcggtggaaataaagctgttattggtctactcaaccttattcatgatcatgttacaagtccattacttgtaagccaccataacaaacttgctgcagggaggtgcaacccatgttgacatagcatgtgacaaggacttagtaaagcttgccatggatgttaccaaccttccgaatatttttttgtggaagtggaagggttctagcagggattctcttcccttcagccgaaaatcaacaaggatctattcagggtggaactaactgacatcgaggtttgctcgagctccctcagcacatagctgaacaaggtcccgatgaccgctgttatctgcgtacactggtccaaatcatctgcactgaccagaagaggctcagctacgacacttgaggacgatgacagtgaactgaatatattttcacaattagtctagatttatggatgtgtgccttcattaatggtgacagtagtactcatgtggctccattgctcattgagatatggtggcatgttgaattgttgaccccccctacgttgtatcacatattcacatctactagcactggtagttatgaactaggacaacaactctttttatttttcgtattagccttctttgaaatgatcatgcgaatattgatattttcacattgtttttttttgcgattttagccttaattttcatataactagctcatatcgtcattgaatataagtctttaggttgttatgtttaggctgtctctagcatcctttgtatcccacaccttatctcattccctatatcgaacttcattgtagtctacaatgcaaaacaatatttttg

SEQ ID NO: 20979 - DNA, 363 bp, Zea Mays
gtcatcacccttgggtcgcagctccgtgtcgatgacttgcgatcctcaccctcgcactcacgcttcgtcgaatgccgctccagtactcgccagaagaagatcttcaacagttgattattgaagaaaagaagacccctgggtgacgtctacctagtgttcgacgaaaaatctgaagaagaatttgtcgccgtgtccgtggaagtggaatgacttgatattggtacgataattaatcgcgtgatgcggaagacgacctaagtcgacccccaagatgacgtaacgagtgggtttcttcccaaggtgatactgggtgatcaagctgaagatggataatctaatgaatgccaggacaaaggatggtca

SEQ ID NO: 20980 - DNA, 3942 bp, Zea Mays
aacgtggcacggcgaggcgtttctgaaggaacaagaaagcagtgtcgccaccaccgcgagaaagcaggcatcgccttcacagccgacaaaagctacggcctatggcggatacggtcgcccctccactgcctcccttgccgcgctgtcttcttcatctcatcgcttcccatagttgtgccagttggagacccttctgttgctgaaggagacctacataaactatagttagccgctaagttaaacaagccacgcgctaggtcagaacctagcaggcttaaggatcagtaaaatgatatctgttcaacatgaggcacaacgatatctatctttcaagaatcaataaactggtatccgctagatgtgcttctctgtcttcgtttgttttgaaacacatatatagttgaaaaactgtagtggtgagaaactcgaaatgaatctgagccagaactcagctcagactgccaaatttcataattttattcacaaatttcaacaatattaaacattgagtatatattaagcgaataccaaaatcatgttttctagcctgtttcatgccatgatgacatctttctggcaatgtgaccttgaccactggatgcatagttgttgtatttttatgaatggtatttttacaacaaattatttagagtcataaatgtaaatacgaattactaaaaacttaggaggaaacacttcttttcgtttctatggaaataattttaggacatcttagcccctgaagtacctaaaagcacatatgggtatccagctgttgatttcttttcatcatattgtgtttgctgtaaaagtgcaaatataacacatatgcacaatggtgctatatgggtgaatgtcattactgcagtcaaggtgtttattttctcatagtgttgcttatttattaggtgtttattttctcatagtgttgcttatttattaggtcattcaaccttaaatgtgtcatatgccatcacaacattgatttactccatgatacataaggagtgctggaggagatagtccctattaattgatgttaatttgattcccatgctattgttttagtaatcactaatttccctaccttgtttcttgattgctaggctctctacagtttgctaagtgactttttgttagctactgtgatatcaggaactgataacatccatcatttttataatagttattacctattaggatatgtaacatcttgaactttttggtacatgcagatataagagtgagcgcctctcaacttgagtggattatcttgtttctatgtttttgtttatcacatagacgaagttaatgcttaatccccagagatgcatataaccaagtggcacttacttggatctgagaacctctagtgcttgtttatctcaagtaagccttttgagtcttaatgtttcattgaagaacatcaatgcttaattgcaagtcaatgttgtaattcttgagaagtcatggaagcttataagaagaaaggatgggctctaacaaatcatttacctaatttaccaggtatatcaactattttacctagatttattcaggaaaatttacatttagcctttctttgggagaatcttactttttaacttatggtgcacaattagtccacttcttttgagaacaaggaggttcatcatgaaccagttgttcacaatatgctaaattgttagaaagttaactactaactacaatgaaaccgttttttatgaaacagttattattttgtcaccacttgcaatacagaagacaaaactcatgaaatttgatagatgtaatcctcacatttgaaccatagtagtgcagtgcagtaacacaagaatagtttcattcattatctgcaaagtcatcccttatagttgtcaatgaactatcatgtgaagacagaataagaactttgtgattctcacatttgcgattgcttgtttatttatgtgtctgaataaaagtgttactataaaatatttgacctattttggaaattttatttattgtgtaatcatggcctagatgtttagattattgattagcagattttctatgcattattctgagtttgtagacaacagacatgggtgtcttttgatattaattgtcaggtcaaaggtcagttttgtggaaaatatacaatatgttaatatcttcaatagtacaagatcttgtactacatgtcaatgttaatatcgactaatttcttgattattttcaataggatgggagagtgtcgaatgctttttcagatactatttcttggtccgtcaaatctatttgagctaaatgcaagtttttgctcaaatgtggcaaaaaatgattgtctcaccaattgtgagcacgactgcctccaacaaagttagaatgaaaagatggaatagaactttggtggccgcacatgtgtggagactagaattcatatatacttagttaggctcaacgttaacgcaaacagttgataaccaaaattttcaattagtactttagtttgaatttagattacacttttgtatgagttatttgacaatgcttatttattagatattgaatgatacttatctatattatattaattataatgttattaaatacatgtgtgtatgtatatttctcttttaaattattataatgcagtatctcaaaattgattataaattgaagaatgtacgacaatctaaaccattttgtttaaaacttaataagacggtttccaaagcgtccgatattagtctcctaaatgagatggttttcctgttgcaagcgtttattattcatatgacattatagacaatttgataaatactttgtgacttataatattcatattatcgacggttctttagaagaagtgtcttaaacagaaacctaatttaagacggtttatcaaacaaaatgacttaaacaaatacctttttatacggttataaattaaaaattgtcttgtataatatcttttaagacggtttacaaccatcttaaatgtgggacatcttttgcgactccatcaaatttggacactacgtaagcgtcttaataactgaaaaataactgtctcatataacataatctgtagtaatgcatgatgacgacatagattggcgacatggactgattgattcagcggtggtgtatgctaatggtggtggaaaggcgcatcgatggtgatttgatagtttcttaatttttgttagtatttttaactaaaatttacatgttttagattttgaggctactctatgtttatcgggtggccggcttgagagatgaccggtcatagagaggatcttcctctcaaatttcaggtggtactagtagccgacgacagtgtcgcacagagcaagaccttgtcattgaaaatctattggagcaactgagggtgcaacaagttgtacatgagttagtaaaaggagtactttgctatatataatttctagcagcaagagtacaacgctaactacgacgcccaataacattggattactgtaaatatgattttacaatatttaacatttgttgtatttaaaagtactaacatgttgtatttgtcgtcaatgttttagtagcagcctgttttgttgaatgccttgctatagtggcagccgccgtcaatgcccccgccgccgatgttccttagttccatcctctaggacatcctagagcgcaggtttattgtactttcacaaattatgtttaacttattcgattctagatacatttagtcaatctaggtgaacttgtataatctagggatctggagttaatgtgataaatgtctatcaaacccctccatatgcaacagcaaatagagatatggttattctattaaatatcaattattgtatctatttgattacatatgctgctataacttataatttgttctttaattatggactttgttatttattgtaggacaatccggctactaactttgtc

SEQ ID NO: 20981 - DNA, 4470 bp, Zea Mays
cgccaccaccgcgagaaagcaggcatcgccttcacagccgacaaaagctacggcctatggcggatacggtcgcccctccactgcctcccttgccgcgctgtcttcttcatctcatcgcttcccataggtacgaacaaccctctttcatcgcgcttactcagatcagatcttgtctattagggttagttagctgcctttttcatgcaccacttcgtcgttgcggctagattgtccagtcatcttagtcagcttctccaacattgctttcctcttggatttaatttatcctacttagcacaaaccgatcggagagcaaactgccatttggtaacagttctagatatggccaattctgatttggtatgaagtcccctgtagccacacttataaattccccatgtgtattttgcatctccattattttttgactgatatgaagactttttcgttttcttacattcggttcagtagtaaaatgcaattccaaactgcactacagcagagtctacgaagtacagacagacactttaaaaaatatcaatcaacctcatgaatatatctaaggttgaaatataatcgacactaagagtatgtgacatgcaaattacacatgtaagtattctttcaggaagactaaattctgttgctgcatatggctattaacagttatgaaatacagactgtatagaaactgaatgtcagtaatgaaatgcagactatatagaaactgtctaggagtactaaaacttaatgaaaatggaactcaaatgtttgagaacacaaattgcaacttcggatgaaaataaaaggttgcatatcatcataatataaaattattaataaatcaatggattgagatgtacgaggcatgataccatgagtaagtttcctgcataagcaactactttacgacatacttttgatctatccttgaggcaattgcaatttgcatgtgacccttcaccagaatcttttaaaacaatctccttcacactctagaacacaggaaagcaatagcttgatgatatagacctcaaagtaaccaaattaatttccaatgctcaaagagatgtacttgatttaaatacaaacagaatgtaagaaatttcatttcttaataagtttgcagatgcagagaatgggctgcaccaaatttaactaatgtttattttgcatgctctatataattatatatatgtctagctgtttagctctgggaaacaatatgtgtaaatatagcaacctaactctagatattgtaacaaaaatattaatttccatagttgtcaccatatgtgcgtttataatctttttattacaaatgcacgatactccttcttgaccacttgtgtgaaacaatgaactaatatttgttagtagagattatttttattaatctaagatgtcaattttttaacctaacctatttagcctttgattttttttctaaataatgcatggttttgttggtattgcagttgtgccagttggagacccttctgttgctgaaggagacctacataaactatagttagccgctaagttaaacaagccacgcgctaggtcagaacctagcaggcttaaggatcagtaaaatgatatctgttcaacatgaggcacaacgatatctatctttcaagaatcaataaactggtatccgctagatgtgcttctctgtcttcgtttgttttgaaacacatatatagttgaaaaactgtagtggtgagaaactcgaaatgaatctgagccagaactcagctcagactgccaaatttcataattttattcacaaatttcaacaatattaaacattgagtatatattaagcgaataccaaaatcatgttttctagcctgtttcatgccatgatgacatctttctggcaatgtgaccttgaccactggatgcatagttgttgtatttttatgaatggtatttttacaacaaattatttagagtcataaatgtaaatacgaattactaaaaacttaggaggaaacacttcttttcgtttctatggaaataattttaggacatcttagcccctgaagtacctaaaagcacatatgggtatccagctgttgatttcttttcatcatattgtgtttgctgtaaaagtgcaaatataacacatatgcacaatggtgctatatgggtgaatgtcattactgcagtcaaggtgtttattttctcatagtgttgcttatttattaggtgtttattttctcatagtgttgcttatttattaggtcattcaaccttaaatgtgtcatatgccatcacaacattgatttactccatgatacataaggagtgctggaggagatagtccctattaattgatgttaatttgattcccatgctattgttttagtaatcactaatttccctaccttgtttcttgattgctaggctctctacagtttgctaagtgactttttgttagctactgtgatatcaggaactgataacatccatcatttttataatagttattacctattaggatatgtaacatcttgaactttttggtacatgcagatataagagtgagcgcctctcaacttgagtggattatcttgtttctatgtttttgtttatcacatagacgaagttaatgcttaatccccagagatgcatataaccaagtggcacttacttggatctgagaacctctagtgcttgtttatctcaatcatggaagcttataagaagaaaggatgggctctaacaaatcatttacctaatttaccaggatgggagagtgtcgaatgctttttcagatactatttcttggtccgtcaaatctatttgagctaaatgcaagtttttgctcaaatgtggcaaaaaatgattgtctcaccaattgtgagcacgactgcctccaacaaagttagaatgaaaagatggaatagaactttggtggccgcacatgtgtggagactagaattcatatatacttagttaggctcaacgttaacgcaaacagttgataaccaaaattttcaattagtactttagtttgaatttagattacacttttgtatgagttatttgacaatgcttatttattagatattgaatgatacttatctatattatattaattataatgttattaaatacatgtgtgtatgtatatttctcttttaaattattataatgcagtatctcaaaattgattataaattgaagaatgtacgacaatctaaaccattttgtttaaaacttaataagacggtttccaaagcgtccgatattagtctcctaaatgagatggttttcctgttgcaagcgtttattattcatatgacattatagacaatttgataaatactttgtgacttataatattcatattatcgacggttctttagaagaagtgtcttaaacagaaacctaatttaagacggtttatcaaacaaaatgacttaaacaaatacctttttatacggttataaattaaaaattgtcttgtataatatcttttaagacggtttacaaccatcttaaatgtgggacatcttttgcgactccatcaaatttggacactacgtaagcgtcttaataactgaaaaataactgtctcatataacataatctgtagtaatgcatgatgacgacatagattggcgacatggactgattgattcagcggtggtgtatgctaatggtggtggaaaggcgcatcgatggtgatttgatagtttcttaatttttgttagtatttttaactaaaatttacatgttttagattttgaggctactctatgtttatcgggtggccggcttgagagatgaccggtcatagagaggatcttcctctcaaatttcaggtggtactagtagccgacgacagtgtcgcacagagcaagaccttgtcattgaaaatctattggagcaactgagggtgcaacaagttgtacatgagttagtaaaaggagtactttgctatatataatttctagcagcaagagtacaacgctaactacgacgcccaataacattggattactgtaaatatgattttacaatatttaacatttgttgtatttaaaagtactaacatgttgtatttgtcgtcaatgttttagtagcagcctgttttgttgaatgccttgctatagtggcagccgccgtcaatgcccccgccgccgatgttccttagttccatcctctaggacatcctagagcgcaggtttattgtactttcacaaattatgtttaacttattcgattctagatacatttagtcaatctaggtgaacttgtataatctagggatctggagttaatgtgataaatgtctatcaaacccctccatatgcaacagcaaatagagatatggttattctattaaatatcaattattgtatctatttgattacatatgctgctataacttataatttgttctttaattatggactttgttatttattgtaggacaatccggctactaactttgtc

SEQ ID NO: 20982 - DNA, 2862 bp, Zea Mays
cttcgtttgttttgaaacacatatatagttgaaaaactgtagtggtgagaaactcgaaatgaatctgagccagaactcagctcagactgccaaatttcataattttattcacaaatttcaacaatattaaacattgagtatatattaagcgaataccaaaatcatgttttctagcctgtttcatgccatgatgacatctttctggcaatgtgaccttgaccactggatgcatagttgttgtatttttatgaatggtatttttacaacaaattatttagagtcataaatgtaaatacgaattactaaaaacttaggaggaaacacttcttttcgtttctatggaaataattttaggacatcttagcccctgaagtacctaaaagcacatatgggtatccagctgttgatttcttttcatcatattgtgtttgctgtaaaagtgcaaatataacacatatgcacaatggtgctatatgggtgaatgtcattactgcagtcaaggtgtttattttctcatagtgttgcttatttattaggtgtttattttctcatagtgttgcttatttattaggtcattcaaccttaaatgtgtcatatgccatcacaacattgatttactccatgatacataaggagtgctggaggagatagtccctattaattgatgttaatttgattcccatgctattgttttagtaatcactaatttccctaccttgtttcttgattgctaggctctctacagtttgctaagtgactttttgttagctactgtgatatcaggaactgataacatccatcatttttataatagttattacctattaggatatgtaacatcttgaactttttggtacatgcagatataagagtgagcgcctctcaacttgagtggattatcttgtttctatgtttttgtttatcacatagacgaagttaatgcttaatccccagagatgcatataaccaagtggcacttacttggatctgagaacctctagtgcttgtttatctcaagtaagccttttgagtcttaatgtttcattgaagaacatcaatgcttaattgcaagtcaatgttgtaattcttgagaagtcatggaagcttataagaagaaaggatgggctctaacaaatcatttacctaatttaccaggatgggagagtgtcgaatgctttttcagatactatttcttggtccgtcaaatctatttgagctaaatgcaagtttttgctcaaatgtggcaaaaaatgattgtctcaccaattgtgagcacgactgcctccaacaaagaaaagatggaatagaactttggtggccgcacatgtgtggagactagaattcatatatacttagttaggctcaacgttaacgcaaacagttgataaccaaaattttcaattagtactttagtttgaatttagattacacttttgtatgagttatttgacaatgcttatttattagatattgaatgatacttatctatattatattaattataatgttattaaatacatgtgtgtatgtatatttctcttttaaattattataatgcagtatctcaaaattgattataaattgaagaatgtacgacaatctaaaccattttgtttaaaacttaataagacggtttccaaagcgtccgatattagtctcctaaatgagatggttttcctgttgcaagcgtttattattcatatgacattatagacaatttgataaatactttgtgacttataatattcatattatcgacggttctttagaagaagtgtcttaaacagaaacctaatttaagacggtttatcaaacaaaatgacttaaacaaatacctttttatacggttataaattaaaaattgtcttgtataatatcttttaagacggtttacaaccatcttaaatgtgggacatcttttgcgactccatcaaatttggacactacgtaagcgtcttaataactgaaaaataactgtctcatataacataatctgtagtaatgcatgatgacgacatagattggcgacatggactgattgattcagcggtggtgtatgctaatggtggtggaaaggcgcatcgatggtgatttgatagtttcttaatttttgttagtatttttaactaaaatttacatgttttagattttgaggctactctatgtttatcgggtggccggcttgagagatgaccggtcatagagaggatcttcctctcaaatttcaggtggtactagtagccgacgacagtgtcgcacagagcaagaccttgtcattgaaaatctattggagcaactgagggtgcaacaagttgtacatgagttagtaaaaggagtactttgctatatataatttctagcagcaagagtacaacgctaactacgacgcccaataacattggattactgtaaatatgattttacaatatttaacatttgttgtatttaaaagtactaacatgttgtatttgtcgtcaatgttttagtagcagcctgttttgttgaatgccttgctatagtggcagccgccgtcaatgcccccgccgccgatgttccttagttccatcctctaggacatcctagagcgcaggtttattgtactttcacaaattatgtttaacttattcgattctagatacatttagtcaatctaggtgaacttgtataatctagggatctggagttaatgtgataaatgtctatcaaacccctccatatgcaacagcaaatagagatatggttattctattaaatatcaattattgtatctatttgattacatatgctgctataacttataatttgttctttaattatggactttgttatttattgtaggacaatccggctactaactttgtc

SEQ ID NO: 20983 - DNA, 1060 bp, Zea Mays
atgtctggatgcgtgaaaggctggggactagaagagtgtgttaagggaaagtgatgctgctattgcggctagagctgactcttatgctctgctcttggctgctagagcagaagcccttttccatctcaatttacttgatgaggctgatgttgcaatctctagtgcctccaaattgaattatacatcgtcatgctccccagacaccaaattttgcgggtttattgccaacgcctacctcttttatgtacatgcccaagttgacatggcattaggaaggtttgaccatgtagtgtcctccattgataaggctagaataatagatccaggaaaaactgaagtggtaaccatgcataacaaagtgaaatccgtggccagagcacgatctctagggaacgagctcttcaattctggaaaattttcagaagcttgcattgcttatggtgaagggttgaaacaacaccctgtgaataaagtcctgtactgtaatagggtagcttgtaggttcaaacttgaacagtgggagaagtcaattgaggactgtaatgaagctctcaagattcaacctaattataccaaggctttgctcaggcgggcagcatcttatggcaagtgctatgaagttattgtggttaatggaaaatgtggttgccatgcttctgctattgtacagattgaggaagccaattttttggtaccatattttggtgtatctagggcagtggagacacggagattggaggacagaagtgcgcatcacaggactacagcgagggggaaggccagatcaagcaggagacaacaagaggtggctgctgctcaattggctggcagtgctcatgctcaaatatacccttcactcactgacgttttcaaacctctgataaaggagggcaatgtctacaatgtctcctatattcagatcaagaaagctaataggatgtacaagcctgttgacaacgatatcatgatctgtttcacaaaatggatcctatgctggttatctccagcagcttacccatccccatatccatattcaaagttcactatgcgaatagtatag

SEQ ID NO: 20984 - DNA, 1086 bp, Zea Mays
gctgctattgcggctagagctgactcttatgctctgctcttggctgctagagcagaagcccttttccatctcaatttacttgatgaggctgatgttgcaatctctagtgcctccaaattgaattatacatcgtcatgctccccagacaccaaattttgcgggtttattgccaacgcctacctcttttatgtacatgcccaagttgacatggcattaggaaggtttgaccatgtagtgtcctccattgataaggctagaataatagatccaggaaaaactgaagtggtaaccatgcataacaaagtgaaatccgtggccagagcacgatctctagggaacgagctcttcaattctggaaaattttcagaagcttgcattgcttatggtgaagggttgaaacaacaccctgtgaataaagtcctgtactgtaatagggtagcttgtaggttcaaacttgaacagtgggagaagtcaattgaggactgtaatgaagctctcaagattcaacctaattataccaaggctttgctcaggcgggcagcatcttatggcaagcaatagattggaaaatgagctgtcaggcggtagaacccacttcgtggagacatgtgggttgccaatcagtacctatttcagtgctatgaagttattgtggttaatggaaaatgtggttgccatgcttctgctattgtacagattgaggaagccaattttttggtaccatattttggtgtatctagggcagtggagacacggagattggaggacagaagtgcgcatcacaggactacagcgagggggaaggccagatcaagcaggagacaacaagaggtggctgctgctcaattggctggcagtgctcatgctcaaatatacccttcactcactgacgttttcaaacctctgataaaggagggcaatgtctacaatgtctcctatattcagatcaagaaagctaataggatgtacaagcctgttgacaacgatatcatgatctgtttcacaaaatggatcctatgctggttatctccagcagcttacccatccccatatccatattcaaagttcactatgcgaatagtatag

SEQ ID NO: 20985 - DNA, 1259 bp, Zea Mays
ctccaacgacgacgacgacgtccattattgcaactacattcccactactgatccatccatcgcttgttattttgtctgcttgtcctagctatatatatagtctggttgccggggccggccttattcccatacacatatcatcgtctttggcggtcgagattcacctatagctagctggagtccagcagcagcaacatggtaggaggagcgggaggagaagtcatcgggggcggcggctgcagcggcgaggtcgtggtggtggtcgtcggccgggccgagatcgacaccagggcaccgttccgatcggtcaaggaggccgtggccctcttcggcgagagggtcctcgccggggagctctccgctggacgacgaggaccactctcctccgtcaccgagcctacccgatcatcgattgcacagaatcgaatggcggcaacaagacccaagcaccacgccatgagtcctgccaccggcgcggtcaccacggctgcgctgcgcgccgtgccaccggtagtcgtcacagcgggtcagctggaggaggctaagcagaaactggagaaggagcgggaggagaagcagaagatggccgggtgcatccagaccctgcaagaggagctcagccacgccatggaggaacttaagaggctcaaggcgcgggacgacgaggaggccgccggaaccaaggtcatcgacctggagatcgacgagggcctctactttaccgaggccgccgaaaagcaaatggcgccgccgccacagggcgctgccggcggagcaggcgagctccagaagaagaggtacgtgacgttcgctgacccgccgacggtcgccaccaccgccgccgccgcgtgccgggcgccaccgttgccggacgtggtgatggaggtgcaccgcgcgccaacccaccagctccaccagccgcacccgcattactaccgggagccgcggttccagaggcagatgtcggccgggcacgaggccgccaaggcgatggcggatgagggaaggaagaagaagaagccgctcatcccgctcgtgggcgcgctcttcatgcggaggaagaagagcagcaaaagttgccacgacgacgtggcgttttgatccatcaatacatgcatacgtatatgcatgcatccacggagtgatggaggtgcttttattttaatttttttaatatatatgtctagataatggaatgcgcactgataatgcatggatctttgcaaaataaataaatatatccaatacacaaatatatc

SEQ ID NO: 20986 - DNA, 1917 bp, Zea Mays
agccacgcaacaccgcagcatttcttcttcttcttgtcagtagctgtggcctgcacagctagcgccactgtaccgccattgttttgttagcatggccccgagtaacatcgtcgttcagagcagcagcactccgccggttgccggcggcgacgaggagttcgcgccgtctgtatggggagatttcttcgtcacctatgccactcccgtctcacagcagagcagcggatgagtgagagagcggagctgctcaaggcgcaagtacgtcaggcgttcgatgctgccagcatggatgttgcaggtctgatcacgtacgtcgacaccctcgaacgcctcggcttagacaaccacttccgcgacctcatcggagctgccctggaacgaatcggagctgaggagctgccggagcacggcggcggcctgcacatcgtcgcgcttcggtttcgcctgctccggcagcatgggatatgggtatctacagatgtgttcgacgcgttcagagaggacgcgggcggtttctgctcgagcctctgcagtgacgaccctaggggtctcctgagcttgtacaatgcggctcacatggcagtacccggcgaggtggtcctcgacgacgccatcgccttcgcgaggggccgcctcctggacatcatcagcaaaggcgaggtcaggtcaccggtgtcagagcagatcacacgagccctcgacatccccctcccacgatttacgaggcggctggaaaccatgcactatattgccgagtatgagcatgaagaggcacacgacggcctgctgcttgagctcgctaggctcaactttgtccttgtgagagcgcttcacctcagggagctgaaggacctgtcactatggtggagggagctctacaacactgtgaagctcccgtacgctcgggaccgtatggtggagatctacttttggacctgtggtatgcttcatgaggaggagtactccctggcacggatgttcttcgccaagacgttcgggatggtgtcactgatggacgacactttcgatgtccatgctactctagacgagtgtcacaagctcaaagaagctatgcagagatgggatgaaagtgaggtctccattctacccgagtatctacgcttgctgtatatcaaaacacttagcaacttcaaagagtttgaggagatcttggaaccgaacaagaagtaccgcatggcttacacaaaagaggcatacaagttgtgctccaaaaactacctaaaggaagccatctggtctaaccagaaataccagccaagcttcaaggagcatgaggagctatcaatcatgacctcaggcttgccgatgctcacgatcctaacactaatgggcttcggtgacgaggcaaccccggaggcgttcgaatgggtaagcagtgttcctgaaatggtccgcgctggttcgcaggtcactcgcttcctcaacgatttgtcttcttacaagttgggaaagaacaagaaagatatgcctggctctgtggagacctacatggtagagaatggcttaacaggagatgaggctgcagcggcaatcgcggcacttctagagaacaggtggagaatactaaaccaaacaaggatggagatagatcacacgctactgccagcggcgcaggtggtgctcaacatggcgagggcaaatgagatcatttacctccacggcagagacgcctacaccttcggtgctgacctcaaggaccttgtcaccacactcttcctcaagcaagtgctccctctctagacaatactctgatcacacaactagattggctatataacgattctcgtgttgtattacgctttgtgtttcattatgcacgctatatatatgatcaatgtacctgtttctatcatattgatggtaatataatattctaaatggatatagttaacttac

SEQ ID NO: 20987 - DNA, 1924 bp, Zea Mays
agaaacactcgtggaaagcattagacaaatcagcacctgggcttgtcatcaaccgccgcgccgcgccgcgccgactagtcggtggccgtagcgcacctgtaccgcccgcaccgcgcggtcgaacacctcgcgcgcatccatggccaccacccacctcctcactccaccccgcgtccaccacccttccccctccgcttcctcctctgtggctcgcgtccgcgccaccgcctcgctcgcgcacccgctccacctctgccgcctccgcctcgccgccccgcgctcgcgctccccctccccacggcacgggcggcgcgccatgtcggtccgcagctccctcatcgacccggacggcggcgcgctcgtcgagctcgtcgccccgcccgaccgcctcccggcgctgcgcgcggaggcggaggcgctcccgcgggtgcgcctcgcccccgtcgacctccagtgggcgcacgtgctcgccgaggggtgggccagcccgctccgcgggttcatgcgcgagcacgagtacctgcagagcctccacttcaactgcgttcgcctccccgacgggggcctcgtcaacatgtcgctccccatcgtgctcgccatcggggacgccgacaaggagcagatcgggggtaagccggacgtcgcgttacaagggcccgacggcggtgtcgtcgccatcctgcgcagagttgaaatatatccccacaataaagaagaaagaatcgcaagaacatggggtacaactgcacctggtttaccctatgttgatgaggctattgcgtcagctgggaactggctgatcggtggcgatctggaggtgttggaacccatcaaatacaatgatggtcttgatcactacagactttcacctcggcaacttaggaaggagtttgacaagcggggggctgatgctgtgtttgccttccagttgagaaacccagtacacaatggtcatgcactattgatgaatgacactagaaggcgtctcttggaaatgggttacaagaatcccattctactactacatcccttaggtggttataccaaagcggatgatgtcccactgccagttagaatggaacaacacagttttagaagatggagtgcttgatcctgagactactatagtgtctatatttccctcaccaatgcattatgctggtccaacagaagtgcagtggcatgcaaaggcacgaattaatgctggtgccaatttctatatagtaggccgagatcctgctggaatgggacatccaacagaaaagagggacttgtacaacccagatcacgggaagaaggtcctgagcatggctcctggtttagagaaactcaacatactgcccttcaaggtagcagcttatgatacagtagcaaaggagatggccttttttgatccttcacgcagtcaagattttctgttcatctctggaaccaagatgcgcacttatgccaaaactggagagaatcctccagacggtttcatgtgcccgggtgggtggaaggttcttgttgactactacaacagcctgcaagctgaagaagcgactccagtccctgtatgaggcaagctactatttgactaagagattattcaatggcggggaaacatacaagcaagtgatcagatcatttgagcttttttccttattgattctttaggttagtagttgattgatatatgatcagatcttttcgattgtttgtttgtcttaaatatgagactctgaagcatggaaaaactaaagatctgcacaagttgagccaaaacagcatggccattgttctgtagcgaagccggttgaactatataataaaagatgaaagggtgcatattttcttgttgctgtagtagatcatctatgttcccaaaacatttgttttttttgccctacgactgagtgaaaggacactacatttatgattc

SEQ ID NO: 20988 - DNA, 2226 bp, Zea Mays
agtctggtcacacccttcggatccttgttcgcttccggcttccctcgttctctgcgtccgcccctgccgggccttgtcttctcccccaaatcaatccctcgcccacggacccaaccaaatcctcctccacctcctccatctccagccccgtccctacccagctcgtgtaacctcccgatgtccgggggcggaggcggcgcaggcgcgggctcgtcgtccggcggcggcggcggaggtggagggggcggcagggagggcgactgggactgcggcagctgcggcaaccggaactacgccttccgctcgctctgcaaccgttgcaagcagccgcgcctcctcgtcgaccctaacaccccgcgcgactccaagtggctaccccgtgccggggactggatctgcaccgaaagaactgcaaaaagtgtggcctatccaaggaggaagcagcaatgccagcattgcaaatggcagggatggctatgccagcttatgcaacttatatcgcaagactacagagccttgctgcttctgcttctgcatataagatgaactttgggatggctgccaactcacctttgcagcagcaactacttgcaaatgcaaactggtcctatgggatggctggtagatatgggatgcagtcttctggttggccacttggcaacagcagcccaaatcagtttccaggtgttccaaaggattggcgtaatggagactggctctgcagctgtggatttcataattattcatctcgtactcagtgcaaagagtgtggtgcacctataccatcaggcattccctccacaacaatgaaagctacgacatctgatgcctcttccacattaggaactaagcggttagcctcagaggagctggcaaacgactgtgataataaaaggctaaatccaggaaatgacaattatccactttcaacagcaggtgcaaataatttgtttttgggtattgagcaaggagctggaagcagcaatggccaggctgctttttcgaaatttgactatgggagctcaatgtcattaccatctgggcagggaatgtctggtcttatcgtaaaaggggcaaaatggcgcgacggggactggttgtgcaacaactgcaacaaccacaactacgcatctcgtgcgttttgcaacaggtgcaaaactcagaaagaatctgcagttcaccctggtgtgctatagcttgcttttgctggttcatattgttggactcgtttgttgcagggtatgttgctgcctgttctagctgcttcctcaagactgcagtttgagttttttcggttctgctgggtttttgctgctctcaaatgtttgtctcgatattccattagtgcttgttgaagttcccgatttatttatggtataagcgcttgaataaaatatctctggaaagtactggcctaccgcctaccatctgtttttttccaaatatttttattagttgttgtacaatgaggcaaatggtgatatacttatgttgtactttatgaactctgtaggattagtgcaccaaattaaggttttgtggccatgtttcagtcgtcgggttgaaaaagggaactataccatgtaatttcattacagattattattttttcctagaactccaactgtgctgtcataccagttttacccattcataatatttatgatgcattcaccatcattcatttgttactttttcatcttttatgtcctttgcatctattaggctcaggtcgtgcatatgatcatgtaaaacactattttgtagctgcactggttagagagatatgaaatatgagatgagattggatgtgtaaaatatcattagaccctactgttataatcttttatgcccctttgcatctaatcaagctatggttatcaggtcgtgcgtatggttgtggaaaacactattttgcagctgcaatggttagagatttgaaatatgagggaaaatatgagatgagcctcatgctgttgtgcatcatcgatcagaccactataagtaggactggaaatggatgtctggagatccgaattattcgtatttgctgaaaccgttaatatggatatccgtatctttattcgatttcaatatggatgtcaaatgtatacattcgaatttgatttataatacttttctctatccgattctatatttgtattcgaaaaaaccatgaaacatcttatactatccgtattcgtgaaaaaatatgtttaatgaaac

SEQ ID NO: 20989 - DNA, 2415 bp, Zea Mays
agtctggtcacacccttcggatccttgttcgcttccggcttccctcgttctctgcgtccgcccctgccgggccttgtcttctcccccaaatcaatccctcgcccacggacccaaccaaatcctcctccacctcctccatctccagccccgtccctacccagctcgtgtaacctcccgatgtccgggggcggaggcggcgcaggcgcgggctcgtcgtccggcggcggcggcggaggtggagggggcggcagggagggcgactgggactgcggcagctgcggcaaccggaactacgccttccgctcgctctgcaaccgttgcaagcagccgcgcctcctcgtcgaccctaacaccccgcgcgactccaagtggctaccccgtgccggggactggatctgcaccggtaacacctcttctgccgcgctacccttcattattaccccagctctgaatcacctacacttctcatgtttctacgccgtctcttcatgtagatgcagccctcatccattccctatgtatcgcattgatagtttagtgaaactagcatttcttctcctccttgttcatcttttgtgttggttttagccttcttacttgaatctagtacgttgggtgttacaggcctggtaaatactgtagccttcttagctagacttttttctctattaatgcagagaagatgttaataaggcaagttagactcgaaaaagtgtaaataaaggaagtagaaacttcatttaaactaatagaggggagtctaaaaattattttgaccactcctccttgagcatgtgtaaataaagtagaaacttcatttgaccaccccttcagcttctatgcaagccaggatagtcatgctcttcgatctagattttttttaaaatttttttgcactgcatgttctgactcctgtcctggaagtatcttttggatgatttttgttagtgcttcaatcttgctactatctgctagaaatattttgacgattccttttgtttattttgttcatttaatgctgctatatgtagataagattagaaagaattaccaatgagtgtgctgagtaatgactagtgtgcgtggtgtctattcctctctatgggtttgtccgggatggctggtcatcgtggtggtgggtgtgcgtgtccttcggtgcgttttgctgcctgctgtgctggttggtttatgcggcaaatggatgaataggttgcagtaacaataattatgcatccagaaagaactgcaaaaagtgtggcctatccaaggaggaagcagcaatgccagcattgcaaatggcagggatggctatgccagcttatgcaacttatatcgcaagactacagagccttgctgcttctgcttctgcatataagatgaactttgggatggctgccaactcacctttgcagcagcaactacttgcaaatgcaaactggtcctatgggatggctggtagatatgggatgcagtcttctggttggccacttggcaacagcagcccaaatcagtttccaggtgttccaaaggattggcgtaatggagactggctctgcagctgtggatttcataattattcatctcgtactcagtgcaaagagtgtggtgcacctataccatcaggcattccctccacaacaatgaaagctacgacatctgatgcctcttccacattaggaactaagcggttagcctcagaggagctggcaaacgactgtgataataaaaggctaaatccaggaaatgacaattatccactttcaacagcaggtgcaaataatttgtttttgggtattgagcaaggagctggaagcagcaatggccaggctgctttttcgaaatttgactatgggagctcaatgtcattaccatctgggcagggaatgtctggtcttatcgtaaaaggggcaaaatggcgcgacggggactggttgtgcaacaactgcaacaaccacaactacgcatctcgtgcgttttgcaacaggtgcaaaactcagaaagaatctgcagttcaccctggtgtgctatagcttgcttttgctggttcatattgttggactcgtttgttgcagggtcgtgcgtatggttgtggaaaacactattttgcagctgcaatggttagagatttgaaatatgagggaaaatatgagatgagcctcatgctgttgtgcatcatcgatcagaccactataagtaggactggaaatggatgtctggagatccgaattattcgtatttgctgaaaccgttaatatggatatccgtatctttattcgatttcaatatggatgtcaaatgtatacattcgaatttgatttataatacttttctctatccgattctatatttgtattcgaaaaaaccatgaaacatcttatactatccgtattcgtgaaaaaatatgtttaatgaaac

SEQ ID NO: 20990 - DNA, 1679 bp, Zea Mays
agtctggtcacacccttcggatccttgttcgcttccggcttccctcgttctctgcgtccgcccctgccgggccttgtcttctcccccaaatcaatccctcgcccacggacccaaccaaatcctcctccacctcctccatctccagccccgtccctacccagctcgtgtaacctcccgatgtccgggggcggaggcggcgcaggcgcgggctcgtcgtccggcggcggcggcggaggtggagggggcggcagggagggcgactgggactgcggcagctgcggcaaccggaactacgccttccgctcgctctgcaaccgttgcaagcagccgcgcctcctcgtcgaccctaacaccccgcgcgactccaagtggctaccccgtgccggggactggatctgcaccggttgcagtaacaataattatgcatccagaaagaactgcaaaaagtgtggcctatccaaggaggaagcagcaatgccagcattgcaaatggcagggatggctatgccagcttatgcaacttatatcgcaagactacagagccttgctgcttctgcttctgcatataagatgaactttgggatggctgccaactcacctttgcagcagcaactacttgcaaatgcaaactggtcctatgggatggctggtagatatgggatgcagtcttctggttggccacttggcaacagcagcccaaatcagtttccaggtgttccaaaggattggcgtaatggagactggctctgcagctgtggatttcataattattcatctcgtactcagtgcaaagagtgtggtgcacctataccatcaggcattccctccacaacaatgaaagctacgacatctgatgcctcttccacattaggaactaagcggttagcctcagaggagctggcaaacgactgtgataataaaaggctaaatccaggaaatgacaattatccactttcaacagcaggtgcaaataatttgtttttgggtattgagcaaggagctggaagcagcaatggccaggctgctttttcgaaatttgactatgggagctcaatgtcattaccatctgggcagggaatgtctggtcttatcgtaaaaggggcaaaatggcgcgacggggactggttgtgcaacaactgcaacaaccacaactacgcatctcgtgcgttttgcaacaggtgcaaaactcagaaagaatctgcagttcaccctggtgtgctatagcttgcttttgctggttcatattgttggactcgtttgttgcagggattagtgcaccaaattaaggttttgtggccatgtttcagtcgtcgggttgaaaaagggaactataccatgtcgtgcgtatggttgtggaaaacactattttgcagctgcaatggttagagatttgaaatatgagggaaaatatgagatgagcctcatgctgttgtgcatcatcgatcagaccactataagtaggactggaaatggatgtctggagatccgaattattcgtatttgctgaaaccgttaatatggatatccgtatctttattcgatttcaatatggatgtcaaatgtatacattcgaatttgatttataatacttttctctatccgattctatatttgtattcgaaaaaaccatgaaacatcttatactatccgtattcgtgaaaaaatatgtttaatgaaac

SEQ ID NO: 20991 - DNA, 1953 bp, Zea Mays
agtctggtcacacccttcggatccttgttcgcttccggcttccctcgttctctgcgtccgcccctgccgggccttgtcttctcccccaaatcaatccctcgcccacggacccaaccaaatcctcctccacctcctccatctccagccccgtccctacccagctcgtgtaacctcccgatgtccgggggcggaggcggcgcaggcgcgggctcgtcgtccggcggcggcggcggaggtggagggggcggcagggagggcgactgggactgcggcagctgcggcaaccggaactacgccttccgctcgctctgcaaccgttgcaagcagccgcgcctcctcgtcgaccctaacaccccgcgcgactccaagtggctaccccgtgccggggactggatctgcaccggttgcagtaacaataattatgcatccagaaagaactgcaaaaagtgtggcctatccaaggaggaagcagcaatgccagcattgcaaatggcagggatggctatgccagcttatgcaacttatatcgcaagactacagagccttgctgcttctgcttctgcatataagatgaactttgggatggctgccaactcacctttgcagcagcaactacttgcaaatgcaaactggtcctatgggatggctggtagatatgggatgcagtcttctggttggccacttggcaacagcagcccaaatcagtttccaggtgttccaaaggattggcgtaatggagactggctctgcagctgtggatttcataattattcatctcgtactcagtgcaaagagtgtggtgcacctataccatcaggcattccctccacaacaatgaaagctacgacatctgatgcctcttccacattaggaactaagcggttagcctcagaggagctggcaaacgactgtgataataaaaggctaaatccaggaaatgacaattatccactttcaacagcaggtgcaaataatttgtttttgggtattgagcaaggagctggaagcagcaatggccaggctgctttttcgaaatttgactatgggagctcaatgtcattaccatctgggcagggaatgtctggtcttatcgtaaaaggggcaaaatggcgcgacggggactggttgtgcaacaactgcaacaaccacaactacgcatctcgtgcgttttgcaacaggtgcaaaactcagaaagaatctgcagttcaccctggtgtgctatagcttgcttttgctggttcatattgttggactcgtttgttgcagggtatgttgctgcctgttctagctgcttcctcaagactgcagtttgagttttttcggttctgctgggtttttgctgctctcaaatgtttgtctcgatattccattagtgcttgttgaagttcccgatttatttatggtataagcgcttgaataaaatatctctggaaagtactggcctaccgcctaccatctgtttttttccaaatatttttattagttgttgtacaatgaggcaaatggtgatatacttatgttgtactttatgaactctgtaggattagtgcaccaaattaaggttttgtggccatgtttcagtcgtcgggttgaaaaagggaactataccatgtcgtgcgtatggttgtggaaaacactattttgcagctgcaatggttagagatttgaaatatgagggaaaatatgagatgagcctcatgctgttgtgcatcatcgatcagaccactataagtaggactggaaatggatgtctggagatccgaattattcgtatttgctgaaaccgttaatatggatatccgtatctttattcgatttcaatatggatgtcaaatgtatacattcgaatttgatttataatacttttctctatccgattctatatttgtattcgaaaaaaccatgaaacatcttatactatccgtattcgtgaaaaaatatgtttaatgaaac

SEQ ID NO: 20992 - DNA, 1925 bp, Zea Mays
agtctggtcacacccttcggatccttgttcgcttccggcttccctcgttctctgcgtccgcccctgccgggccttgtcttctcccccaaatcaatccctcgcccacggacccaaccaaatcctcctccacctcctccatctccagccccgtccctacccagctcgtgtaacctcccgatgtccgggggcggaggcggcgcaggcgcgggctcgtcgtccggcggcggcggcggaggtggagggggcggcagggagggcgactgggactgcggcagctgcggcaaccggaactacgccttccgctcgctctgcaaccgttgcaagcagccgcgcctcctcgtcgaccctaacaccccgcgcgactccaagtggctaccccgtgccggggactggatctgcaccgaaagaactgcaaaaagtgtggcctatccaaggaggaagcagcaatgccagcattgcaaatggcagggatggctatgccagcttatgcaacttatatcgcaagactacagagccttgctgcttctgcttctgcatataagatgaactttgggatggctgccaactcacctttgcagcagcaactacttgcaaatgcaaactggtcctatgggatggctggtagatatgggatgcagtcttctggttggccacttggcaacagcagcccaaatcagtttccaggtgttccaaaggattggcgtaatggagactggctctgcagctgtggatttcataattattcatctcgtactcagtgcaaagagtgtggtgcacctataccatcaggcattccctccacaacaatgaaagctacgacatctgatgcctcttccacattaggaactaagcggttagcctcagaggagctggcaaacgactgtgataataaaaggctaaatccaggaaatgacaattatccactttcaacagcaggtgcaaataatttgtttttgggtattgagcaaggagctggaagcagcaatggccaggctgctttttcgaaatttgactatgggagctcaatgtcattaccatctgggcagggaatgtctggtcttatcgtaaaaggggcaaaatggcgcgacggggactggttgtgcaacaactgcaacaaccacaactacgcatctcgtgcgttttgcaacaggtgcaaaactcagaaagaatctgcagttcaccctggtgtgctatagcttgcttttgctggttcatattgttggactcgtttgttgcagggtatgttgctgcctgttctagctgcttcctcaagactgcagtttgagttttttcggttctgctgggtttttgctgctctcaaatgtttgtctcgatattccattagtgcttgttgaagttcccgatttatttatggtataagcgcttgaataaaatatctctggaaagtactggcctaccgcctaccatctgtttttttccaaatatttttattagttgttgtacaatgaggcaaatggtgatatacttatgttgtactttatgaactctgtaggattagtgcaccaaattaaggttttgtggccatgtttcagtcgtcgggttgaaaaagggaactataccatgtcgtgcgtatggttgtggaaaacactattttgcagctgcaatggttagagatttgaaatatgagggaaaatatgagatgagcctcatgctgttgtgcatcatcgatcagaccactataagtaggactggaaatggatgtctggagatccgaattattcgtatttgctgaaaccgttaatatggatatccgtatctttattcgatttcaatatggatgtcaaatgtatacattcgaatttgatttataatacttttctctatccgattctatatttgtattcgaaaaaaccatgaaacatcttatactatccgtattcgtgaaaaaatatgtttaatgaaac

SEQ ID NO: 20993 - DNA, 474 bp, Zea Mays
ctcccatggcgcgcttcctccaacgccggccggagtcctctgctggccatcccgcttccctctgtgtagcgcccagccatccctccgtctgttcgccggtgccatggacagctcgcagtcgctacgctgccgggatcctagtcacaatttctaagccgccatcgcgccgtgccggttgtccgtctttgatcctcgctctgacgtcatcttgcccatgcaacgcttgcttggtgctcgccaaaacgcctgaatcaggaccatcgtcgttctcgcgatcatcgagttggcttaggtacgttaattaatcgcgcgatgcggaaaacgacccaagtcgactccaagcacgggctactccgcatggtgaagctgaaggacgaacacaaggatggatgacctgacaagtgccaagacaaagaatggtcatcaagtggacatcgtctaacaaacactaacctagtgtttcttccaggcaag

SEQ ID NO: 20994 - DNA, 3237 bp, Zea Mays
ctcaaacatcactccagtacactccacagtagcgcacgcgcattccacactccagtgcttcggttcagcatggagcctaaaccctcgccgccgccggccgccccttcgcgccgccgcggcgcagcgaccaagcgcaaggagaaggccgcatctgcggtgccctccgggtccccgtcgccgaaacgccaggcccgggagcgcgggcccgtctaccagccgtcccttccgccgcctcaaccgcgcagccgccaacccgcacgcaagccgcagcgcaagcccgcacgcaataaatcgccgcggcgctccgtggagccgccgcgcgcgcaggaggaggaggagggcccgccgccactgccgccaccacggccgtcgctggagaaggagatcgaggccgttctgtcccgcggcgctggcgtccacgttgtacccaccttcgccggatggttttcatggaaggaaattcaccccatcgagaagcaaatgttggctacattttttgatgggaaatcagagagacggacacccgagatatatttgggaatcagaaatttaatcatgaacaagtttcactgtaatcccgaagtgcatctggagtccaaagatttgtgtgagttgtcagttggggagatggatgctcgtctagtaatcttggagttcttggcctactggggtttagttaatttccaccctttcccatcagttgtacaggaacacaagctggttgagagtaaaagtagtgctgagacagcagaaggaatttctcaggctgagaagttatttcagtttgaaacagttcattcttacttggtacctgtttcaaaggaagctgaagcaatatctccagttcagttcactagcttgctccctgagcctaccctagctgaagatgcaataggtgcagctgagtcttctgttgagtaccattgcaattcctgctcagttgattgttcaagaaagcgttatcattgtaggactcaggtagactttgatttttgttcagattgctacaacgaagaaaaatttgatgaaggcatgtcaaaatctgatttcatccttatggaatctgcagatgttccagggtctggtggttctaactggactgaccatgagacattgcttcttttggaagcgttagaaattttcaaaggaaaagaatggcatgagattgctgagcatgttgctacaaaaacaaaagaacagtgcatgttacacttccttcaaatgccaatttctgaaccgtttcttgatggcgatgatttcaatgaaacaccccagaagatcacaaaacaggattcagcagaaactggtccttctgatgtacctgacaagatggatgtagatggtaatgcggaaggaaaagagagcactgatgaaaaagcttacaagaaagcagattccagttccgcagaaacaagaacaaaattagctgaccaaaatatttctgctaaagaggatactatgaaattaggtgatgatgacctagttgcttccattgttgatgaaccaaataaatcttcattggtggatcctgcacataagaagaattctgctaatgctgatgtctctggggaacacccatccaactttattactaatatcctgagatccacttttgaagcagttgaccactttctgggtaaagaagacatgggttcgtttgctgaagcaggaaatcctgtgatggcactggctgcgtttcttgcttctcttgtggaacgtgatgatgctgtttcttcatgttgtagttcgttgagagctatatcagagatgtctcctgctctccaactggcaactgaacactgttttattcttccagatccaccaagtgacctcaaagatccggcttccactttcaggcggtgagagccaagaaggtgctgatactactcaaaatgtgaatgataccgataaaaacaacagcgaaagggaagatagtgatttagctctggagaaggagagtgctacattcacctcacagaagcagcacctggaagaattatctgacgcaaaggaaacatttattggaggtcctgaggcagaggccaaatccaacagcacaaaggattctgacaatccaattgctaaggtggggagcagtgtagcatctgacaagatgagagatgggtgcaatgctaatgccattccgtgtcctgctacttcaaatcatacaactgaacccagctccgtagcttcccaggaagccagtccagcaagtacaaaagacacagctatccctgaacaagttgaaagaccaagttctgaggaattactagctgatgtttcacttccacaagggaaggtagagccgaagaagactgaacctgcacctgctgcctcgtctagtatccaacagcatgggtgcaaacaagctggaaatggcaacactgaacctaaaagcaaggaaaacgctgcggccgatgatgaccccataacaaggctacagcgagcggccggtactgccatttcggcagctgcagtgaaggccaagttccttgtggagcaggaggagggttacattcggcagctagctgcacttgtgatcgaaaagcagtttcagaagatggaaacaaaaatgtcgtttctcaccgaagttggaaacctggtgttacgatcgagagatttgacagagaggatgcggaagaagcttttgttggagcggagcatgataatcgcttctcgaatgggtgcagcagcggcttccagaacaatccagcacggggctccggtgaccaccagactcccagtagggcatgtgcatgccttgaatccgcagctgaggcgcccttgaagctttttatagtatgtatatgatcagtaagactggcctatgtaggaggtgtgctaatccgcctctgtataaaatgcagtgtactgtagacgcgtctagggttctggagtcagtaggctttgatgctcaccacaccacacgacttggcttttcttttccttttcgtttaaccaagagttttcttctttgatgtcttacctcgccaccgccatacaatgacatgtgtttgaactcgttaactcgtggtcagtcaagctcaaacaatggataggaggtcagttaagcttaaacaatggacatacataaaaaggtttgatgctaagttacacaaaatattagggtaacattgtttttttcgtctcctgcaatggtgttgtacggtggtatttatagctaaccgagggttagccctgtcctgtcaaagataattataccctcggttacctacg

SEQ ID NO: 20995 - DNA, 3137 bp, Zea Mays
ctcaaacatcactccagtacactccacagtagcgcacgcgcattccacactccagtgcttcggttcagcatggagcctaaaccctcgccgccgccggccgccccttcgcgccgccgcggcgcagcgaccaagcgcaaggagaaggccgcatctgcggtgccctccgggtccccgtcgccgaaacgccaggcccgggagcgcgggcccgtctaccagccgtcccttccgccgcctcaaccgcgcagccgccaacccgcacgcaagccgcagcgcaagcccgcacgcaataaatcgccgcggcgctccgtggagccgccgcgcgcgcaggaggaggaggagggcccgccgccactgccgccaccacggccgtcgctggagaaggagatcgaggccgttctgtcccgcggcgctggcgtccacgttgtacccaccttcgccggatggttttcatggaaggaaattcaccccatcgagaagcaaatgttggctacattttttgatgggaaatcagagagacggacacccgagatatatttgggaatcagaaatttaatcatgaacaagtttcactgtaatcccgaagtgcatctggagtccaaagatttgtgtgagttgtcagttggggagatggatgctcgtctagtaatcttggagttcttggcctactggggtttagttaatttccaccctttcccatcagttgtacaggaacacaagctggttgagagtaaaagtagtgctgagacagcagaaggaatttctcaggctgagaagttatttcagtttgaaacagttcattcttacttggtacctgtttcaaaggaagctgaagcaatatctccagttcagttcactagcttgctccctgagcctaccctagctgaagatgcaataggtgcagctgagtcttctgttgagtaccattgcaattcctgctcagttgattgttcaagaaagcgttatcattgtaggactcaggtagactttgatttttgttcagattgctacaacgaagaaaaatttgatgaaggcatgtcaaaatctgatttcatccttatggaatctgcagatgttccagggtctggtggttctaactggactgaccatgagacattgcttcttttggaagcgttagaaattttcaaaggaaaagaatggcatgagattgctgagcatgttgctacaaaaacaaaagaacagtgcatgttacacttccttcaaatgccaatttctgaaccgtttcttgatggcgatgatttcaatgaaacaccccagaagatcacaaaacaggattcagcagaaactggtccttctgatgtacctgacaagatggatgtagatggtaatgcggaaggaaaagagagcactgatgaaaaagcttacaagaaagcagattccagttccgcagaaacaagaacaaaattagctgaccaaaatatttctgctaaagaggatactatgaaattaggtgatgatgacctagttgcttccattgttgatgaaccaaataaatcttcattggtggatcctgcacataagaagaattctgctaatgctgatgtctctggggaacacccatccaactttattactaatatcctgagatccacttttgaagcagttgaccactttctgggtaaagaagacatgggttcgtttgctgaagcaggaaatcctgtgatggcactggctgcgtttcttgcttctcttgtggaacgtgatgatgctgtttcttcatgttgtagttcgttgagagctatatcagagatgtctcctgctctccaactggcaactgaacactgttttattcttccagatccaccaagtgacctcaaagatccggcttccactttcagcccttgcgcaggcggtgagagccaagaaggtgctgatactactcaaaatgtgaatgataccgataaaaacaacagcgaaagggaagatagtgatttagctctggagaaggagagtgctacattcacctcacagaagcagcacctggaagaattatctgacgcaaaggaaacatttattggaggtcctgaggcagaggccaaatccaacagcacaaaggattctgacaatccaattgctaaggaagccagtccagcaagtacaaaagacacagctatccctgaacaagttgaaagaccaagttctgaggaattactagctgatgtttcacttccacaagggaaggtagagccgaagaagactgaacctgcacctgctgcctcgtctagtatccaacagcatgggtgcaaacaagctggaaatggcaacactgaacctaaaagcaaggaaaacgctgcggccgatgatgaccccataacaaggctacagcgagcggccggtactgccatttcggcagctgcagtgaaggccaagttccttgtggagcaggaggagggttacattcggcagctagctgcacttgtgatcgaaaagcagtttcagaagatggaaacaaaaatgtcgtttctcaccgaagttggaaacctggtgttacgatcgagagatttgacagagaggatgcggaagaagcttttgttggagcggagcatgataatcgcttctcgaatgggtgcagcagcggcttccagaacaatccagcacggggctccggtgaccaccagactcccagtagggcatgtgcatgccttgaatccgcagctgaggcgcccttgaagctttttatagtatgtatatgatcagtaagactggcctatgtaggaggtgtgctaatccgcctctgtataaaatgcagtgtactgtagacgcgtctagggttctggagtcagtaggctttgatgctcaccacaccacacgacttggcttttcttttccttttcgtttaaccaagagttttcttctttgatgtcttacctcgccaccgccatacaatgacatgtgtttgaactcgttaactcgtggtcagtcaagctcaaacaatggataggaggtcagttaagcttaaacaatggacatacataaaaaggtttgatgctaagttacacaaaatattagggtaacattgtttttttcgtctcctgcaatggtgttgtacggtggtatttatagctaaccgagggttagccctgtcctgtcaaagataattataccctcggttacctacg

SEQ ID NO: 20996 - DNA, 3121 bp, Zea Mays
ctcaaacatcactccagtacactccacagtagcgcacgcgcattccacactccagtgcttcggttcagcatggagcctaaaccctcgccgccgccggccgccccttcgcgccgccgcggcgcagcgaccaagcgcaaggagaaggccgcatctgcggtgccctccgggtccccgtcgccgaaacgccaggcccgggagcgcgggcccgtctaccagccgtcccttccgccgcctcaaccgcgcagccgccaacccgcacgcaagccgcagcgcaagcccgcacgcaataaatcgccgcggcgctccgtggagccgccgcgcgcgcaggaggaggaggagggcccgccgccactgccgccaccacggccgtcgctggagaaggagatcgaggccgttctgtcccgcggcgctggcgtccacgttgtacccaccttcgccggatggttttcatggaaggaaattcaccccatcgagaagcaaatgttggctacattttttgatgggaaatcagagagacggacacccgagatatatttgggaatcagaaatttaatcatgaacaagtttcactgtaatcccgaagtgcatctggagtccaaagatttgtgtgagttgtcagttggggagatggatgctcgtctagtaatcttggagttcttggcctactggggtttagttaatttccaccctttcccatcagttgtacaggaacacaagctggttgagagtaaaagtagtgctgagacagcagaaggaatttctcaggctgagaagttatttcagtttgaaacagttcattcttacttggtacctgtttcaaaggaagctgaagcaatatctccagttcagttcactagcttgctccctgagcctaccctagctgaagatgcaataggtgcagctgagtcttctgttgagtaccattgcaattcctgctcagttgattgttcaagaaagcgttatcattgtaggactcaggtagactttgatttttgttcagattgctacaacgaagaaaaatttgatgaaggcatgtcaaaatctgatttcatccttatggaatctgcagatgttccagggtctggtggttctaactggactgaccatgagacattgcttcttttggaagcgttagaaattttcaaaggaaaagaatggcatgagattgctgagcatgttgctacaaaaacaaaagaacagtgcatgttacacttccttcaaatgccaatttctgaaccgtttcttgatggcgatgatttcaatgaaacaccccagaagatcacaaaacaggattcagcagaaactggtccttctgatgtacctgacaagatggatgtagatggtaatgcggaaggaaaagagagcactgatgaaaaagcttacaagaaagcagattccagttccgcagaaacaagaacaaaattagctgaccaaaatatttctgctaaagaggatactatgaaattaggtgatgatgacctagttgcttccattgttgatgaaccaaataaatcttcattggtggatcctgcacataagaagaattctgctaatgctgatgtctctggggaacacccatccaactttattactaatatcctgagatccacttttgaagcagttgaccactttctgggtaaagaagacatgggttcgtttgctgaagcaggaaatcctgtgatggcactgatccaccaagtgacctcaaagatccggcttccactttcagcccttgcgcaggcggtgagagccaagaaggtgctgatactactcaaaatgtgaatgataccgataaaaacaacagcgaaagggaagatagtgatttagctctggagaaggagagtgctacattcacctcacagaagcagcacctggaagaattatctgacgcaaaggaaacatttattggaggtcctgaggcagaggccaaatccaacagcacaaaggattctgacaatccaattgctaaggtggggagcagtgtagcatctgacaagatgagagatgggtgcaatgctaatgccattccgtgtcctgctacttcaaatcatacaactgaacccagctccgtagcttcccaggaagccagtccagcaagtacaaaagacacagctatccctgaacaagttgaaagaccaagttctgaggaattactagctgatgtttcacttccacaagggaaggtagagccgaagaagactgaacctgcacctgctgcctcgtctagtatccaacagcatgggtgcaaacaagctggaaatggcaacactgaacctaaaagcaaggaaaacgctgcggccgatgatgaccccataacaaggctacagcgagcggccggtactgccatttcggcagctgcagtgaaggccaagttccttgtggagcaggaggagggttacattcggcagctagctgcacttgtgatcgaaaagcagtttcagaagatggaaacaaaaatgtcgtttctcaccgaagttggaaacctggtgttacgatcgagagatttgacagagaggatgcggaagaagcttttgttggagcggagcatgataatcgcttctcgaatgggtgcagcagcggcttccagaacaatccagcacggggctccggtgaccaccagactcccagtagggcatgtgcatgccttgaatccgcagctgaggcgcccttgaagctttttatagtatgtatatgatcagtaagactggcctatgtaggaggtgtgctaatccgcctctgtataaaatgcagtgtactgtagacgcgtctagggttctggagtcagtaggctttgatgctcaccacaccacacgacttggcttttcttttccttttcgtttaaccaagagttttcttctttgatgtcttacctcgccaccgccatacaatgacatgtgtttgaactcgttaactcgtggtcagtcaagctcaaacaatggataggaggtcagttaagcttaaacaatggacatacataaaaaggtttgatgctaagttacacaaaatattagggtaacattgtttttttcgtctcctgcaatggtgttgtacggtggtatttatagctaaccgagggttagccctgtcctgtcaaagataattataccctcggttacctacg

SEQ ID NO: 20997 - DNA, 3041 bp, Zea Mays
cggttcagcatggagcctaaaccctcgccgccgccggccgccccttcgcgccgccgcggcgcagcgaccaagcgcaaggagaaggccgcatctgcggtgccctccgggtccccgtcgccgaaacgccaggcccgggagcgcgggcccgtctaccagccgtcccttccgccgcctcaaccgcgcagccgccaacccgcacgcaagccgcagcgcaagcccgcacgcaataaatcgccgcggcgctccgtggagccgccgcgcgcgcaggaggaggaggagggcccgccgccactgccgccaccacggccgtcgctggagaaggagatcgaggccgttctgtcccgcggcgctggcgtccacgttgtacccaccttcgccggatggttttcatggaaggaaattcaccccatcgagaagcaaatgttggctacattttttgatgggaaatcagagagacggacacccgagatatatttgggaatcagaaatttaatcatgaacaagtttcactgtaatcccgaagtgcatctggagtccaaagatttgtgtgagttgtcagttggggagatggatgctcgtctagtaatcttggagttcttggcctactggggtttagttaatttccaccctttcccatcagttgtacaggaacacaagctggttgagagtaaaagtagtgctgagacagcagaaggaatttctcaggctgagaagttatttcagtttgaaacagttcattcttacttggtacctgtttcaaaggaagctgaagcaatatctccagttcagttcactagcttgctccctgagcctaccctagctgaagatgcaataggtgcagctgagtcttctgttgagtaccattgcaattcctgctcagttgattgttcaagaaagcgttatcattgtaggactcagatgttccagggtctggtggttctaactggactgaccatgagacattgcttcttttggaagcgttagaaattttcaaaggaaaagaatggcatgagattgctgagcatgttgctacaaaaacaaaagaacagtgcatgttacacttccttcaaatgccaatttctgaaccgtttcttgatggcgatgatttcaatgaaacaccccagaagatcacaaaacaggattcagcagaaactggtccttctgatgtacctgacaagatggatgtagatggtaatgcggaaggaaaagagagcactgatgaaaaagcttacaagaaagcagattccagttccgcagaaacaagaacaaaattagctgaccaaaatatttctgctaaagaggatactatgaaattaggtgatgatgacctagttgcttccattgttgatgaaccaaataaatcttcattggtggatcctgcacataagaagaattctgctaatgctgatgtctctggggaacacccatccaactttattactaatatcctgagatccacttttgaagcagttgaccactttctgggtaaagaagacatgggttcgtttgctgaagcaggaaatcctgtgatggcactgttcgttgagagctatatcagagatgtctcctgctctccaactggcaactgaacactgttttattcttccagatccaccaagtgacctcaaagatccggcttccactttcagcccttgcgcaggcggtgagagccaagaaggtgctgatactactcaaaatgtgaatgataccgataaaaacaacagcgaaagggaagatagtgatttagctctggagaaggagagtgctacattcacctcacagaagcagcacctggaagaattatctgacgcaaaggaaacatttattggaggtcctgaggcagaggccaaatccaacagcacaaaggattctgacaatccaattgctaaggtggggagcagtgtagcatctgacaagatgagagatgggtgcaatgctaatgccattccgtgtcctgctacttcaaatcatacaactgaacccagctccgtagcttcccaggaagccagtccagcaagtacaaaagacacagctatccctgaacaagttgaaagaccaagttctgaggaattactagctgatgtttcacttccacaagggaaggtagagccgaagaagactgaacctgcacctgctgcctcgtctagtatccaacagcatgggtgcaaacaagctggaaatggcaacactgaacctaaaagcaaggaaaacgctgcggccgatgatgaccccataacaaggctacagcgagcggccggtactgccatttcggcagctgcagtgaaggccaagttccttgtggagcaggaggagggttacattcggcagctagctgcacttgtgatcgaaaagcagtttcagaagatggaaacaaaaatgtcgtttctcaccgaagttggaaacctggtgttacgatcgagagatttgacagagaggatgcggaagaagcttttgttggagcggagcatgataatcgcttctcgaatgggtgcagcagcggcttccagaacaatccagcacggggctccggtgaccaccagactcccagtagggcatgtgcatgccttgaatccgcagctgaggcgcccttgaagctttttatagtatgtatatgatcagtaagactggcctatgtaggaggtgtgctaatccgcctctgtataaaatgcagtgtactgtagacgcgtctagggttctggagtcagtaggctttgatgctcaccacaccacacgacttggcttttcttttccttttcgtttaaccaagagttttcttctttgatgtcttacctcgccaccgccatacaatgacatgtgtttgaactcgttaactcgtggtcagtcaagctcaaacaatggataggaggtcagttaagcttaaacaatggacatacataaaaaggtttgatgctaagttacacaaaatattagggtaacattgtttttttcgtctcctgcaatggtgttgtacggtggtatttatagctaaccgagggttagccctgtcctgtcaaagataattataccctcggttacctacg

SEQ ID NO: 20998 - DNA, 3002 bp, Zea Mays
cagttctgttggtgccatgagaatgagttaatatttgttgtcattgcagtatgtgatccgtaatttaggctttgatattaccatctgtcattcaatgatgtctgaaatgttctatagttacagtgcataaaatgctagcccttttttagcataaaaatgcatctgatgctggagctacataaaattgcacttgcatattgtactgttttattgtttgttttcttcactaatattttttatttcctgaaggatggttttcatggaaggaaattcaccccatcgagaagcaaatgttggctacattttttgatgggaaatcagagagacggacacccgagatatatttgggaatcagaaatttaatcatgaacaagtttcactgtaatcccgaagtgcatctggagtccaaagatttgtgtgagttgtcagttggggagatggatgctcgtctagtaatcttggagttcttggcctactggggtttagttaatttccaccctttcccatcagttgtacaggaacacaagctggttgagagtaaaagtagtgctgagacagcagaaggaatttctcaggctgagaagttatttcagtttgaaacagttcattcttacttggtacctgtttcaaaggaagctgaagcaatatctccagttcagttcactagcttgctccctgagcctaccctagctgaagatgcaataggtgcagctgagtcttctgttgagtaccattgcaattcctgctcagttgattgttcaagaaagcgttatcattgtaggactcaggtagactttgatttttgttcagattgctacaacgaagaaaaatttgatgaaggcatgtcaaaatctgatttcatccttatggaatctgcagatgttccagggtctggtggttctaactggactgaccatgagacattgcttcttttggaagcgttagaaattttcaaaggaaaagaatggcatgagattgctgagcatgttgctacaaaaacaaaagaacagtgcatgttacacttccttcaaatgccaatttctgaaccgtttcttgatggcgatgatttcaatgaaacaccccagaagatcacaaaacaggattcagcagaaactggtccttctgatgtacctgacaagatggatgtagatggtaatgcggaaggaaaagagagcactgatgaaaaagcttacaagaaagcagattccagttccgcagaaacaagaacaaaattagctgaccaaaatatttctgctaaagaggatactatgaaattaggtgatgatgacctagttgcttccattgttgatgaaccaaataaatcttcattggtggatcctgcacataagaagaattctgctaatgctgatgtctctggggaacacccatccaactttattactaatatcctgagatccacttttgaagcagttgaccactttctgggtaaagaagacatgggttcgtttgctgaagcaggaaatcctgtgatggcactgttcgttgagagctatatcagagatgtctcctgctctccaactggcaactgaacactgttttattcttccagatccaccaagtgacctcaaagatccggcttccactttcagcccttgcgcaggcggtgagagccaagaaggtgctgatactactcaaaatgtgaatgataccgataaaaacaacagcgaaagggaagatagtgatttagctctggagaaggagagtgctacattcacctcacagaagcagcacctggaagaattatctgacgcaaaggaaacatttattggaggtcctgaggcagaggccaaatccaacagcacaaaggattctgacaatccaattgctaaggtggggagcagtgtagcatctgacaagatgagagatgggtgcaatgctaatgccattccgtgtcctgctacttcaaatcatacaactgaacccagctccgtagcttcccaggaagccagtccagcaagtacaaaagacacagctatccctgaacaagttgaaagaccaagttctgaggaattactagctgatgtttcacttccacaagggaaggtagagccgaagaagactgaacctgcacctgctgcctcgtctagtatccaacagcatgggtgcaaacaagctggaaatggcaacactgaacctaaaagcaaggaaaacgctgcggccgatgatgaccccataacaaggctacagcgagcggccggtactgccatttcggcagctgcagtgaaggccaagttccttgtggagcaggaggagggttacattcggcagctagctgcacttgtgatcgaaaagcagtttcagaagatggaaacaaaaatgtcgtttctcaccgaagttggaaacctggtgttacgatcgagagatttgacagagaggatgcggaagaagcttttgttggagcggagcatgataatcgcttctcgaatgggtgcagcagcggcttccagaacaatccagcacggggctccggtgaccaccagactcccagtagggcatgtgcatgccttgaatccgcagctgaggcgcccttgaagctttttatagtatgtatatgatcagtaagactggcctatgtaggaggtgtgctaatccgcctctgtataaaatgcagtgtactgtagacgcgtctagggttctggagtcagtaggctttgatgctcaccacaccacacgacttggcttttcttttccttttcgtttaaccaagagttttcttctttgatgtcttacctcgccaccgccatacaatgacatgtgtttgaactcgttaactcgtggtcagtcaagctcaaacaatggataggaggtcagttaagcttaaacaatggacatacataaaaaggtttgatgctaagttacacaaaatattagggtaacattgtttttttcgtctcctgcaatggtgttgtacggtggtatttatagctaaccgagggttagccctgtcctgtcaaagataattataccctcggttacctacg

SEQ ID NO: 20999 - DNA, 3047 bp, Zea Mays
cagttctgttggtgccatgagaatgagttaatatttgttgtcattgcagtatgtgatccgtaatttaggctttgatattaccatctgtcattcaatgatgtctgaaatgttctatagttacagtgcataaaatgctagcccttttttagcataaaaatgcatctgatgctggagctacataaaattgcacttgcatattgtactgttttattgtttgttttcttcactaatattttttatttcctgaaggatggttttcatggaaggaaattcaccccatcgagaagcaaatgttggctacattttttgatgggaaatcagagagacggacacccgagatatatttgggaatcagaaatttaatcatgaacaagtttcactgtaatcccgaagtgcatctggagtccaaagatttgtgtgagttgtcagttggggagatggatgctcgtctagtaatcttggagttcttggcctactggggtttagttaatttccaccctttcccatcagttgtacaggaacacaagctggttgagagtaaaagtagtgctgagacagcagaaggaatttctcaggctgagaagttatttcagtttgaaacagttcattcttacttggtacctgtttcaaaggaagctgaagcaatatctccagttcagttcactagcttgctccctgagcctaccctagctgaagatgcaataggtgcagctgagtcttctgttgagtaccattgcaattcctgctcagttgattgttcaagaaagcgttatcattgtaggactcaggtagactttgatttttgttcagattgctacaacgaagaaaaatttgatgaaggcatgtcaaaatctgatttcatccttatggaatctgcagatgttccagggtctggtggttctaactggactgaccatgagacattgcttcttttggaagcgttagaaattttcaaaggaaaagaatggcatgagattgctgagcatgttgctacaaaaacaaaagaacagtgcatgttacacttccttcaaatgccaatttctgaaccgtttcttgatggcgatgatttcaatgaaacaccccagaagatcacaaaacaggattcagcagaaactggtccttctgatgtacctgacaagatggatgtagatggtaatgcggaaggaaaagagagcactgatgaaaaagcttacaagaaagcagattccagttccgcagaaacaagaacaaaattagctgaccaaaatatttctgctaaagaggatactatgaaattaggtgatgatgacctagttgcttccattgttgatgaaccaaataaatcttcattggtggatcctgcacataagaagaattctgctaatgctgatgtctctggggaacacccatccaactttattactaatatcctgagatccacttttgaagcagttgaccactttctgggtaaagaagacatgggttcgtttgctgaagcaggaaatcctgtgatggcactggctgcgtttcttgcttctcttgtggaacgtgatgatgctgtttcttcatgttgtagttcgttgagagctatatcagagatgtctcctgctctccaactggcaactgaacactgttttattcttccagatccaccaagtgacctcaaagatccggcttccactttcaggcggtgagagccaagaaggtgctgatactactcaaaatgtgaatgataccgataaaaacaacagcgaaagggaagatagtgatttagctctggagaaggagagtgctacattcacctcacagaagcagcacctggaagaattatctgacgcaaaggaaacatttattggaggtcctgaggcagaggccaaatccaacagcacaaaggattctgacaatccaattgctaaggtggggagcagtgtagcatctgacaagatgagagatgggtgcaatgctaatgccattccgtgtcctgctacttcaaatcatacaactgaacccagctccgtagcttcccaggaagccagtccagcaagtacaaaagacacagctatccctgaacaagttgaaagaccaagttctgaggaattactagctgatgtttcacttccacaagggaaggtagagccgaagaagactgaacctgcacctgctgcctcgtctagtatccaacagcatgggtgcaaacaagctggaaatggcaacactgaacctaaaagcaaggaaaacgctgcggccgatgatgaccccataacaaggctacagcgagcggccggtactgccatttcggcagctgcagtgaaggccaagttccttgtggagcaggaggagggttacattcggcagctagctgcacttgtgatcgaaaagcagtttcagaagatggaaacaaaaatgtcgtttctcaccgaagttggaaacctggtgttacgatcgagagatttgacagagaggatgcggaagaagcttttgttggagcggagcatgataatcgcttctcgaatgggtgcagcagcggcttccagaacaatccagcacggggctccggtgaccaccagactcccagtagggcatgtgcatgccttgaatccgcagctgaggcgcccttgaagctttttatagtatgtatatgatcagtaagactggcctatgtaggaggtgtgctaatccgcctctgtataaaatgcagtgtactgtagacgcgtctagggttctggagtcagtaggctttgatgctcaccacaccacacgacttggcttttcttttccttttcgtttaaccaagagttttcttctttgatgtcttacctcgccaccgccatacaatgacatgtgtttgaactcgttaactcgtggtcagtcaagctcaaacaatggataggaggtcagttaagcttaaacaatggacatacataaaaaggtttgatgctaagttacacaaaatattagggtaacattgtttttttcgtctcctgcaatggtgttgtacggtggtatttatagctaaccgagggttagccctgtcctgtcaaagataattataccctcggttacctacg

SEQ ID NO: 21000 - DNA, 2121 bp, Zea Mays
cacgaccatctcttcctccttaaccctgtagccgcccaagattcctctgccgaggaggccatggccacgatggaagcagccacggacgcaggggatcccgcaaggctcgaccaccctcgtcgtccccttccctacttgtcgtggggaacttgctgtcgccctccctcgcggtgctgcagctacaagctgtggtggtggacaagcagtaccgcgccgcgatgggtccaccgcctcctcttcccgaagtcgacgagttgtaccgcaacgaggcaagtcctccgcctcccatccacgacgacgctgtgggggtgatgtccttgggctcgagcgtgttcaaggtgctcgatcaaatggccgagagcacgagagccaacggtctggtggtgaacacgttcgaggagatggaaagcgactcgacgacgcttctcgcggaggcgacagacaaaaaggtgatcgccgtcaggtccatctcgctctgccgctcaccaagtctcgaccctcagtccatgtcgtgtgacgcgaggcaatgcatggcatggatggacgccaaggctcctaagtctgtggtgtacgtgagcttcggcagtgctaggcgcatgccacccattcagctcggcatggcgtttgcctcatgccccgcgcttgtgctctggctcatcaaggacgctgactccctgcccgacaacgtcaaggattggctacgcgagaacaccgatgcacacgacatcgcaggaagcaagtgtctggtggtgcgcggttgggcgctagaggtggccatcctggcccatccagtcagtggcagcttcatggcgctctatggatggggctccactctggaggttgttgcagccggtctgcccatggctacctggccctttttcattgagcaatttatcgacgagcagctcatcgtggacgtgcttggtattggattatccgtcggtgtgatgaagccaactgaaaatgttttgactgccagtaacacgggtgttgttgttgtgatgatatatgctcctgctttttggtcctgcctgacaagcttcacacttggaatctatggtctgatagttggggttatatgttggccatttctgatgaaacaagctagtctatcttttgtctcaagacaagatggctggtgattatcctttccttgctgctactccaatgggacaagccaaaccttcggggtctttacaaacccaagtgcattcagtgtggcttctatgctatgtacatgcttgtccaagcaggtggtctgactggctcccgtcggccgagttttgcaacatcttttgcgcgccaagcaatggatgaagtctatggctgataagcaccacactgagtgtcaatttgctgttggagatctgaagatattggagcggcgtctggtattccatggcacacgtgctgtccaacaggagttgatcacatggtcgtcccaaccttgctcgttggcgacatgggaagacttgtaatcactcaagcacacctttccttaggccccagcttgggggcaagctggttctcatggaggggggaatgtcagtatcccttcatcagtcattcactggaggtcaggtagggcacgttcaaggagatgcagcagacaatgaagctacaagactcgcaggccaagcaccagggtttatgggccagaatgggctaaatagttgctaggccggcctgcgtgccgtgagaataatatataagccaaacatgacgtagagaagcggtatgaatgaacaagactcgaatactactatctactatcatctccctattcttcgcctctattcctcttctctgtgttgtctgtctgtatctctccactcctgttgttctactattcctctatttctcttttctctgtgttgtctgtctgtatctctccactcccactattctattagtgatctattaggatcgctaacatgctgtctgtgtggtatagaaatagttagatatatatatatagttgtagcctaagtggagcacataattgtagacaatatccctgaattgatctttgtcaatacgcctttaaaatagaccggaataagtgacatatgtagttattctacatcaagaagccttgtattggtgtaataactaagcaag

SEQ ID NO: 21001 - DNA, 3270 bp, Zea Mays
gcgtgcggttatctcctcctgtcgccgcctccacttccaccatcccaagtgctccctctcccgtccctcagtccgctactccgctgccggtgctgcatcagttaggtcagcggcggcgccgctgatcaggtcaggtggtgcccaggccgttcacggaccgagccctcccgtcctcgtccgacgcgagggcaatcacccacacgggacgccttccgaagcgacacccctcctcctctggccaacgtcccagcaacaacgagaatggtagttaactgtttaaagaggaatgcgctctgcttcgcatctgtgtccatgggcgcaagtataataatgacgccatatcaactgtacagagctggctgatgagatatggatcaactgcttccaagacaagctcgccttcagacatgatgaggagcgaagtaactgaagctgcaaagctactgaacctgtggaatgaatgggggttacagatcctggtccttgtaagcttcgggttacaagtattcctcctcgttttcggaggagtccgccgtcatagcaactccactgcccttgcgttctccctctggtcggcatacgtactggccgattccacagcgacatacaccctgggccacctatctgttgacagtaggtcaaacgagcaccagctggtggtgttctgggcgccgttcccactgctgcacctcggtggcccagacaacatcacagcgtatgcactcgaggacaacgcgctctggctacgccatctgcaaattctcgccgtgcaggtcctaggagctgcttatgtgatatacaagtacatctccagcagcgggaaattgcttttgctggcctccttgtccatgttctttgtcggtattctcaagtatggcgagaggatatgggctctcaagtgtggcaacatcagcagcatccgcagcagcatcagcatccggaaggtcaagactgacccttatcagttattgactttgggtactagcgaagaggatttgctgcttggagcccactcccagttcgatatctgcaaaggtgtcttcgccgatatcataatgctaccgaatcccttagttcgttcacaacctaaaccacgttccgtgatatcttatctgggagaggatctatacaagttggtcgagatggagctgtctctgatgtatgacttcctgtacaccaaggcagcagtgatccacacatcgtatggcttctgcatccatttcatctcgctgtttggcacagccaccacattccttttgtttcagctcagtatcagcagcagtggaaatcggtacagcagagtggatgtggctatcagttatgttttactggtaggggctttggtcctggaaatcatatcagtgtgcagagctgtactatccacctggacatgttctttgttgcaccgcaggggcaggggatgggagtggtgtctccacattatcacttcccttggtcagcgtgtccatccagcaagcaggagactctggtcgggctcccttgggcagtacaacttgttccacttgtgcacccgcaacaccaacgagatagggagcagactagcaatgaaattggggctcgaggactggtggaacatgatgcacttctcaggcactttcccacacactaactcgtctttgtcaatacaagatatcaagaaattggttctgcaagcactgcgaagcaaagagcaagcactgcaacaccaggatactgatttgaactcaagaggcagctttatactgaaacgtatggaggcctacaaggactttgctcgctggagcgtcaacattgacttcgacgagagcatccttgtttggcacattgcaaccgaggtgttcatcaggaaatccaaggccaaacatgcaaaagaactccttgaggctactgaggtactatccaattacttgatgttcttgctggtggtaaaacctaacatgctaccaggcgctgcacggcataacatacatctcacctcctgcgaacaactagaaggacactgccgaacacgatttggtgataaggacagtccattggcgccatcccctgtaagctggaacctgtgctatattattaaggaattgttccaccatgatggccccagttgctccaggatcccacggagggagaagcttgcagaggtggcgtggagtttctcccaatttgcactggtatgggctgcgtgggcctcaagtacattcatttgtttgaaaattctgtttatttttcttggagcaatggcccaaattgtccctcgtttaactgtttgcatctctcaatttgcaggtatagcttccctgaccattcaactgaaaaacatttcgttggtaatttatgtttgaagatatagaacatcttaaacaggtttttgttctaattttactaacagaaccagcacatgcatatattcagagctgcaccaaaaaggcagttccaaactgattttcttcgagtggaatttcattcatagtggaccatctgaattttatttcttgactttgtttttttattttttagatagaccttggtctaacaaagtgcatactaaagttcagggtgcagtagttttatgtaattgtccttatttgtctcagggatcagtaaaggcaccaaatccacacgggaactccatccgtgacagtgctaatatgtatgcaatcttgctcgccaacgagcttatgagcatagagttgcggtggcaagatcagcgtgacactttggaactgatcctgggggtgtgggtggagatgttgttgtatgctgctgaccattgcagccaagagtcccatgccaggcagctcagtaatggctgcgaattcatcaccatcgtgtcgttgctggcacaccacttcaagtactactctggggccttcagggacgccgcaacctaggtgaagataaacccgcaagtgaaaataaccccgttactgtaaataatcccatgagtgaaaattgtgcaaacttggtttagatgagttcgcacaattttcatttgaaatgacctctctgtcagttcaggggaaaaacctgaggattcatgactccaaacaagagtaaatatatttatctgtagatgaacatagtaattaaagtgctaggattcatcaaggttagctttggactctccattcaacagtttgtaaggtgagtctggctggctgtgtgtgggtgtgacattgttagactacccgtctagggtttgtgttattcccttgtaatgaccgttataccccctgtgtaatgggcctggcccagttactcactctatta

SEQ ID NO: 21002 - DNA, 2753 bp, Zea Mays
gcgtgcggttatctcctcctgtcgccgcctccacttccaccatcccaagtgctccctctcccgtccctcagtccgctactccgctgccggtgctgcatcagttaggtcagcggcggcgccgctgatcaggtcaggtggtgcccaggccgttcacggaccgagccctcccgtcctcgtccgacgcgagggcaatcacccacacgggacgccttccgaagcgacacccctcctcctctggccaacgtcccagcaacaacgaagctggctgatgagatatggatcaactgcttccaagacaagctcgccttcagacatgatgaggagcgaagtaactgaagctgcaaagctactgaacctgtggaatgaatgggggttacagatcctggtccttgtaagcttcgggttacaagtattcctcctcgttttcggaggagtccgccgtcatagcaactccactgcccttgcgttctccctctggtcggcatacgtactggccgattccacagcgacatacaccctgggccacctatctgttgacagtaggtcaaacgagcaccagctggtggtgttctgggcgccgttcccactgctgcacctcggtggcccagacaacatcacagcgtatgcactcgaggacaacgcgctctggctacgccatctgcaaattctcgccgtgcaggtcctaggagctgcttatgtgatatacaagtacatctccagcagcgggaaattgcttttgctggcctccttgtccatgttctttgtcggtattctcaagtatggcgagaggatatgggctctcaagtgtggcaacatcagcagcatccgcagcagcatcagcatccggaaggtcaagactgacccttatcagttattgactttgggtactagcgaagaggatttgctgcttggagcccactcccagttcgatatctgcaaaggtgtcttcgccgatatcataatgctaccgaatcccttagttcgttcacaacctaaaccacgttccgtgatatcttatctgggagaggatctatacaagttggtcgagatggagctgtctctgatgtatgacttcctgtacaccaaggcagcagtgatccacacatcgtatggcttctgcatccatttcatctcgctgtttggcacagccaccacattccttttgtttcagctcagtatcagcagcagtggaaatcggtacagcagagtggatgtggctatcagttatgttttactggtaggggctttggtcctggaaatcatatcagtgtgcagagctgtactatccacctggacatgttctttgttgcaccgcaggggcaggggatgggagtggtgtctccacattatcacttcccttggtcagcgtgtccatccagcaagcaggagactctggtcgggctcccttgggcagtacaacttgttccacttgtgcacccgcaacaccaacgagatagggagcagactagcaatgaaattggggctcgaggactggtggaacatgatgcacttctcaggcactttcccacacactaactcgtctttgtcaatacaagatatcaagaaattggttctgcaagcactgcgaagcaaagagcaagcactgcaacaccaggatactgatttgaactcaagaggcagctttatactgaaacgtatggaggcctacaaggactttgctcgctggagcgtcaacattgacttcgacgagagcatccttgtttggcacattgcaaccgaggtgttcatcaggaaatccaaggccaaacatgcaaaagaactccttgaggctactgaggtactatccaattacttgatgttcttgctggtggtaaaacctaacatgctaccaggcgctgcacggcataacatacatctcacctcctgcgaacaactagaaggacactgccgaacacgatttggtgataaggacagtccattggcgccatcccctgtaagctggaacctgtgctatattattaaggaattgttccaccatgatggccccagttgctccaggatcccacggagggagaagcttgcagaggtggcgtggagtttctcccaatttgcactgggatcagtaaaggcaccaaatccacacgggaactccatccgtgacagtgctaatatgtatgcaatcttgctcgccaacgagcttatgagcatagagttgcggtggcaagatcagcgtgacactttggaactgatcctgggggtgtgggtggagatgttgttgtatgctgctgaccattgcagccaagagtcccatgccaggcagctcagtaatggctgcgaattcatcaccatcgtgtcgttgctggcacaccacttcaagtactactctggggccttcagggacgccgcaacctaggtgaagataaacccgcaagtgaaaataaccccgttactgtaaataatcccatgagtgaaaattgtgcaaacttggtttagatgagttcgcacaattttcatttgaaatgacctctctgtcagttcaggggaaaaacctgaggattcatgactccaaacaagagtaaatatatttatctgtagatgaacatagtaattaaagtgctaggattcatcaaggttagctttggactctccattcaacagtttgtaaggtgagtctggctggctgtgtgtgggtgtgacattgttagactacccgtctagggtttgtgttattcccttgtaatgaccgttataccccctgtgtaatgggcctggcccagttactcactctatta

SEQ ID NO: 21003 - DNA, 2694 bp, Zea Mays
gcgtgcggttatctcctcctgtcgccgcctccacttccaccatcccaagtgctccctctcccgtccctcagtccgctactccgctgccggtgctgcatcagttaggtcagcggcggcgccgctgatcaggtcaggtggtgcccaggccgttcacggaccgagccctcccgtcctcgtccgacgcgagggcaatcacccacacgggacgccttccgaagcgacacccctcctcctctggccaacgtcccagcaacaacgaagctggctgatgagatatggatcaactgcttccaagacaagctcgccttcagacatgatgaggagcgaagtaactgaagctgcaaagctactgaacctgtggaatgaatgggggttacagatcctggtccttgtaagcttcgggttacaagtattcctcctcgttttcggaggagtccgccgtcatagcaactccactgcccttgcgttctccctctggtcggcatacgtactggccgattccacagcgacatacaccctgggccacctatctgttgacagtaggtcaaacgagcaccagctggtggtgttctgggcgccgttcccactgctgcacctcggtggcccagacaacatcacagcgtatgcactcgaggacaacgcgctctggctacgccatctgcaaattctcgccgtgcaggtcctaggagctgcttatgtgatatacaagtacatctccagcagcgggaaattgcttttgctggcctccttgtccatgttctttgtcggtattctcaagtatggcgagaggatatgggctctcaagtgtggcaacatcagcagcatccgcagcagcatcagcatccggaaggtcaagactgacccttatcagttattgactttgggtactagcgaagaggatttgctgcttggagcccactcccagttcgatatctgcaaaggtgtcttcgccgatatcataatgctaccgaatcccttagttcgttcacaacctaaaccacgttccgtgatatcttatctgggagaggatctatacaagttggtcgagatggagctgtctctgatgtatgacttcctgtacaccaaggcagcagtgatccacacatcgtatggcttctgcatccatttcatctcgctgtttggcacagccaccacattccttttgtttcagctcagtatcagcagcagtggaaatcggtacagcagagtggatgtggctatcagttatgttttactggtaggggctttggtcctggaaatcatatcagtgtgcagagctgtactatccacctggacatgttctttgttgcaccgcaggggcaggggatgggagtggtgtctccacattatcacttcccttggtcagcgtgtccatccagcaagcaggagactctggtcgggctcccttgggcagtacaacttgttccacttgtgcacccgcaacaccaacgagatagggagcagactagcaatgaaattggggctcgaggactggtggaacatgatgcacttctcaggcactttcccacacactaactcgtctttgtcaatacaagatatcaagaaattggttctgcaagcactgcgaagcaaagagcaagcactgcaacaccaggatactgatttgaactcaagaggcagctttatactgaaacgtatggaggcctacaaggactttgctcgctggagcgtcaacattgacttcgacgagagcatccttgtttggcacattgcaaccgaggtgttcatcaggaaatccaaggccaaacatgcaaaagaactccttgaggctactgagaaggacactgccgaacacgatttggtgataaggacagtccattggcgccatcccctgtaagctggaacctgtgctatattattaaggaattgttccaccatgatggccccagttgctccaggatcccacggagggagaagcttgcagaggtggcgtggagtttctcccaatttgcactggtatagcttccctgaccattcaactgaaaaacatttcgttgggatcagtaaaggcaccaaatccacacgggaactccatccgtgacagtgctaatatgtatgcaatcttgctcgccaacgagcttatgagcatagagttgcggtggcaagatcagcgtgacactttggaactgatcctgggggtgtgggtggagatgttgttgtatgctgctgaccattgcagccaagagtcccatgccaggcagctcagtaatggctgcgaattcatcaccatcgtgtcgttgctggcacaccacttcaagtactactctggggccttcagggacgccgcaacctaggtgaagataaacccgcaagtgaaaataaccccgttactgtaaataatcccatgagtgaaaattgtgcaaacttggtttagatgagttcgcacaattttcatttgaaatgacctctctgtcagttcaggggaaaaacctgaggattcatgactccaaacaagagtaaatatatttatctgtagatgaacatagtaattaaagtgctaggattcatcaaggttagctttggactctccattcaacagtttgtaaggtgagtctggctggctgtgtgtgggtgtgacattgttagactacccgtctagggtttgtgttattcccttgtaatgaccgttataccccctgtgtaatgggcctggcccagttactcactctatta

SEQ ID NO: 21004 - DNA, 2731 bp, Zea Mays
gcgtgcggttatctcctcctgtcgccgcctccacttccaccatcccaagtgctccctctcccgtccctcagtccgctactccgctgccggtgctgcatcagttaggtcagcggcggcgccgctgatcaggtcaggtggtgcccaggccgttcacggaccgagccctcccgtcctcgtccgacgcgagggcaatcacccacacgggacgccttccgaagcgacacccctcctcctctggccaacgtcccagcaacaacgaagctggctgatgagatatggatcaactgcttccaagacaagctcgccttcagacatgatgaggagcgaagtaactgaagctgcaaagctactgaacctgtggaatgaatgggggttacagatcctggtccttgtaagcttcgggttacaagtattcctcctcgttttcggaggagtccgccgtcatagcaactccactgcccttgcgttctccctctggtcggcatacgtactggccgattccacagcgacatacaccctgggccacctatctgttgacagtaggtcaaacgagcaccagctggtggtgttctgggcgccgttcccactgctgcacctcggtggcccagacaacatcacagcgtatgcactcgaggacaacgcgctctggctacgccatctgcaaattctcgccgtgcaggtcctaggagctgcttatgtgatatacaagtacatctccagcagcgggaaattgcttttgctggcctccttgtccatgttctttgtcggtattctcaagtatggcgagaggatatgggctctcaagtgtggcaacatcagcagcatccgcagcagcatcagcatccggaaggtcaagactgacccttatcagttattgactttgggtactagcgaagaggatttgctgcttggagcccactcccagttcgatatctgcaaaggtgtcttcgccgatatcataatgctaccgaatcccttagttcgttcacaacctaaaccacgttccgtgatatcttatctgggagaggatctatacaagttggtcgagatggagctgtctctgatgtatgacttcctgtacaccaaggcagcagtgatccacacatcgtatggcttctgcatccatttcatctcgctgtttggcacagccaccacattccttttgtttcagctcagtatcagcagcagtggaaatcggtacagcagagtggatgtggctatcagttatgttttactggtaggggctttggtcctggaaatcatatcagtgtgcagagctgtactatccacctggacatgttctttgttgcaccgcaggggcaggggatgggagtggtgtctccacattatcacttcccttggtcagcgtgtccatccagcaagcaggagactctggtcgggctcccttgggcagtacaacttgttccacttgtgcacccgcaacaccaacgagatagggagcagactagcaatgaaattggggctcgaggactggtggaacatgatgcacttctcaggcactttcccacacactaactcgtctttgtcaatacaagatatcaagaaattggttctgcaagcactgcgaagcaaagagcaagcactgcaacaccaggatactgatttgaactcaagaggcagctttatactgaaacgtatggaggcctacaaggactttgctcgctggagcgtcaacattgacttcgacgagagcatccttgtttggcacattgcaaccgaggtgttcatcaggaaatccaaggccaaacatgcaaaagaactccttgaggctactgagaaggacactgccgaacacgatttggtgataaggacagtccattggcgccatcccctgtaagctggaacctgtgctatattattaaggaattgttccaccatgatggccccagttgctccaggatcccacggagggagaagcttgcagaggtggcgtggagtttctcccaatttgcactggtatagcttccctgaccattcaactgaaaaacatttcgttggtaatttatgtttgaagatatagaacatcttaaacagggatcagtaaaggcaccaaatccacacgggaactccatccgtgacagtgctaatatgtatgcaatcttgctcgccaacgagcttatgagcatagagttgcggtggcaagatcagcgtgacactttggaactgatcctgggggtgtgggtggagatgttgttgtatgctgctgaccattgcagccaagagtcccatgccaggcagctcagtaatggctgcgaattcatcaccatcgtgtcgttgctggcacaccacttcaagtactactctggggccttcagggacgccgcaacctaggtgaagataaacccgcaagtgaaaataaccccgttactgtaaataatcccatgagtgaaaattgtgcaaacttggtttagatgagttcgcacaattttcatttgaaatgacctctctgtcagttcaggggaaaaacctgaggattcatgactccaaacaagagtaaatatatttatctgtagatgaacatagtaattaaagtgctaggattcatcaaggttagctttggactctccattcaacagtttgtaaggtgagtctggctggctgtgtgtgggtgtgacattgttagactacccgtctagggtttgtgttattcccttgtaatgaccgttataccccctgtgtaatgggcctggcccagttactcactctatta

SEQ ID NO: 21005 - DNA, 2925 bp, Zea Mays
gcgtgcggttatctcctcctgtcgccgcctccacttccaccatcccaagtgctccctctcccgtccctcagtccgctactccgctgccggtgctgcatcagttaggtcagcggcggcgccgctgatcaggtcaggtggtgcccaggccgttcacggaccgagccctcccgtcctcgtccgacgcgagggcaatcacccacacgggacgccttccgaagcgacacccctcctcctctggccaacgtcccagcaacaacgagaatggtagttaactgtttaaagaggaatgcgctctgcttcgcatctgtgtccatgggcgcaagtataataatgacgccatatcaactgtacagagctggctgatgagatatggatcaactgcttccaagacaagctcgccttcagacatgatgaggagcgaagtaactgaagctgcaaagctactgaacctgtggaatgaatgggggttacagatcctggtccttgtaagcttcgggttacaagtattcctcctcgttttcggaggagtccgccgtcatagcaactccactgcccttgcgttctccctctggtcggcatacgtactggccgattccacagcgacatacaccctgggccacctatctgttgacagtaggtcaaacgagcaccagctggtggtgttctgggcgccgttcccactgctgcacctcggtggcccagacaacatcacagcgtatgcactcgaggacaacgcgctctggctacgccatctgcaaattctcgccgtgcaggtcctaggagctgcttatgtgatatacaagtacatctccagcagcgggaaattgcttttgctggcctccttgtccatgttctttgtcggtattctcaagtatggcgagaggatatgggctctcaagtgtggcaacatcagcagcatccgcagcagcatcagcatccggaaggtcaagactgacccttatcagttattgactttgggtactagcgaagaggatttgctgcttggagcccactcccagttcgatatctgcaaaggtgtcttcgccgatatcataatgctaccgaatcccttagttcgttcacaacctaaaccacgttccgtgatatcttatctgggagaggatctatacaagttggtcgagatggagctgtctctgatgtatgacttcctgtacaccaaggcagcagtgatccacacatcgtatggcttctgcatccatttcatctcgctgtttggcacagccaccacattccttttgtttcagctcagtatcagcagcagtggaaatcggtacagcagagtggatgtggctatcagttatgttttactggtaggggctttggtcctggaaatcatatcagtgtgcagagctgtactatccacctggacatgttctttgttgcaccgcaggggcaggggatgggagtggtgtctccacattatcacttcccttggtcagcgtgtccatccagcaagcaggagactctggtcgggctcccttgggcagtacaacttgttccacttgtgcacccgcaacaccaacgagatagggagcagactagcaatgaaattggggctcgaggactggtggaacatgatgcacttctcaggcactttcccacacactaactcgtctttgtcaatacaagatatcaagaaattggttctgcaagcactgcgaagcaaagagcaagcactgcaacaccaggatactgatttgaactcaagaggcagctttatactgaaacgtatggaggcctacaaggactttgctcgctggagcgtcaacattgacttcgacgagagcatccttgtttggcacattgcaaccgaggtgttcatcaggaaatccaaggccaaacatgcaaaagaactccttgaggctactgaggtactatccaattacttgatgttcttgctggtggtaaaacctaacatgctaccaggcgctgcacggcataacatacatctcacctcctgcgaacaactagaaggacactgccgaacacgatttggtgataaggacagtccattggcgccatcccctgtaagctggaacctgtgctatattattaaggaattgttccaccatgatggccccagttgctccaggatcccacggagggagaagcttgcagaggtggcgtggagtttctcccaatttgcactggtatagcttccctgaccattcaactgaaaaacatttcgttggtaatttatgtttgaagatatagaacatcttaaacagggatcagtaaaggcaccaaatccacacgggaactccatccgtgacagtgctaatatgtatgcaatcttgctcgccaacgagcttatgagcatagagttgcggtggcaagatcagcgtgacactttggaactgatcctgggggtgtgggtggagatgttgttgtatgctgctgaccattgcagccaagagtcccatgccaggcagctcagtaatggctgcgaattcatcaccatcgtgtcgttgctggcacaccacttcaagtactactctggggccttcagggacgccgcaacctaggtgaagataaacccgcaagtgaaaataaccccgttactgtaaataatcccatgagtgaaaattgtgcaaacttggtttagatgagttcgcacaattttcatttgaaatgacctctctgtcagttcaggggaaaaacctgaggattcatgactccaaacaagagtaaatatatttatctgtagatgaacatagtaattaaagtgctaggattcatcaaggttagctttggactctccattcaacagtttgtaaggtgagtctggctggctgtgtgtgggtgtgacattgttagactacccgtctagggtttgtgttattcccttgtaatgaccgttataccccctgtgtaatgggcctggcccagttactcactctatta

SEQ ID NO: 21006 - DNA, 1517 bp, Zea Mays
acggactgtgcctgcggaaaggagtaagggggaaaacatcataggtcctctttgcgcgacggccgccgcctcctctttgtagtttcattccgccgccgccgctccccgctctctcctctgcttgcggactgcgtggagcaccagcggcggccagcgggcaggaggagctccctccccaaacagagaggggtggggtatcagtgcgtgcgctcctggaggagggcgtggaagagcagagcaggcggcaagcaggggtttgggaggatggtttcgctctcgacttggttccgctatgccgcacacaagtttgattactgcatctccctctcgttgaagaaatataatgtgggccagatcagcagcacgcagctaactgatgtgatattcaaaaatttcttccatggcaagctcacctacgtgtgtcagaccaaaggggaagaagccatggctcccatcgtatctccaactggaggagccgtccttgtcagaaagctcgcaaatttgagccccacatccagtatcgctgggcaggtcaacctactcaacgctgtttcctgcagccatggatgccacgtccagcagttcccgtgcatgcgctcaagtgtcgactccgtgccctgcagggaagtgtttgtcggggacgttgtcttgttaaaagacccagagaaatctggcaattttgttattcgacgactggctgccctggaaggctatgagatggtctctaatgatgagaaggatgagccgtttgtgctcgagaaagaccaatgctgggtcctggcagacaacctagtccttaagccaaaggaagctagagatagccgcttgtttggacctgtcccaatgactgacatccttggcagagtgatatactctttaagaaccgctgttgatcacggtctagtcgagaacagcggcatggccacgaaactggatggtccagtactggcagtggagcttgatgtggaagagttggcgaagaacaataaggcgtagacacttgatgttttcgacatgctgcgctataactcaccttaacaatggatgttttttttttgtttatgatctgctgctgcttcaagtagaagtgcattggaatgttttttcacggtttgcctgtggagcagtcaataatggtcttgacagataacccagaggccgctggaccgtgttcactcagaattctcagcaggatacatcgtgtgactgtaatggttgtttttagggtttcttattcatgaagttgccgtgaatcttgtatctgcttgtgttcatggagccacggtccacgggtaagctgctgctgctgcgtcttgtagcagataaaccgtcaagattgtttaggcctgaaagggatcaaaacgttatgctgatatattgatctgaagtggacataggtaaaaaatgtctgcataaattttcgtccaatctgggtactgggagaaaagagcagaaaatatatggttacgggttcttgtctgtacattctaatatattttattacatctctttaaaat

SEQ ID NO: 21007 - DNA, 562 bp, Zea Mays
gcggaaaggagtaagggggaaaacatcataggtcctctttgcgcgacggccgccgcctcctctttgtagtttcattccgccgccgccgctccccgctctctcctctgcttgcggactgcgtggagcaccagcggcggccagcgggcaggaggagctccctccccaaacagagaggggtggggtatcagtgcgtgcgctcctggaggagggcgtggaagagcagagcaggcggcaagcaggggtttgggaggatggtttcgctctcgacttggttccgctatgccgcacacaagtttgattactgcatctccctctcgttgaagaaatataatgtgggccagatcagcagcacgcagctaactgatgtgatattcaaaaatttcttccatggcaagctcacctacgtgtgtcagaccaaaggggaagaagccatggctcccatcgtatctccaactggaggagccgtccttgtcagaaagctcgcaaatttgagccccacgaccgtggatatcattgatccatgtaaactggcgaattgatggctcaaacaggctacatctgt

SEQ ID NO: 21008 - DNA, 538 bp, Zea Mays
gaaaggagtaagggggaaaacatcataggtcctctttgcgcgacggccgccgcctcctctttgtagtttcattccgccgccgccgctccccgctctctcctctgcttgcggactgcgtggagcaccagcggcggccagcgggcaggaggagctccctccccaaacagagaggggtggggtatcagtgcgtgcgctcctggaggagggcgtggaagagcagagcaggcggcaagcaggggtttgggaggatggtttcgctctcgacttggttccgctatgccgcacacaagtttgattactgcatctccctctcgttgaagaaatataatgtgggccagatcagcagcacgcagctaactgatgtgatattcaaaaatttcttccatggcaagctcacctacgtgtgtcagaccaaaggggaagaagccatggctcccatcgtatctccaactggaggagccgtccttgtcagaaagctcgcaaatttgagccccactatcgctgggcaggtcaacctactcaacgctgtttcctgcag

SEQ ID NO: 21009 - DNA, 523 bp, Zea Mays
gaaaggagtaagggggaaaacatcataggtcctctttgcgcgacggccgccgcctcctctttgtagtttcattccgccgccgccgctccccgctctctcctctgcttgcggactgcgtggagcaccagcggcggccagcgggcaggaggagctccctccccaaacagagaggggtggggtatcagtgcgtgcgctcctggaggagggcgtggaagagcagagcaggcggcaagcaggggtttgggaggatggtttcgctctcgacttggttccgctatgccgcacacaagtttgattactgcatctccctctcgttgaagaaatataatgtgggccagatcagcagcacgcagctaactgatgtgatattcaaaaatttcttccatggcaagctcacctacgtgtgtcagaccaaaggggaagaagccatggctcccatcgtatctccaactggaggagccgtccttgtcagaaagctcgcaaatttgagccccacccatggatgccacgtccagcagttccc

SEQ ID NO: 21010 - DNA, 1455 bp, Zea Mays
gaaaggagtaagggggaaaacatcataggtcctctttgcgcgacggccgccgcctcctctttgtagtttcattccgccgccgccgctccccgctctctcctctgcttgcggactgcgtggagcaccagcggcggccagcgggcaggaggagctccctccccaaacagagaggggtggggtatcagtgcgtgcgctcctggaggagggcgtggaagagcagagcaggcggcaagcaggggtttgggaggatggtttcgctctcgacttggttccgctatgccgcacacaagtttgattactgcatctccctctcgttgaagcagcaacaactatggaataatagcacaacgtggactgattttttattgtctgctcaggaatagagaaatataatgtgggccagatcagcagcacgcagctaactgatgtgatattcaaaaatttcttccatggcaagctcacctacgtgtgtcagaccaaaggggaagaagccatggctcccatcgtatctccaactggaggagccgtccttgtcagaaagctcgcaaatttgagccccacggaagtgtttgtcggggacgttgtcttgttaaaagacccagagaaatctggcaattttgttattcgacgactggctgccctggaaggctatgagatggtctctaatgatgagaaggatgagccgtttgtgctcgagaaagaccaatgctgggtcctggcagacaacctagtccttaagccaaaggaagctagagatagccgcttgtttggacctgtcccaatgactgacatccttggcagagtgatatactctttaagaaccgctgttgatcacggtctagtcgagaacagcggcatggccacgaaactggatggtccagtactggcagtggagcttgatgtggaagagttggcgaagaacaataaggcgtagacacttgatgttttcgacatgctgcgctataactcaccttaacaatggatgttttttttttgtttatgatctgctgctgcttcaagtagaagtgcattggaatgttttttcacggtttgcctgtggagcagtcaataatggtcttgacagataacccagaggccgctggaccgtgttcactcagaattctcagcaggatacatcgtgtgactgtaatggttgtttttagggtttcttattcatgaagttgccgtgaatcttgtatctgcttgtgttcatggagccacggtccacgggtaagctgctgctgctgcgtcttgtagcagataaaccgtcaagattgtttaggcctgaaagggatcaaaacgttatgctgatatattgatctgaagtggacataggtaaaaaatgtctgcataaattttcgtccaatctgggtactgggagaaaagagcagaaaatatatggttacgggttcttgtctgtacattctaatatattttattacatctctttaaaat

SEQ ID NO: 21011 - DNA, 1482 bp, Zea Mays
gaaaggagtaagggggaaaacatcataggtcctctttgcgcgacggccgccgcctcctctttgtagtttcattccgccgccgccgctccccgctctctcctctgcttgcggactgcgtggagcaccagcggcggccagcgggcaggaggagctccctccccaaacagagaggggtggggtatcagtgcgtgcgctcctggaggagggcgtggaagagcagagcaggcggcaagcaggggtttgggaggatggtttcgctctcgacttggttccgctatgccgcacacaagtttgattactgcatctccctctcgttgaagaaatataatgtgggccagatcagcagcacgcagctaactgatgtgatattcaaaaatttcttccatggcaagctcacctacgtgtgtcagaccaaaggggaagaagccatggctcccatcgtatctccaactggaggagccgtccttgtcagaaagctcgcaaatttgagccccacgtcaacctactcaacgctgtttcctgcagccatggatgccacgtccagcagttcccgtgcatgcgctcaagtgtcgactccgtgccctgcagggaagtgtttgtcggggacgttgtcttgttaaaagacccagagaaatctggcaattttgttattcgacgactggctgccctggaaggctatgagatggtctctaatgatgagaaggatgagccgtttgtgctcgagaaagaccaatgctgggtcctggcagacaacctagtccttaagccaaaggaagctagagatagccgcttgtttggacctgtcccaatgactgacatccttggcagagtgatatactctttaagaaccgctgttgatcacggtctagtcgagaacagcggcatggccacgaaactggatggtccagtactggcagtggagcttgatgtggaagagttggcgaagaacaataaggcgtagacacttgatgttttcgacatgctgcgctataactcaccttaacaatggatgttttttttttgtttatgatctgctgctgcttcaagtagaagtgcattggaatgttttttcacggtttgcctgtggagcagtcaataatggtcttgacagataacccagaggccgctggaccgtgttcactcagaattctcagcaggatacatcgtgtgactgtaatggttgtttttagggtttcttattcatgaagttgccgtgaatcttgtatctgcttgtgttcatggagccacggtccacgggtaagctgctgctgctgcgtcttgtagcagataaaccgtcaagattgtttaggcctgaaagggatcaaaacgttatgctgatatattgatctgaagtggacataggtaaaaaatgtctgcataaattttcgtccaatctgggtactgggagaaaagagcagaaaatatatggttacgggttcttgtctgtacattctaatatattttattacatctctttaaaat

SEQ ID NO: 21012 - DNA, 1566 bp, Zea Mays
gaaaggagtaagggggaaaacatcataggtcctctttgcgcgacggccgccgcctcctctttgtagtttcattccgccgccgccgctccccgctctctcctctgcttgcggactgcgtggagcaccagcggcggccagcgggcaggaggagctccctccccaaacagagaggggtggggtatcagtgcgtgcgctcctggaggagggcgtggaagagcagagcaggcggcaagcaggggtttgggaggatggtttcgctctcgacttggttccgctatgccgcacacaagtttgattactgcatctccctctcgttgaagcagcaacaactatggaataatagcacaacgtggactgattttttattgtctgctcaggaatagagaaatataatgtgggccagatcagcagcacgcagctaactgatgtgatattcaaaaatttcttccatggcaagctcacctacgtgtgtcagaccaaaggggaagaagccatggctcccatcgtatctccaactggaggagccgtccttgtcagaaagctcgcaaatttgagccccacatccagtatcgctgggcaggtcaacctactcaacgctgtttcctgcagccatggatgccacgtccagcagttcccgtgcatgcgctcaagtgtcgactccgtgccctgcagggaagtgtttgtcggggacgttgtcttgttaaaagacccagagaaatctggcaattttgttattcgacgactggctgccctggaaggctatgagatggtctctaatgatgagaaggatgagccgtttgtgctcgagaaagaccaatgctgggtcctggcagacaacctagtccttaagccaaaggaagctagagatagccgcttgtttggacctgtcccaatgactgacatccttggcagagtgatatactctttaagaaccgctgttgatcacggtctagtcgagaacagcggcatggccacgaaactggatggtccagtactggcagtggagcttgatgtggaagagttggcgaagaacaataaggcgtagacacttgatgttttcgacatgctgcgctataactcaccttaacaatggatgttttttttttgtttatgatctgctgctgcttcaagtagaagtgcattggaatgttttttcacggtttgcctgtggagcagtcaataatggtcttgacagataacccagaggccgctggaccgtgttcactcagaattctcagcaggatacatcgtgtgactgtaatggttgtttttagggtttcttattcatgaagttgccgtgaatcttgtatctgcttgtgttcatggagccacggtccacgggtaagctgctgctgctgcgtcttgtagcagataaaccgtcaagattgtttaggcctgaaagggatcaaaacgttatgctgatatattgatctgaagtggacataggtaaaaaatgtctgcataaattttcgtccaatctgggtactgggagaaaagagcagaaaatatatggttacgggttcttgtctgtacattctaatatattttattacatctctttaaaat

SEQ ID NO: 21013 - DNA, 540 bp, Zea Mays
cccgtccaaggtgctgtccacattttcacgtttctttccttcatcccttttcgcttgatccaagaactgggatggaaaaaaaacggatcgattccttctcatctcctctgatctggttagttgactcttgctgttgttcagcggcgcaagcaaaggcagccgacgagaaagaaaataaaaaaactgaatcgaatgcgctccactccaccatgattctactagcaggagtataacttaatcatcagccacgggcttgtcttttgccctggccgctcgtgattggtgatcccaatctctcttcacttctctctcactctgtctctagaaagaagaagaaaccagccagcaatgattgcgaccactctcccctgttttgtcctaatcctcctttctttctccttgagattcttcctctcggactcgtcatgattgagcaattattattattatatcatcgtcgtcatcctcactcacagcggcagcagcaccaggcaccagcagcctttttccaatcagatcatcccttgatttgcaatgcgg

SEQ ID NO: 21014 - DNA, 447 bp, Zea Mays
cgctggcattactagaaggaactgcagcaacagcagatttcacatcctgagaattagtagaggtcgccggacgtccagcaatggaggaaatttaaattctttacgctggctcgctgatgaactggttgacaatgcccccaacctgttgacatcaattggggtagagcatgatttacgtgaagaacctgttgcattaatgaacaaggcatgaattgacaggtaaataagctgaataagaattcctgtctgtcttttggtgtgtgtgtgcaaaagcattcatgcaagagagaaattgaatgaactggaaaaaaacacaaaaaacagctttgttttcctttgtagcacctgataaatcactcatattcaaactcagcagtggtttgtcatcatatgatgattctgggtcttcgcttccacgacaagcacagcaacacagacatataagag

SEQ ID NO: 21015 - DNA, 3468 bp, Zea Mays
atgaccgtccaagaagcgagagtggagaaaaacaatcttagcatgaccaagaagggtgcacagcgatcggtggatttacccgataaaatctccggcggaggggtgcgcgacgaccggtggagcggtggcggcgaccagcggaggggtggcgtccgaccggcgaccctgatgagacgagggaatggattctgctatcagagggatcctgcaagtgtgaaatctatatattctggacaaatggggcaaaatatgttacagccacaagtgctctgcctgtgctccattatcctcacgttattttttacccttttgcaaccgaccgctgcacagatcactgcaccatgggaagttgatgccctcaaggctattaggggcagcttgatagatccacacggaaatcttagcagctggaaccgaggagatccatgcatgggaaattggtcccatgttatctgttacaatgcaacaggcagtgatggatacttccatgtaaaagaattacagctcctaagtttgaatctatctggaattttggctcctgagcttggtcagctttctcaaatgaaaattatggattttatgtggaattcgattggcgggaccatacctaaggaggtcggaaatatcacttctctggagttaatgctcctgaatggaaaccaattgaatggctctttaccagaggagattggcttccttcctaatctgaatcggattcagattgatcagaaccatatatctggacttatacctaaatcatttgctaacctgaataaaaccaagcactttcacatgaacaacaactcattgagcggtcaaatcccacctgagttatccagattaccttcacttgttcacctgctacattcctccagaactatcaaagttgccaaatgtgctcatcatacaactggacaataataatttctctggaagtacaattccttcatcttatggcaacatctcaacacttctaaaattgagtttaaggaactgcagcttggaaggacctgttcctgatgtcagtgggataccccaacttggctacttggatgttagctggaatcaattgaggggtccaataccatccattcaattttcgagcaacataactacaattgatctttcccacaataatcttaatggttccattccaggaattttctctggccttccttatctccaaagactgtcacttgacgacaacaatttgactggttctgttccatctaatatctggcaagatattgatctaagaggaaataaaagtcttgtactggatttccagaacaatgctctcaacaatctgtcaactcctctttcgccccctcccaatgttaccatcctattacatggaaacccagtatgcattgggcaaaaccaactgaatatttctcagtattgtcagtcaggaacatatgttgcacgtggaggttcagcagataacagtacagtttgtccaccatgctctagcgactttccttttgaaagaataccgatgtcaccaataccatgctcatgtgtcgttccagtttatgtgggttaccggcttaagagtcctgggttctcaaatttcattccatacgaatcccagttccagcagtacttaacatctgggctttcactgtcatcgtaccaattagaagtttctacttttatgtgggaagaaggcccaaggctgaagatggacctgaaaatatttccaaataacactccctttttcactgtaagtgaggtgttcaggcttaatggtatgttcacagcttggcagattgcagactctgatatatttggcccatatgaacttatcagcttcaaccaagggtggtacaacacaataataccacagggtacaaagtctggtctgagtacaggtgccattgttggggtggtcatggcggcatttgttgcagctgccattctttcatccctcgttactatcatcatattgcggagacgctcaagacagtcttcttcaaataaacgcaccgcgaaaagaatttcaatgaaaattgctggtgtaaaagacttcacttttgatgaattgtcacattgtacacatgactttaatgattcaacactaattggccaaggagggtatggcaaggtatacagaggtgtgttggctgatggaatagtagtagcaataaagcgagcacagcaagggtctcttcaaggttctaaggaattcttcacagagatagagttgctatcgaggctgcatcaccgtaatctagtctctttgctcggttattgtgatgaagatgatgaacagatgctggtttacgagtatatgcccaatggaaatctgcgtgatcatctttcagctagagctaaggtgcctctagatttccccatgaggctacggatcgcgctgggatcgtcacgtggtatcctgtatttgcacacggaagcagatcctccaatataccatcgtgacatcaaagccagcaatattctactggactcgaagtttgtcgcaaaggttgctgatttcggtctctcacgccttgctccgctgccagaaacagaggggagtgcccctggtcatgtctccacagtcgtaaaaggcaccccgggttatcttgacccagagtattttctcacccataagctcacggacaagagcgacgtgtacagcctgggcgttgtgttcttggagctgctgactgggatgcagccaatctctcatggaaggaatattgtcagagaggttttggcagccaatcagtcagggatgatattctcggtggtggataaccggatgggctcgtaccctgctgagtgcgtggagaagtttgctgcgctggcgctgcggtgttgccaggacgagacggactcgaggccatccatggtggaggtggttcgggagctggacatgatatggcgcatgacgccggggacggagaacattgcatcgtcagagtctggcgtcatggggatgggctccaacagcaccagcacacccacagcatcggggtctcggatggatgatcactacatttcgtccatggaggtctccggtagcaacctgctcagtggcgttatgcccagcatcaatccgcgctgacctgctagtatatgttgctgttctagcggtgtgtattatagtttggactcaccacgacgaggatgtaggctacttgtgagcaaccaaacatgtattcattctcttatcgggttcaattttattgttgtcacacttagactgtgaaagtttcattccttagacggtctctagcaacgttctctaaatttcatccattaaaaaatatatataattgcactctaaaagattacgtcatttatatcttcatcatccccggtagtctcttttaaatttcatcatctatatcctatcttccatattatcacaaatcctgttattagaaattttggaacccctattgttttaatagaattttaactgatctacaaattgtaaattaatgtttattcacattattt

SEQ ID NO: 21016 - DNA, 3408 bp, Zea Mays
atgaccgtccaagaagcgagagtggagaaaaacaatcttagcatgaccaagaagggtgcacagcgatcggtggatttacccgataaaatctccggcggaggggtgcgcgacgaccggtggagcggtggcggcgaccagcggaggggtggcgtccgaccggcgaccctgatgagacgagggaatggattctgctatcagagggatcctgcaagtgtgaaatctatatattctggacaaatggggcaaaatatgttacagccacaagtgctctgcctgtgctccattatcctcacgttattttttacccttttgcaaccgaccgctgcacagatcactgcaccatgggaagttgatgccctcaaggctattaggggcagcttgatagatccacacggaaatcttagcagctggaaccgaggagatccatgcatgggaaattggtcccatgttatctgttacaatgcaacaggcagtgatggatacttccatgtaaaagaattacagctcctaagtttgaatctatctggaattttggctcctgagcttggtcagctttctcaaatgaaaattatggattttatgtggaattcgattggcgggaccatacctaaggaggtcggaaatatcacttctctggagttaatgctcctgaatggaaaccaattgaatggctctttaccagaggagattggcttccttcctaatctgaatcggattcagattgatcagaaccatatatctggacttatacctaaatcatttgctaacctgaataaaaccaagcactttcacatgaacaacaactcattgagcggtcaaatcccacctgagttatccagattaccttcacttgttcacctattattggataacaataacttgtcaggctacattcctccagaactatcaaagttgccaaatgtgctcatcatacaactggacaataataatttctctggaagtacaattccttcatcttatggcaacatctcaacacttctaaaattgagtttaaggaactgcagcttggaaggacctgttcctgatgtcagtgggataccccaacttggctacttggatgttagctggaatcaattgaggggtccaataccatccattcaattttcgagcaacataactacaattgatctttcccacaataatcttaatggttccattccaggaattttctctggccttccttatctccaaagactgtcacttgacgacaacaatttgactggttctgttccatctaatatctggcaagatattgatctaagaggaaataaaagtcttgtactggatttccagaacaatgctctcaacaatctgtcaactcctctttcgccccctcccaatgttaccatcctattacatggaaacccagtatgcattgggcaaaaccaactgaatatttctcagtattgtcagtcaggaacatatgttgcacgtggaggttcagcagataacagtacagtttgtccaccatgctctagcgactttccttttgaaagaataccgatgtcaccaataccatgctcatgtgtcgttccagtttatgtgggttaccggcttaagagtcctgggttctcaaatttcattccatacgaatcccagttccagcagtacttaacatctgggctttcactgtcatcgtaccaattagaagtttctacttttatgtgggaagaaggcccaaggctgaagatggacctgaaaatatttccaaataacactccctttttcactcttcaaccaagggtggtacaacacaataataccacagggtacaaagtctggtctgagtacaggtgccattgttggggtggtcatggcggcatttgttgcagctgccattctttcatccctcgttactatcatcatattgcggagacgctcaagacagtcttcttcaaataaacgcaccgcgaaaagaatttcaatgaaaattgctggtgtaaaagacttcacttttgatgaattgtcacattgtacacatgactttaatgattcaacactaattggccaaggagggtatggcaaggtatacagaggtgtgttggctgatggaatagtagtagcaataaagcgagcacagcaagggtctcttcaaggttctaaggaattcttcacagagatagagttgctatcgaggctgcatcaccgtaatctagtctctttgctcggttattgtgatgaagatgatgaacagatgctggtttacgagtatatgcccaatggaaatctgcgtgatcatctttcagctagagctaaggtgcctctagatttccccatgaggctacggatcgcgctgggatcgtcacgtggtatcctgtatttgcacacggaagcagatcctccaatataccatcgtgacatcaaagccagcaatattctactggactcgaagtttgtcgcaaaggttgctgatttcggtctctcacgccttgctccgctgccagaaacagaggggagtgcccctggtcatgtctccacagtcgtaaaaggcaccccgggttatcttgacccagagtattttctcacccataagctcacggacaagagcgacgtgtacagcctgggcgttgtgttcttggagctgctgactgggatgcagccaatctctcatggaaggaatattgtcagagaggttttggcagccaatcagtcagggatgatattctcggtggtggataaccggatgggctcgtaccctgctgagtgcgtggagaagtttgctgcgctggcgctgcggtgttgccaggacgagacggactcgaggccatccatggtggaggtggttcgggagctggacatgatatggcgcatgacgccggggacggagaacattgcatcgtcagagtctggcgtcatggggatgggctccaacagcaccagcacacccacagcatcggggtctcggatggatgatcactacatttcgtccatggaggtctccggtagcaacctgctcagtggcgttatgcccagcatcaatccgcgctgacctgctagtatatgttgctgttctagcggtgtgtattatagtttggactcaccacgacgaggatgtaggctacttgtgagcaaccaaacatgtattcattctcttatcgggttcaattttattgttgtcacacttagactgtgaaagtttcattccttagacggtctctagcaacgttctctaaatttcatccattaaaaaatatatataattgcactctaaaagattacgtcatttatatcttcatcatccccggtagtctcttttaaatttcatcatctatatcctatcttccatattatcacaaatcctgttattagaaattttggaacccctattgttttaatagaattttaactgatctacaaattgtaaattaatgtttattcacattattt

SEQ ID NO: 21017 - DNA, 4068 bp, Zea Mays
atgaccgtccaagaagcgagagtggagaaaaacaatcttagcatgaccaagaagggtgcacagcgatcggtggatttacccgataaaatctccggcggaggggtgcgcgacgaccggtggagcggtggcggcgaccagcggaggggtggcgtccgaccggcgaccctgatgagacgagggaatggattctgctatcagagggatcctgcaagtgtgaaatctatatattctggacaaatggggcaaaatatgttacagccacaagtgctctgcctgtgctccattatcctcacgttattttttacccttttgcaaccgaccgctgcacagatcactgcaccatgggaagttgatgccctcaaggctattaggggcagcttgatagatccacacggaaatcttagcagctggaaccgaggagatccatgcatgggaaattggtcccatgttatctgttacaatgcaacaggcagtgatggatacttccatgtaaaagaattgtatgagcataagcgatctctttgtcaatcaagtgcttgttatattccacactacaccttaacatttggttatgagttacttttggtgatgagtgactaaacctgaacttagttttgttataaatttgtttactgccttagtaggccaaaagtttgcacctggatcttttttccaacatttttgggaagataaaaattgattacctattaactgctatcacacattctctctccaaagcagaaatatgttggagcattcattatactcttcctgatttgcattgttggaaaatagacaatattttgtttggaacataatgtgttaatactattctgttatgactgaagttagctatttttacaatcagatgtaattactgtgattctgtgcacttgtttcacttgaccacatcttccatccaccagtttcctctcaaaagcataggagagcaacatgtcatttcaataaagaagagaataatttacaaccgcaaaaaagcccaccccaccccacccgccagttaattccatagctattaaagcatttacgtgtataacacaaatttgattgcagacagctcctaagtttgaatctatctggaattttggctcctgagcttggtcagctttctcaaatgaaaattatggattttatgtggaattcgattggcgggaccatacctaaggaggtcggaaatatcacttctctggagttaatgctcctgaatggaaaccaattgaatggctctttaccagaggagattggcttccttcctaatctgaatcggattcagattgatcagaaccatatatctggacttatacctaaatcatttgctaacctgaataaaaccaagcactttcacatgaacaacaactcattgagcggtcaaatcccacctgagttatccagattaccttcacttgttcacctattattggataacaataacttgtcaggctacattcctccagaactatcaaagttgccaaatgtgctcatcatacaactggacaataataatttctctggaagtacaattccttcatcttatggcaacatctcaacacttctaaaattgagtttaaggaactgcagcttggaaggacctgttcctgatgtcagtgggataccccaacttggctacttggatgttagctggaatcaattgaggggtccaataccatccattcaattttcgagcaacataactacaattgatctttcccacaataatcttaatggttccattccaggaattttctctggccttccttatctccaaagactgtcacttgacgacaacaatttgactggttctgttccatctaatatctggcaagatattgatctaagaggaaataaaagtcttgtactggatttccagaacaatgctctcaacaatctgtcaactcctctttcgccccctcccaatgttaccatcctattacatggaaacccagtatgcattgggcaaaaccaactgaatatttctcagtattgtcagtcaggaacatatgttgcacgtggaggttcagcagataacagtacagtttgtccaccatgctctagcgactttccttttgaaagaataccgatgtcaccaataccatgctcatgtgtcgttccagtttatgtgggttaccggcttaagagtcctgggttctcaaatttcattccatacgaatcccagttccagcagtacttaacatctgggctttcactgtcatcgtaccaattagaagtttctacttttatgtgggaagaaggcccaaggctgaagatggacctgaaaatatttccaaataacactccctttttcactgtaagtgaggtgttcaggcttaatggtatgttcacagcttggcagattgcagactctgatatatttggcccatatgaacttatcagcttcaaccaagggtggtacaacacaataataccacagggtacaaagtctggtctgagtacaggtgccattgttggggtggtcatggcggcatttgttgcagctgccattctttcatccctcgttactatcatcatattgcggagacgctcaagacagtcttcttcaaataaacgcaccgcgaaaagaatttcaatgaaaattgctggtgtaaaagacttcacttttgatgaattgtcacattgtacacatgactttaatgattcaacactaattggccaaggagggtatggcaaggtatacagaggtgtgttggctgatggaatagtagtagcaataaagcgagcacagcaagggtctcttcaaggttctaaggaattcttcacagagatagagttgctatcgaggctgcatcaccgtaatctagtctctttgctcggttattgtgatgaagatgatgaacagatgctggtttacgagtatatgcccaatggaaatctgcgtgatcatctttcagctagagctaaggtgcctctagatttccccatgaggctacggatcgcgctgggatcgtcacgtggtatcctgtatttgcacacggaagcagatcctccaatataccatcgtgacatcaaagccagcaatattctactggactcgaagtttgtcgcaaaggttgctgatttcggtctctcacgccttgctccgctgccagaaacagaggggagtgcccctggtcatgtctccacagtcgtaaaaggcaccccgggttatcttgacccagagtattttctcacccataagctcacggacaagagcgacgtgtacagcctgggcgttgtgttcttggagctgctgactgggatgcagccaatctctcatggaaggaatattgtcagagaggttttggcagccaatcagtcagggatgatattctcggtggtggataaccggatgggctcgtaccctgctgagtgcgtggagaagtttgctgcgctggcgctgcggtgttgccaggacgagacggactcgaggccatccatggtggaggtggttcgggagctggacatgatatggcgcatgacgccggggacggagaacattgcatcgtcagagtctggcgtcatggggatgggctccaacagcaccagcacacccacagcatcggggtctcggatggatgatcactacatttcgtccatggaggtctccggtagcaacctgctcagtggcgttatgcccagcatcaatccgcgctgacctgctagtatatgttgctgttctagcggtgtgtattatagtttggactcaccacgacgaggatgtaggctacttgtgagcaaccaaacatgtattcattctcttatcgggttcaattttattgttgtcacacttagactgtgaaagtttcattccttagacggtctctagcaacgttctctaaatttcatccattaaaaaatatatataattgcactctaaaagattacgtcatttatatcttcatcatccccggtagtctcttttaaatttcatcatctatatcctatcttccatattatcacaaatcctgttattagaaattttggaacccctattgttttaatagaattttaactgatctacaaattgtaaattaatgtttattcacattattt

SEQ ID NO: 21018 - DNA, 4052 bp, Zea Mays
gaaaagctgccgtatttttttctccctgtgaagggagggaacagcgtcgtcgtgagggagaaaattcgtcgggttgatgtcagaaaaggggaagaggagacagacgacgggtggagagcgagagaagtggggaaggcgagcagagcaacaaatcaagtctgtttcatttcagcaatcagcaccaacccccgtccaatcgctgcggctggatgattgggcagtgtcagcctcgcgttcgttcatttaatgtttctggtagcggtcaatgcgggatggttgggtggcggattggtattttgggactccatgtactacttcctgtcttcctccaccttcccggagaagcagcagaggaagggagggtgaaagaagaaatggtcgcaaagaggtggagggaaggaaagggtcaatgctgctcggtgtccctcaacctcaacacgggcgcccctactttacttgcttgttcccggtgtccctatcactctcagaggtggacgatggatcgtccctttcacatttcacacaccctccgttgccatttcaatattatcctagtcgccagcgtaagctcgccgtagctacctgctctgctactcgaccgctggcactggcgcgtttctttattgcttcgtccccttcatccggcaactccactgtcagcgccctattcggctcaatccatccctctgcttggcgtcctctctgctgcttgatttgctacctgtacctggtgctgggaatggattctgctatcagagggatcctgcaagtgtgaaatctatatattctggacaaatggggcaaaatatgttacagccacaagtgctctgcctgtgctccattatcctcacgttattttttacccttttgcaaccgaccgctgcacagatcactgcaccatgggaagttgatgccctcaaggctattaggggcagcttgatagatccacacggaaatcttagcagctggaaccgaggagatccatgcatgggaaattggtcccatgttatctgttacaatgcaacaggcagtgatggatacttccatgtaaaagaattacagctcctaagtttgaatctatctggaattttggctcctgagcttggtcagctttctcaaatgaaaattatggattttatgtggaattcgattggcgggaccatacctaaggaggtcggaaatatcacttctctggagttaatgctcctgaatggaaaccaattgaatggctctttaccagaggagattggcttccttcctaatctgaatcggattcagattgatcagaaccatatatctggacttatacctaaatcatttgctaacctgaataaaaccaagcactttcacatgaacaacaactcattgagcggtcaaatcccacctgagttatccagattaccttcacttgttcacctattattggataacaataacttgtcaggctacattcctccagaactatcaaagttgccaaatgtgctcatcatacaactggacaataataatttctctggaagtacaattccttcatcttatggcaacatctcaacacttctaaaattgagtttaaggaactgcagcttggaaggacctgttcctgatgtcagtgggataccccaacttggctacttggatgttagctggaatcaattgaggggtccaataccatccattcaattttcgagcaacataactacaattgatctttcccacaataatcttaatggttccattccaggaattttctctggccttccttatctccaaagactgtcacttgacgacaacaatttgactggttctgttccatctaatatctggcaagatattgatctaagaggaaataaaagtcttgtactggatttccagaacaatgctctcaacaatctgtcaactcctctttcgccccctcccaatgttaccatcctattacatggaaacccagtatgcattgggcaaaaccaactgaatatttctcagtattgtcagtcaggaacatatgttgcacgtggaggttcagcagataacagtacagtttgtccaccatgctctagcgactttccttttgaaagaataccgatgtcaccaataccatgctcatgtgtcgttccagtttatgtgggttaccggcttaagagtcctgggttctcaaatttcattccatacgaatcccagttccagcagtacttaacatctgggctttcactgtcatcgtaccaattagaagtttctacttttatgtgggaagaaggcccaaggctgaagatggacctgaaaatatttccaaataacactccctttttcactgtaagtgaggtgttcaggcttaatggtatgttcacagcttggcagattgcagactctgatatatttggcccatatgaacttatcagcttcaaccaagggtggtacaacacaataataccacagggtacaaagtctggtctgagtacaggtgccattgttggggtggtcatggcggcatttgttgcagctgccattctttcatccctcgttactatcatcatattgcggagacgctcaagacagtcttcttcaaataaacgcaccgcgaaaagaatttcaatgaaaattgctggtgtaaaagacttcacttttgatgaattgtcacattgtacacatgactttaatgattcaacactaattggccaaggagggtatggcaaggtatacagaggtgtgttggctgatggaatagtagtagcaataaagcgagcacagcaagggtctcttcaaggttctaaggaattcttcacagagatagagttgctatcgaggctgcatcaccgtaatctagtctctttgctcggttattgtgatgaagatgatgaacagatgctggtttacgagtatatgcccaatggaaatctgcgtgatcatctttcagctagagctaaggtgcctctagatttccccatgaggctacggatcgcgctgggatcgtcacgtggtatcctgtatttgcacacggaagcagatcctccaatataccatcgtgacatcaaagccagcaatattctactggactcgaagtttgtcgcaaaggttgctgatttcggtctctcacgccttgctccgctgccagaaacagaggggagtgcccctggtcatgtctccacagtcgtaaaaggcaccccgggttatcttgacccagagtattttctcacccataagctcacggacaagagcgacgtgtacagcctgggcgttgtgttcttggagctgctgactgggatgcagccaatctctcatggaaggaatattgtcagagaggttttggcagccaatcagtcagggatgatattctcggtggtggataaccggatgggctcgtaccctgctgagtgcgtggagaagtttgctgcgctggcgctgcggtgttgccaggacgagacggactcgaggccatccatggtggaggtggttcgggagctggacatgatatggcgcatgacgccggggacggagaacattgcatcgtcagagtctggcgtcatggggatgggctccaacagcaccagcacacccacagcatcggggtctcggatggatgatcactacatttcgtccatggaggtctccggtagcaacctgctcagtggcgttatgcccagcatcaatccgcgctgacctgctagtatatgttgctgttctagcggtgtgtattatagtttggactcaccacgacgaggatgtaggctacttgtgagcaaccaaacatgtattcattctcttatcgggttcaattttattgttgtcacacttagactgtgaaagtttcattccttagacggtctctagcaacgttctctaaatttcatccattaaaaaatatatataattgcactctaaaagattacgtcatttatatcttcatcatccccggtagtctcttttaaatttcatcatctatatcctatcttccatattatcacaaatcctgttattagaaattttggaacccctattgttttaatagaattttaactgatctacaaattgtaaattaatgtttattcacattattt

SEQ ID NO: 21019 - DNA, 1609 bp, Zea Mays
atttttttctccctgtgaagggagggaacagcgtcgtcgtgaggtaggcggtgacggcgggggtaaaatgactttcgaggggctcttgtccaggattgacatcttcttccttgatttttttcgatatttcctccccgcggattggtctattcaaagggagaaaattcgtcgggttgatgtcagaaaaggggaagaggagacagacgacgggtggagagcgagagaagtggggaaggcgagcagagcaacaaatcaagtctgtttcatttcagcaatcagcaccaacccccgtccaatcgctgcggctggatgattgggcagtgtcagcctcgcgttcgttcatttaatgtttctggtagcggtcaatgcgggatggttgggtggcggattggtattttgggactccatgtactacttcctgtcttcctccaccttcccggagaagcagcagaggaagggagggtgaaagaagaaatggtcgcaaagaggtggagggaaggaaagggtcaatgctgctcggtgtccctcaacctcaacacgggcgcccctactttacttgcttgttcccggtgtccctatcactctcagaggtggacgatggatcgtccctttcacatttcacacaccctccgttgccatttcaatattatcctagtcgccagcgtaagctcgccgtagctacctgctctgctactcgaccgctggcactggcgcgtttctttattgcttcgtccccttcatccggcaactccactgtcagcgccctattcggctcaatccatccctctgcttggcgtcctctctgctgcttgatttgctacctgtacctggtgctgggaatggattctgctatcagagggatcctgcaagtgtgaaatctatatattctggacaaatggggcaaaatatgttacagccacaagtgctctgcctgtgctccattatcctcacgttattttttacccttttgcaaccgaccgctgcacagatcactgcaccatgggaagttgatgccctcaaggctattaggggcagcttgatagatccacacggaaatcttagcagctggaaccgaggagatccatgcatgggaaattggtcccatgttatctgttacaatgcaacaggcagtgatggatacttccatgtaaaagaattacagctcctaagtttgaatctatctggaattttggctcctgagcttggtcagctttctcaaatgaaaattatggattttatgtggaattcgattggcgggaccatacctaaggaggtcggaaatatcacttctctggagttaatgctcctgaatggaaaccaattgaatggctctttaccagaggagattggcttccttcctaatctgaatcggattcagattgatcagaaccatatatctggacttatacctaaatcatttgctaacctgaataaaaccaagcactttcacatgaacaacaactcattgagcggtcaaatcccacctgagttatccagattaccttcacttgttcacctattattggataacaataacttgtcaggctacattcctccagaactatcaaagttgccaaatgtgctcatcatgtatgtagagtttttttaa

SEQ ID NO: 21020 - DNA, 3589 bp, Zea Mays
gagggaaggaaagggtcaatgctgctcggtgtccctcaacctcaacacgggcgcccctactttacttgcttgttcccggtgtccctatcactctcagaggtggacgatggatcgtccctttcacatttcacacaccctccgttgccatttcaatattatcctagtcgccagcgtaagctcgccgtagctacctgctctgctactcgaccgctggcactggcgcgtttctttattgcttcgtccccttcatccggcaactccactgtcagcgccctattcggctcaatccatccctctgcttggcgtcctctctgctgcttgatttgctacctgtacctggtgctgggaatggattctgctatcagagggatcctgcaagtgtgaaatctatatattctggacaaatggggcaaaatatgttacagccacaagtgctctgcctgtgctccattatcctcacgttattttttacccttttgcaaccgaccgctgcacagatcactgcaccatgggaagttgatgccctcaaggctattaggggcagcttgatagatccacacggaaatcttagcagctggaaccgaggagatccatgcatgggaaattggtcccatgttatctgttacaatgcaacaggcagtgatggatacttccatgtaaaagaattggattttatgtggaattcgattggcgggaccatacctaaggaggtcggaaatatcacttctctggagttaatgctcctgaatggaaaccaattgaatggctctttaccagaggagattggcttccttcctaatctgaatcggattcagattgatcagaaccatatatctggacttatacctaaatcatttgctaacctgaataaaaccaagcactttcacatgaacaacaactcattgagcggtcaaatcccacctgagttatccagattaccttcacttgttcacctattattggataacaataacttgtcaggctacattcctccagaactatcaaagttgccaaatgtgctcatcatacaactggacaataataatttctctggaagtacaattccttcatcttatggcaacatctcaacacttctaaaattgagtttaaggaactgcagcttggaaggacctgttcctgatgtcagtgggataccccaacttggctacttggatgttagctggaatcaattgaggggtccaataccatccattcaattttcgagcaacataactacaattgatctttcccacaataatcttaatggttccattccaggaattttctctggccttccttatctccaaagactgtcacttgacgacaacaatttgactggttctgttccatctaatatctggcaagatattgatctaagaggaaataaaagtcttgtactggatttccagaacaatgctctcaacaatctgtcaactcctctttcgccccctcccaatgttaccatcctattacatggaaacccagtatgcattgggcaaaaccaactgaatatttctcagtattgtcagtcaggaacatatgttgcacgtggaggttcagcagataacagtacagtttgtccaccatgctctagcgactttccttttgaaagaataccgatgtcaccaataccatgctcatgtgtcgttccagtttatgtgggttaccggcttaagagtcctgggttctcaaatttcattccatacgaatcccagttccagcagtacttaacatctgggctttcactgtcatcgtaccaattagaagtttctacttttatgtgggaagaaggcccaaggctgaagatggacctgaaaatatttccaaataacactccctttttcactgtaagtgaggtgttcaggcttaatggtatgttcacagcttggcagattgcagactctgatatatttggcccatatgaacttatcagcttcaaccaagggtggtacaacacaataataccacagggtacaaagtctggtctgagtacaggtgccattgttggggtggtcatggcggcatttgttgcagctgccattctttcatccctcgttactatcatcatattgcggagacgctcaagacagtcttcttcaaataaacgcaccgcgaaaagaatttcaatgaaaattgctggtgtaaaagacttcacttttgatgaattgtcacattgtacacatgactttaatgattcaacactaattggccaaggagggtatggcaaggtatacagaggtgtgttggctgatggaatagtagtagcaataaagcgagcacagcaagggtctcttcaaggttctaaggaattcttcacagagatagagttgctatcgaggctgcatcaccgtaatctagtctctttgctcggttattgtgatgaagatgatgaacagatgctggtttacgagtatatgcccaatggaaatctgcgtgatcatctttcagctagagctaaggtgcctctagatttccccatgaggctacggatcgcgctgggatcgtcacgtggtatcctgtatttgcacacggaagcagatcctccaatataccatcgtgacatcaaagccagcaatattctactggactcgaagtttgtcgcaaaggttgctgatttcggtctctcacgccttgctccgctgccagaaacagaggggagtgcccctggtcatgtctccacagtcgtaaaaggcaccccgggttatcttgacccagagtattttctcacccataagctcacggacaagagcgacgtgtacagcctgggcgttgtgttcttggagctgctgactgggatgcagccaatctctcatggaaggaatattgtcagagaggttttggcagccaatcagtcagggatgatattctcggtggtggataaccggatgggctcgtaccctgctgagtgcgtggagaagtttgctgcgctggcgctgcggtgttgccaggacgagacggactcgaggccatccatggtggaggtggttcgggagctggacatgatatggcgcatgacgccggggacggagaacattgcatcgtcagagtctggcgtcatggggatgggctccaacagcaccagcacacccacagcatcggggtctcggatggatgatcactacatttcgtccatggaggtctccggtagcaacctgctcagtggcgttatgcccagcatcaatccgcgctgacctgctagtatatgttgctgttctagcggtgtgtattatagtttggactcaccacgacgaggatgtaggctacttgtgagcaaccaaacatgtattcattctcttatcgggttcaattttattgttgtcacacttagactgtgaaagtttcattccttagacggtctctagcaacgttctctaaatttcatccattaaaaaatatatataattgcactctaaaagattacgtcatttatatcttcatcatccccggtagtctcttttaaatttcatcatctatatcctatcttccatattatcacaaatcctgttattagaaattttggaacccctattgttttaatagaattttaactgatctacaaattgtaaattaatgtttattcacattattt

SEQ ID NO: 21021 - DNA, 2923 bp, Zea Mays
ctgaaaccaatttctcagggaggtattgacaaattggctcctgaatggaaaccaattgaatggctctttaccagaggagattggcttccttcctaatctgaatcggattcagattgatcagaaccatatatctggacttatacctaaatcatttgctaacctgaataaaaccaagcactttcacatgaacaacaactcattgagcggtcaaatcccacctgagttatccagattaccttcacttgttcacctattattggataacaataacttgtcaggctacattcctccagaactatcaaagttgccaaatgtgctcatcatacaactggacaataataatttctctggaagtacaattccttcatcttatggcaacatctcaacacttctaaaattgagtttaaggaactgcagcttggaaggacctgttcctgatgtcagtgggataccccaacttggctacttggatgttagctggaatcaattgaggggtccaataccatccattcaattttcgagcaacataactacaattgatctttcccacaataatcttaatggttccattccaggaattttctctggccttccttatctccaaagactgtcacttgacgacaacaatttgactggttctgttccatctaatatctggcaagatattgatctaagaggaaataaaagtcttgtactggatttccagaacaatgctctcaacaatctgtcaactcctctttcgccccctcccaatgttaccatcctgatctgattttgtttttccttaacttgtcatgtttagattacatggaaacccagtatgcattgggcaaaaccaactgaatatttctcagtattgtcagtcaggaacatatgttgcacgtggaggttcagcagataacagtacagtttgtccaccatgctctagcgactttccttttgaaagaataccgatgtcaccaataccatgctcatgtgtcgttccagtttatgtgggttaccggcttaagagtcctgggttctcaaatttcattccatacgaatcccagttccagcagtacttaacatctgggctttcactgtcatcgtaccaattagaagtttctacttttatgtgggaagaaggcccaaggctgaagatggacctgaaaatatttccaaataacactccctttttcactgtaagtgaggtgttcaggcttaatggtatgttcacagcttggcagattgcagactctgatatatttggcccatatgaacttatcagcttcaaccaagggtggtacaacacaataataccacagggtacaaagtctggtctgagtacaggtgccattgttggggtggtcatggcggcatttgttgcagctgccattctttcatccctcgttactatcatcatattgcggagacgctcaagacagtcttcttcaaataaacgcaccgcgaaaagaatttcaatgaaaattgctggtgtaaaagacttcacttttgatgaattgtcacattgtacacatgactttaatgattcaacactaattggccaaggagggtatggcaaggtatacagaggtgtgttggctgatggaatagtagtagcaataaagcgagcacagcaagggtctcttcaaggttctaaggaattcttcacagagatagagttgctatcgaggctgcatcaccgtaatctagtctctttgctcggttattgtgatgaagatgatgaacagatgctggtttacgagtatatgcccaatggaaatctgcgtgatcatctttcagctagagctaaggtgcctctagatttccccatgaggctacggatcgcgctgggatcgtcacgtggtatcctgtatttgcacacggaagcagatcctccaatataccatcgtgacatcaaagccagcaatattctactggactcgaagtttgtcgcaaaggttgctgatttcggtctctcacgccttgctccgctgccagaaacagaggggagtgcccctggtcatgtctccacagtcgtaaaaggcaccccgggttatcttgacccagagtattttctcacccataagctcacggacaagagcgacgtgtacagcctgggcgttgtgttcttggagctgctgactgggatgcagccaatctctcatggaaggaatattgtcagagaggttttggcagccaatcagtcagggatgatattctcggtggtggataaccggatgggctcgtaccctgctgagtgcgtggagaagtttgctgcgctggcgctgcggtgttgccaggacgagacggactcgaggccatccatggtggaggtggttcgggagctggacatgatatggcgcatgacgccggggacggagaacattgcatcgtcagagtctggcgtcatggggatgggctccaacagcaccagcacacccacagcatcggggtctcggatggatgatcactacatttcgtccatggaggtctccggtagcaacctgctcagtggcgttatgcccagcatcaatccgcgctgacctgctagtatatgttgctgttctagcggtgtgtattatagtttggactcaccacgacgaggatgtaggctacttgtgagcaaccaaacatgtattcattctcttatcgggttcaattttattgttgtcacacttagactgtgaaagtttcattccttagacggtctctagcaacgttctctaaatttcatccattaaaaaatatatataattgcactctaaaagattacgtcatttatatcttcatcatccccggtagtctcttttaaatttcatcatctatatcctatcttccatattatcacaaatcctgttattagaaattttggaacccctattgttttaatagaattttaactgatctacaaattgtaaattaatgtttattcacattattt

SEQ ID NO: 21022 - DNA, 2148 bp, Zea Mays
tcactcatctcacttttctagaacaagattacatggaaacccagtatgcattgggcaaaaccaactgaatatttctcagtattgtcagtcaggaacatatgttgcacgtggaggttcagcagataacagtacagtttgtccaccatgctctagcgactttccttttgaaagaataccgatgtcaccaataccatgctcatgtgtcgttccagtttatgtgggttaccggcttaagagtcctgggttctcaaatttcattccatacgaatcccagttccagcagtacttaacatctgggctttcactgtcatcgtaccaattagaagtttctacttttatgtgggaagaaggcccaaggctgaagatggacctgaaaatatttccaaataacactccctttttcactgtaagtgaggtgttcaggcttaatggtatgttcacagcttggcagattgcagactctgatatatttggcccatatgaacttatcagcttcaaccaagggtggtacaacacaataataccacagggtacaaagtctggtctgagtacaggtgccattgttggggtggtcatggcggcatttgttgcagctgccattctttcatccctcgttactatcatcatattgcggagacgctcaagacagtcttcttcaaataaacgcaccgcgaaaagaatttcaatgaaaattgctggtgtaaaagacttcacttttgatgaattgtcacattgtacacatgactttaatgattcaacactaattggccaaggagggtatggcaaggtatacagaggtgtgttggctgatggaatagtagtagcaataaagcgagcacagcaagggtctcttcaaggttctaaggaattcttcacagagatagagttgctatcgaggctgcatcaccgtaatctagtctctttgctcggttattgtgatgaagatgatgaacagatgctggtttacgagtatatgcccaatggaaatctgcgtgatcatctttcagctagagctaaggtgcctctagatttccccatgaggctacggatcgcgctgggatcgtcacgtggtatcctgtatttgcacacggaagcagatcctccaatataccatcgtgacatcaaagccagcaatattctactggactcgaagtttgtcgcaaaggttgctgatttcggtctctcacgccttgctccgctgccagaaacagaggggagtgcccctggtcatgtctccacagtcgtaaaaggcaccccgggttatcttgacccagagtattttctcacccataagctcacggacaagagcgacgtgtacagcctgggcgttgtgttcttggagctgctgactgggatgcagccaatctctcatggaaggaatattgtcagagaggttttggcagccaatcagtcagggatgatattctcggtggtggataaccggatgggctcgtaccctgctgagtgcgtggagaagtttgctgcgctggcgctgcggtgttgccaggacgagacggactcgaggccatccatggtggaggtggttcgggagctggacatgatatggcgcatgacgccggggacggagaacattgcatcgtcagagtctggcgtcatggggatgggctccaacagcaccagcacacccacagcatcggggtctcggatggatgatcactacatttcgtccatggaggtctccggtagcaacctgctcagtggcgttatgcccagcatcaatccgcgctgacctgctagtatatgttgctgttctagcggtgtgtattatagtttggactcaccacgacgaggatgtaggctacttgtgagcaaccaaacatgtattcattctcttatcgggttcaattttattgttgtcacacttagactgtgaaagtttcattccttagacggtctctagcaacgttctctaaatttcatccattaaaaaatatatataattgcactctaaaagattacgtcatttatatcttcatcatccccggtagtctcttttaaatttcatcatctatatcctatcttccatattatcacaaatcctgttattagaaattttggaacccctattgttttaatagaattttaactgatctacaaattgtaaattaatgtttattcacattattt

SEQ ID NO: 21023 - DNA, 2110 bp, Zea Mays
aacctacgaccttgtgactcggtgaaacaactctcaccatgtattgtcagtcaggaacatatgttgcacgtggaggttcagcagataacagtacagtttgtccaccatgctctagcgactttccttttgaaagaataccgatgtcaccaataccatgctcatgtgtcgttccagtttatgtgggttaccggcttaagagtcctgggttctcaaatttcattccatacgaatcccagttccagcagtacttaacatctgggctttcactgtcatcgtaccaattagaagtttctacttttatgtgggaagaaggcccaaggctgaagatggacctgaaaatatttccaaataacactccctttttcactgtaagtgaggtgttcaggcttaatggtatgttcacagcttggcagattgcagactctgatatatttggcccatatgaacttatcagcttcaaccaagggtggtacaacacaataataccacagggtacaaagtctggtctgagtacaggtgccattgttggggtggtcatggcggcatttgttgcagctgccattctttcatccctcgttactatcatcatattgcggagacgctcaagacagtcttcttcaaataaacgcaccgcgaaaagaatttcaatgaaaattgctggtgtaaaagacttcacttttgatgaattgtcacattgtacacatgactttaatgattcaacactaattggccaaggagggtatggcaaggtatacagaggtgtgttggctgatggaatagtagtagcaataaagcgagcacagcaagggtctcttcaaggttctaaggaattcttcacagagatagagttgctatcgaggctgcatcaccgtaatctagtctctttgctcggttattgtgatgaagatgatgaacagatgctggtttacgagtatatgcccaatggaaatctgcgtgatcatctttcagctagagctaaggtgcctctagatttccccatgaggctacggatcgcgctgggatcgtcacgtggtatcctgtatttgcacacggaagcagatcctccaatataccatcgtgacatcaaagccagcaatattctactggactcgaagtttgtcgcaaaggttgctgatttcggtctctcacgccttgctccgctgccagaaacagaggggagtgcccctggtcatgtctccacagtcgtaaaaggcaccccgggttatcttgacccagagtattttctcacccataagctcacggacaagagcgacgtgtacagcctgggcgttgtgttcttggagctgctgactgggatgcagccaatctctcatggaaggaatattgtcagagaggttttggcagccaatcagtcagggatgatattctcggtggtggataaccggatgggctcgtaccctgctgagtgcgtggagaagtttgctgcgctggcgctgcggtgttgccaggacgagacggactcgaggccatccatggtggaggtggttcgggagctggacatgatatggcgcatgacgccggggacggagaacattgcatcgtcagagtctggcgtcatggggatgggctccaacagcaccagcacacccacagcatcggggtctcggatggatgatcactacatttcgtccatggaggtctccggtagcaacctgctcagtggcgttatgcccagcatcaatccgcgctgacctgctagtatatgttgctgttctagcggtgtgtattatagtttggactcaccacgacgaggatgtaggctacttgtgagcaaccaaacatgtattcattctcttatcgggttcaattttattgttgtcacacttagactgtgaaagtttcattccttagacggtctctagcaacgttctctaaatttcatccattaaaaaatatatataattgcactctaaaagattacgtcatttatatcttcatcatccccggtagtctcttttaaatttcatcatctatatcctatcttccatattatcacaaatcctgttattagaaattttggaacccctattgttttaatagaattttaactgatctacaaattgtaaattaatgtttattcacattattt

SEQ ID NO: 21024 - DNA, 1663 bp, Zea Mays
ctctccctctacagccgttccttgggagttccctcaccggcgcctcatcctctctatccctccccacgcagaagtcgtcccctgcccctcccatggagcaccagtcgcctagccgagctctcggcgccggaccccctccccacaccagccatcttccacagccgcccccagccatctccctggtggccaacctcaccactctcgccctggctgcactcgtcggcgtcacttgccacggcaccctccatggccgagctcctcccctatggctcgtcttccccacgacgccctccctccattccttttcctccatggccgacacccccatctccactagccagcgccccctccctcatcctcttcctcaagctgagctcgccctagctccaacttcaaccatggacgacgacctccccttcctgctgcacgccggcatcctccccatgccagctgcacgcgcgccgtgaccactcctctccctacagtgccgctcgccctggctctaacctctcccatggacgccacaacccatactcccaaggacatggagcaacaataaccaagaaaccccttcgtgtcgcgcccacgacgtgttcgacggaatatcgcagcggactacacccgatctgtgcagccctgtcgcgaccttgtcgaatcctgttgaggacccgattctccttgtgttcattcctcgccagtattaatacccaaaatcaagttattagatgctaatgttatctatatatgtgtgcataatgtgcgagatgtgaggaattccatatttgtgtggcgaggcaagccgtacgacaagtgccagatgtttgatgaaatgattgaatcggagagtgtcaccgtttgtgtggattatcaagtcaggcaaataacggtcacttggtcgtggaagggcttcttattgcagtcatagtgttccagctctccaggaagagctacaaaccaccaaagaagccactcactgaaaagtgccgctggaccacttacgattgttgatggtaaagaagttgtgaactttgcatcaacaaactacctcggtttaattggcaacgaaaagattattttcattggagaaatatggtgttggttcttgtggtccacgtggtttttatggaacaattgatgtccatcttgactatgagtcaaagatagctaaatttttggggactccagactccattctttattcatatgggatttctacaatattcagtgtgatacctgccttctgtaagaaaggagatatcatagtcgctgatgagggtgttcactgggcagtgcaaaatggtctccatctatcaagaagcactgtggtgtacttcaagcacaatgatatggcttcacttgcaagcactttggaaaaacttactcgtggaaataaacgtgctgaaaagattagatgctacattgttgtagaatccatttactagaattttggccaaattgcccccttggatgagattgtcaggttgaaggagaaatatcgattccgtgttattctggaggagtcattcttttggggtgcttggcaagtctgggcatggccttgctgaacattatgaagttcctctcccaaacgaggcctaactatttggtgaaatgcttgggacgaagtggctagcaagaatggagtcatggaacatcggcagga

SEQ ID NO: 21025 - DNA, 1688 bp, Zea Mays
ataactgataacttcgacttcactaatcactatttgatgctttattgcttgtcgtagtagctgagtcgagatctggatctggctgccctgcccttgtacatcgatggagtacccgcattggcatagaagacgggtgagagtcccgggctcctgtgtcttgtccagttcagggttccggcaggcagagtagccccacccccacgagcggccgccgccggcgagacaggggagcatggcgacttcctcctccttcaccgccgtcttcttcagcagcgccttcgccgcctgcttcgcagaggtgtgcaccattcctttggacacagccaaagtgcggctccagctgcaaaggaaggcgccactaccgctgccaccggcggctgcagcagccacagctgctgctgctggaggcacgctagccacaatcatgtgcatcgccagggaggaaggggttgccgcgctctggaagggcgtcatccccggcctccaccgtcagttcctctatggcggcctccgcatcagcttgtgaaggctttcttcgtcggaggtgctgttgtgggtgatgtcagtttactaagcaagattcttgctgcgcttaccacaggtgtgatagcaattgttgtggcaaatccaactgatcttgttaaagttaggttgcaagctgatggaaaggctaacactgtcaagaggagttattctggagcccttaatgcatatgctacaataatcagacaggaaggtattggagctttgtggactggccttggtccaaatgtcgcacgcaatgccataattaacgctgccgagttggccagctatgatcagttcaaacagatgtttctaaaacttcctgggtttactgataacgtttttacccatcttttagctggacttggtgctgggttttttgctgtttgcattggctctccggtggatgtggtgaaatcaagaatgatgggtgattcaatgtacaaaagtactcttgattgttttgccaagacactaaagaatgatggaccttgtgctttctacaagggattcattgcaaacttttgtcggattgggtcatggaatgtgataatgtttttaactctggagcaggttagaagattctttctatgaagagatgcctgcactgcaagtagggattgtgtgggacaagggttctcatggcgtcaaccaacagaaagcagccatactgccacgatgttgtaatcttgtatcgcagattgatcatacagaccgctgtgttggtatattatagagagctggattggaggagattgagagagattaggagagattttgactgatttaaacccactcaattccttccaatccatttggattgagattaaaaaaagaaacccttatgaagtttacacattcagatgcatatatgcttacaaactgaagaatgatgcacccatcctgccatccatatgctgatgaaatttgagtacgtacattcagaggagcaagttagcaaaatatagtattatgtaataggagtattctagatcagaaaatctgaatctggggaatgatatccgagcttttttacgtcacaataattgaaaagatgtgtaatagttcatttatctcaattcccgaccaaataataactcgttgaataccttaggtatttttgccagctgtgggccatacgtcagtgactgagtcagtaagag

SEQ ID NO: 21026 - DNA, 1634 bp, Zea Mays
gtcgagatctggatctggctgccctgcccttgtacatcgatggagtacccgcattggcatagaagacgggtgagagtcccgggctcctgtgtcttgtccagttcagggttccggcaggcagagtagccccacccccacgagcggccgccgccggcgagacaggggagcatggcgacttcctcctccttcaccgccgtcttcttcagcagcgccttcgccgcctgcttcgcagaggtgtgcaccattcctttggacacagccaaagtgcggctccagctgcaaaggaaggcgccactaccgctgccaccggcggctgcagcagccacagctgctgctgctggaggcacgctagccacaatcatgtgcatcgccagggaggaaggggttgccgcgctctggaagggcgtcatccccggcctccaccgtcagttcctctatggcggcctccgcatcagcttgtatgagcctgtgaaggctttcttcgtcggaggtgctgttgtgggtgatgtcagtttactaagcaagattcttgctgcgcttaccacaggtgtgatagcaattgttgtggcaaatccaactgatcttgttaaagttaggttgcaagctgatggaaaggctaacactgtcaagaggagttattctggagcccttaatgcatatgctacaataatcagacaggaaggtattggagctttgtggactggccttggtccaaatgtcgcacgcaatgccataattaacgctgccgagttggccagctatgatcagttcaaacagatgtttctaaaacttcctgggtttactgataacgtttttacccatcttttagctggacttggtgctgggttttttgctgtttgcattggctctccggtggatgtggtgaaatcaagaatgatgggtgattcaatgtacaaaagtactcttgattgttttgccaagacactaaagaatgatggaccttgtgctttctacaagggattcattgcaaacttttgtcggattgggtcatggaatgtgataatgtttttaactctggagcaggttagaagattctttctatgaagagatgcctgcactgcaagtagggattgtgtgggacaagggttctcatggcgtcaaccaacagaaagcagccatactgccacgatgttgtaatcttgtatcgcagattgatcatacagaccgctgtgttggtatattatagagagctggattggaggagattgagagagattaggagagattttgactgatttaaacccactcaattccttccaatccatttggattgagattaaaaaaagaaacccttatgaagtttacacattcagatgcatatatgcttacaaactgaagaatgatgcacccatcctgccatccatatgctgatgaaatttgagtacgtacattcagaggagcaagttagcaaaatatagtattatgtaataggagtattctagatcagaaaatctgaatctggggaatgatatccgagcttttttacgtcacaataattgaaaagatgtgtaatagttcatttatctcaattcccgaccaaataataactcgttgaataccttaggtatttttgccagctgtgggccatacgtcagtgactgagtcagtaagag

SEQ ID NO: 21027 - DNA, 1575 bp, Zea Mays
catcgatggagtacccgcattggcatagaagacgggtgagagtcccgggctcctgtgtcttgtccagttcagggttccggcaggcagagtagccccacccccacgagcggccgccgccggcgagacaggggagcatggcgacttcctcctccttcaccgccgtcttcttcagcagcgccttcgccgcctgcttcgcagagccaaagtgcggctccagctgcaaaggaaggcgccactaccgctgccaccggcggctgcagcagccacagctgctgctgctggaggcacgctagccacaatcatgtgcatcgccagggaggaaggggttgccgcgctctggaagggcgtcatccccggcctccaccgtcagttcctctatggcggcctccgcatcagcttgtatgagcctgtgaaggctttcttcgtcggaggtgctgttgtgggtgatgtcagtttactaagcaagattcttgctgcgcttaccacaggtgtgatagcaattgttgtggcaaatccaactgatcttgttaaagttaggttgcaagctgatggaaaggctaacactgtcaagaggagttattctggagcccttaatgcatatgctacaataatcagacaggaaggtattggagctttgtggactggccttggtccaaatgtcgcacgcaatgccataattaacgctgccgagttggccagctatgatcagttcaaacagatgtttctaaaacttcctgggtttactgataacgtttttacccatcttttagctggacttggtgctgggttttttgctgtttgcattggctctccggtggatgtggtgaaatcaagaatgatgggtgattcaatgtacaaaagtactcttgattgttttgccaagacactaaagaatgatggaccttgtgctttctacaagggattcattgcaaacttttgtcggattgggtcatggaatgtgataatgtttttaactctggagcaggttagaagattctttctatgaagagatgcctgcactgcaagtagggattgtgtgggacaagggttctcatggcgtcaaccaacagaaagcagccatactgccacgatgttgtaatcttgtatcgcagattgatcatacagaccgctgtgttggtatattatagagagctggattggaggagattgagagagattaggagagattttgactgatttaaacccactcaattccttccaatccatttggattgagattaaaaaaagaaacccttatgaagtttacacattcagatgcatatatgcttacaaactgaagaatgatgcacccatcctgccatccatatgctgatgaaatttgagtacgtacattcagaggagcaagttagcaaaatatagtattatgtaataggagtattctagatcagaaaatctgaatctggggaatgatatccgagcttttttacgtcacaataattgaaaagatgtgtaatagttcatttatctcaattcccgaccaaataataactcgttgaataccttaggtatttttgccagctgtgggccatacgtcagtgactgagtcagtaagag

SEQ ID NO: 21028 - DNA, 1654 bp, Zea Mays
atcgatggagtacccgcattggcatagaagacgggtgagagtcccgggctcctgtgtcttgtccagttcagggttccggcaggcagagtagccccacccccacgagcggccgccgccggcgagacaggggagcatggcgacttcctcctccttcaccgccgtcttcttcagcagcgccttcgccgcctgcttcgcagaggtgtgcaccattcctttggacacagccaaagtgcggctccagctgcaaaggaaggcgccactaccgctgccaccggcggctgcagcagccacagctgctgctgctggaggcacgctagccacaatcatgtgcatcgccagggaggaaggggttgccgcgctctggaagggcgtcatccccggcctccaccgtcagttcctctatggcggcctccgcatcagcttgtatgagcctgtgaaggctttcttcgtcggaggtgctgttgtgggtgatgtcagtttactaagcaagattcttgctgcgcttaccacaggtgtgatagcaattgttgtggcaaatccaactgatcttgttaaagttaggttgcaagctgatggaaaggctaacactgtcaagaggagttattctggagcccttaatgcatatgctacaataatcagacaggaaggtattggagctttgtggactggccttggtccaaatgtcgcacgcaatgccataattaacgctgccgagttggccagctatgatcagttcaaacagatgtttctaaaacttcctgggtttactgataacgtttttacccatcttttagctggacttggtgctgggttttttgctgtttgcattggctctccggtggatgtggtgaaatcaagaatgatgggtgattcaatgtacaaaagtactcttgattgttttgccaagacactaaagaatgatgtcagaaaaatgtgcattcagttgggtcataatctacaacaaggaatattatcatggaccttgtgctttctacaagggattcattgcaaacttttgtcggattgggtcatggaatgtgataatgtttttaactctggagcaggttagaagattctttctatgaagagatgcctgcactgcaagtagggattgtgtgggacaagggttctcatggcgtcaaccaacagaaagcagccatactgccacgatgttgtaatcttgtatcgcagattgatcatacagaccgctgtgttggtatattatagagagctggattggaggagattgagagagattaggagagattttgactgatttaaacccactcaattccttccaatccatttggattgagattaaaaaaagaaacccttatgaagtttacacattcagatgcatatatgcttacaaactgaagaatgatgcacccatcctgccatccatatgctgatgaaatttgagtacgtacattcagaggagcaagttagcaaaatatagtattatgtaataggagtattctagatcagaaaatctgaatctggggaatgatatccgagcttttttacgtcacaataattgaaaagatgtgtaatagttcatttatctcaattcccgaccaaataataactcgttgaataccttaggtatttttgccagctgtgggccatacgtcagtgactgagtcagtaagag

SEQ ID NO: 21029 - DNA, 1588 bp, Zea Mays
ccgctctctctcggttggaattttgcagccgccgctctactccctggatttttctgcgctcagcgtcttcctctgccgcacgtcggcaatagttctcctccctccagctcgccggcgttatcctctgcgccgctttggcttacaaaaatcctggctgccggtgtttatctcctcacggcgccgccctgggactcttcaaataccctgccgtgctctctctcttcaatgttcctctcgttccctgacgagctgccatggcgtccacgtctgtcgcggtatcctggctcctcgcccaggacggcactcggccctgcccctaccccaacttcctgcacgccatggagatttcttcaagctcgctccaacgccgctccttttccccaaccgcgccaggcggtctgtctccctgtgcgctcgatttagttcggtttcttccctggacgcgcgctctgcagcttgccggagcaccctgcgtcgcgcccgggtgctttgcttcttgctcgccgagccctccccagctcgtggatctccctcgccggcgtcctctgctcctcctggttgctgaggcctctcctatggccgcgcgccgtgttggtctccggctcgcccctgctcatcttcccttggccgcgggcccttgccatgctcgccgagctccctctgctcttctctgctcgccgagattctccctggtgtcgtgctcctccccctcaccctgctcgctcgtagccgtggcagctgagcggttcttcccccagcacatcctctaccctggtcggcgttcctctctctcctcatctccatggccggagctcccatgtgccgtgcgccctggttcttgcccccacgcgcgcctgcttccctgctcggattcagtcctgcgcgcagccgcttttcatctccctgctcagctcgctgcgccaaactgcccagcgccgcgcgcctggctcggccgtctctagctcgccttgctccctgctgctcgcccggtcgagctccctgatcgccgcgccgtgaattttcctgcgcgcgcgtgtctccttgcgcacgcccagcaccctggatttccggatctcgcgcgcccctggctcctctgttggtcgcgcggttgtttcttgcttcctgcgcgcgcgagctcgccatccattttgctcgcctctgcttccacccagaattcccatggccagagctttcccctagcccggatctcacccagtcgcccagctcggctctgtccatactccagctcgccccctctgtttgttctcgctactgggtcgggtctgctcggccgctgagtgtccgacccgctcttctgcacgcagttcgccccaactcctgtctgtagtggtcgccagtcgtcgaccctgctcggattccatctcgccagctcgctccagactcgatctcgtcgtcgttccgcgcgtcatcaagaatcccatgaatcgggtgaagacaaagctagcagcgcgatattccccaagcgctcgacaattgcctggatcgaaaaatcactaccgatctcgtggattcgagtcagctattgaaacggtacgttatataatcgcgtgatgcagaagacaagcca

SEQ ID NO: 21030 - DNA, 8032 bp, Zea Mays
tcttaaagaagttgtaagtatgattaatggaacccaagattgaagctaggaaaaaaaacaaggaactagagtacaaagaatgatttattagagacaaaaatctaaatttcttctaatatttatactatattaaagcaccagtttcaacggtcgtcccgcgtcaatatttttcaaaaaaatccctatatttatttagaatcaacccgcactcctataatctcttctctactactataataaaagagtttatgtaaaaaaaagttgaaattatgtataagtgagtgtttgaaccttggttgttgtctccacatttacaccaacctaatcaatagaaaacatatattttgtgctttattaaaacaaaatttattctatgtcatacatatatataaaccgtagcaatgcacggacatacgactatcatgatgtaatctctattactcaccatttgtcacggtttcacaattgtctcttttgcaaaaaaagtttctatacttctttctgtacccgtagtccaattacaactatttttgttctctatctctactactgtaatggaagagttttgtgtgtcgtataatttttgtgcatccttagccaacaccgcctccctcccccggcctgtcccgcacggtgccgttatcccctgcccgcgatcgtcgcccctccacccgcccgccctctccgcacggtgtcattatccccgcctcgctcgcgtatatacccataaccatgcttcattgtatctgtgcgtattgcgacggaggcggatgagcaggcggagcaacggaggcctctattccccgattggatctgtgtgcctccgacctgttgttgctctcacggcgagacgcagatccaaatgcaggtccgtcccatcgaatcggtcatcttccttcctttgttccccaattggatccacagggggtagaggaaccccgccggtgtagtggcccgagctgctacaagccggctatgcaccagacatcccgccgcggctcttggtgctggcggcttcacctgcgctcatggtcgacgcgccgtccccgcccccgccatggtgcccgagctccaggccgaggcgcccgtgccgaccactaaccccttgtctagctccctcctcacgaccccaaagtcgtccaagtccgccttcgacatccccgagggcgtgcagtggcgcaacaacgagttcctatccgcataaagcgtggaaaggtcgagcacatgcacttcttcaaggacggcagcctgctccagctcatggtcgtcaacggtcgtcgcgcggaaaggtgttttgtgaaatattttttctcgaatgactataaaatattacgagacactgtttatggtgtattcaagttttgtttttcttgtattctgcttgagatgatgaatacataaattgtccctgttactcttaagaatgaacatctaactgtcccaaatcccaatgccaaaaaaccataaattatcctaacaggataatgttcaggtagtcgatggcttggcatattaagttttatgatctgaaggatgtcttcatctgaagggccttgcctagaatgcctgtctagtgatcaatcagacactgtttatggtgtattcaagttttgtttttcttgtattctgcttgagatgatgaatacataagttgtccatggtactcttaagaatgaacatctaactgtcccaacgccaaaaaccataaattatcccgatgggataatttgcaggtagtcaatggcttggtatattaagttttaagatctgaaggatgtcttcgtctgaagggccttgcctagaatgcatgtctggtgatcaatcagagtgtcaggttgtctaagactgggaatttagagaagtaaagtagtgcttattctgaaagaaaggtttcatgactcggaatcatcttcaagaaaaatctcttatttacatggtgttatctacttgcacaagccatgttgttgggtcaaattactactttatgaataattcctcttattctatgaggatataattcctagaagggccatcatcatctctgtcatagataatcctgtgaagggagcatctggtcaggctttgcaaaatcttaatctaatgatgggactgcatgaaaatattgggctgcaataccagcccacgttcccctaatcttttgtgtcattatctatgattacaattaatttaggagtatggaaaccaatttcttgttactgtcaacagacggcaataagcccctcattagaattcaatcaaatcaaagttgacagttagtatagcttggtatgtattgttttggctttattaaaatattaagagaataatgataatgacaatttagcagtacaatggtagtattatgtgggtagcttggttccactaaaatcataagcctatacacatcttgttcctgcaatgttgtttgctattttaatcacgaaatcaatattgagtttgaatgcagttctgaagcagctatccttggcatcactggatataggtatggtgccttttttattgtgttcaagtcaaagtttagcccattacagttgtactttgagaggattggaatgtctcttagtataattctcaagtctcttagtatgattctcaagttttatcttatagctgcatggatccatagcattgctataaaaagttaattctctgatagttgttgttaaaccaaactatattgggtttgttgggtgttttgacagtctatatatgcttcgtgtcctccaatcgctggacctttgtctcactatattgtcttaataggtcgcacaaacagaagcaagtactcatatgctcctaaatctggtgtgaggtacgacgggttttacagaattaagaagtgttggaggcagtttggtgttcaggtaacttagctctcctcctgtatacagattgcagatgtagctatactttcatattatgcagctacttgtcacctacaaatgaagctaagtgtaagagggaagagcggaacaaacaacaacataaaaggtgaactaagatgaccaatcatttagttgaaaagctggttgttagttatttgtttgttggacgtgaataaccattcttgtgttgctactgcttactttgataatatattttttttgttttttttctatgcttccaactcatactatctctccttgtttatcctatccaggtaaaggctgatgtttttaagaaagttgctttaaactctatattgaatctgaaggtagcgttagatctgcccttacttttctttgctgtggtgtttagcaaccagtacttggaaacataaggagggtgaacattttcttgctgtcttgaggaggcttgtgagatttcttgatggttggattgaaacagaaaacgttgagaatgaaatgccaatttcctttgttgtctcaatccattcctaggctgggatcgaccaaaaaatggtgaggttttgttatgaccggccacactacctaatgatgacattagagataactgatatagatgagttcatgcacatatagaccatatgtgactttcacactgtaagacccaaatctggtagaaagaaaaatgataataataataaaataaataaacaaatatagttaatatagtactttgggaattagggaatgagaaaagaaatttgtaataaagtcaattattgttagagtcaaatatgagaaggagaataaaatagtaatacttaaaataatatggtgtatattcacatttagatttcaattgagacatttggaaaatctgaaatttaaaacaggagtataaatttgagtttgaataattgaatttggaattaggaatagaaaatgggaaagaaaatttcaattaagccatttattcctctcataaataaataacaagaaaaataataaataataatattgaaaatagtagaggtgatattcaccttagttttaatcctgacacttggaaaatttgaagttcaaaacatgagtttggtttgaaaattgaaataggaaaagtaaaatcagaaaaaaggaaaagactaaagccatcatgggccgactaccctcgctcgcggcccaattctatctgatcactcatgcatggcccgcctggctctcccgtgttgcgtgcgctttgagtcaccggccgagtgggcccgcgtcgccagcctccatgttcgcgcgcttgctccgtctcactaatgtgtggggtccggctgtcataaccatccccttgctccgagttcacctcaactgaatccgctgattccgcgtgggcacataacaatcaacgcctggaatccggagccgttgctgcgcccagatctcacctcggggctacttaaggcggtaatccgcagtgccctacccctcccttatccatcctggcggacctccgcgcccagcagagagtgacgaaaggggattgtgggggccgccgcggtagacctgcatactccgatccgctttgcttcaaccgctggcctggacgtgtcgccggagtgcctttgagttgcccgcagctcaatcgggggaaagggagggacctggtggccgggaattgataaacggagcagtagtcgccgccgtggtccacacttcactgtgggcggggcttggtgtgccgcgatccgaggtatgaagccccccatgcttttcgtctttctcctctcaacgtattgcatgcgctagtggtgggtttgaataccggggcactgggttgggagatcgccggcgatgaaagccgtcgtgttctgcttgggccccgccgtggccggtacccaggagagagaaaagtggggtccatcggatagcccatcgatggatgagattaaatgtatgggcgagtagtgcctggccatcggattcagatggacgctcccgattaagtgatgcataccccttcgttcttttgatccgagacgttgatcggcgatccgatgggttagatcggatcggaccttaatgaaatccgggtcgtagggtgtcctgtgggcggctgtgattaaaaggttgttaccctttcagttatgtggattttgggccctcggattgggatcggacggtccatatcgcgtactggttcgtacctatgctgatctaatcagggtcgtctatatttgatttggcggcccaaagacatgagtaccctttcgtccgacagcttttacagaagaacccctgtagattttataaaataacctgttgtcagtgtggtgttggaggaatagggtttcggaccctggaattttgcgcatagcaccctggaagagttcaatatagtatccgaagtccaaatatgatatctggaatcataaaacccattaagaaatggatttttatatagaaagttaatcctaaaacttcacaaattcataacttcttcgtttaaactccgaattgacccattccagtcgcgttagcttcataaaaatattctctatgcagtaacaacattaattataccataacgcatacttttatagttagatatttatttatcctttgtctactagattaactctactaatctaggttaatctctctatatatataatctgggtaaaaggtaatccctaatcaaattataatctagattaaagttggattagttattcagaatatatttcctcatatattgtataataaacaatttataatataatttaatattcaaaccacatagatcttccgtaaatcataactcagtaaccgtaactccgagtttagcgattctcgaacccacgacctcgtagcaacgcgtagattattattatgcaatttgttcttatgtttggtgtgatgttaattttgcctataccatgtttgtttgttttgctacgactagcagtgaggttacgagtcacttgaagagcaagttacctggaatctcaagtgtcaggcaagttgtgcccttgaccacttttattacccaataatgttctttataatcatttattcatgcataggtttaattttgatgggacccaataggtcaccctagtctgattatcttattaccttgtttacccctgaactatttgggtagttttgctattgctctatatggttttgggtttaatattacattatgttcatgttctaattatactgttattttacttattgttcatgacaagatcattattttaattggaacatggagcttaacttgaaaaatacgtgccaccacaagggtggaatgggacgcccttgactcactaactaggaaagctagtggaggactaccttacccgatagaggcaagggcagtaggggagtaggcgtgtagggaggttcccgggttgattttgttgcgatggcggtcagacgagggattcctgcattgctctttctagaaactgtagtgggttttctgaagctagtggaactttgtaaaggcctcgtagtggatccctagccattcacctcggtagtgtctaagggtctagctaaccctggcgacatgggatacacgactagtgggtacagggtacaacctctgcagagtgtaaaactggtatactagtcgtgctcgcggtcatgagcaactcaggactctcgcatgattaaattatggaactaaattcaatttgtcatatgcattaatacacgactagtgggtacagggtacaacctctgcagagtgtaaaactggtatactagtcgtgctcgcggtcatgagcaactcaggactctcgcatgattaaattatggaactaaattcaatttgtcatatgcattgcatgggatttattattaattttgttctattattattatggtttggtatttacttacatttagtaactgctaataaaatttgaccaacttattaaaagcaatgctcagctttaaccccttttattgatcagccttacacatcatatgaactctcacctttggtggagttcatgcacattattccccacaacttgttgagcgatgaacatatgtgagctcacccttgctgtctcacaccccccacagactaagaacaggtaccacaggatgaagcgcatggcggatgctgtgatgtgttcgtgagaggcataggtcgtcatctcccaatcaactttgggttgctggatcgttgtgtctttatgatgtaattatttatttattttgtacagaactcctattatatagtaaaaatgtggcattcgtttctgtaccatgattcatcatatgtgtgagacttggtcccagcacacctggtgattgcgttcgcacccgtgtccctaaaacccgggtgtgacacacacactgattggaacttatacatggggcttttctattataatagagtggtattataagagaatgtcttatattcatgagcctattatttagatacctagactattgtttgtgatcatgatgaaattattaccactcttcttctttactgtgctactaatgaactcgtttgttctccagctttgttgtcatgatgcttcactcgcaataagacctgtttttgatcatttcaaaacttttgtgatcacttctggaactctcaacccaatagatcattaccctcgtctcttgaattttaatcctgtcataagcagaaggttcacaatgtccttaacaagagattgcatttgccccatggtcttgactcgaggaaggtatgagctggtcccacgcgaacttcatatttcaaaatctactgtagctgtcggagtctttaaatgttagcattgtcaacatatccttaggtttggaaatgctaacactatcttgcatatacatgataccttttattcttgagaatcatgacacttatgttaagctcttatgaaagctttagttatttccaacatttcatattactggtagcattgtatgcttgtgtattcatcaactattccatcatttttagtgatcatctacatgtgagtacaaagtttgatatgaatagtgatcctggtgttgtgaggaattatgaccaccttttgctggaaatggcttctgctattcaagatggcatgattttgtcccctctctattcctatatggatgtcattgtggacagc

SEQ ID NO: 21031 - DNA, 6665 bp, Zea Mays
ctccctcctcacgaccccaaagtcgtccaagtccgccttcgacatccccgagggcgtgcagtggcgcaacaacgagttcctatccgcataaagcgtggaaaggtcgagcacatgcacttcttcaaggacggcagcctgctccagctcatggtcgtcaacggtcgtcgcgcggaaaggtgttttgtgaaatattttttctcgaatgactataaaatattacgagacactgtttatggtgtattcaagttttgtttttcttgtattctgcttgagatgatgaatacataaattgtccctgttactcttaagaatgaacatctaactgtcccaaatcccaatgccaaaaaaccataaattatcctaacaggataatgttcaggtagtcgatggcttggcatattaagttttatgatctgaaggatgtcttcatctgaagggccttgcctagaatgcctgtctagtgatcaatcagacactgtttatggtgtattcaagttttgtttttcttgtattctgcttgagatgatgaatacataagttgtccatggtactcttaagaatgaacatctaactgtcccaacgccaaaaaccataaattatcccgatgggataatttgcaggtagtcaatggcttggtatattaagttttaagatctgaaggatgtcttcgtctgaagggccttgcctagaatgcatgtctggtgatcaatcagagtgtcaggttgtctaagactgggaatttagagaagtaaagtagtgcttattctgaaagaaaggtttcatgactcggaatcatcttcaagaaaaatctcttatttacatggtgttatctacttgcacaagccatgttgttgggtcaaattactactttatgaataattcctcttattctatgaggatataattcctagaagggccatcatcatctctgtcatagataatcctgtgaagggagcatctggtcaggctttgcaaaatcttaatctaatgatgggactgcatgaaaatattgggctgcaataccagcccacgttcccctaatcttttgtgtcattatctatgattacaattaatttaggagtatggaaaccaatttcttgttactgtcaacagacggcaataagcccctcattagaattcaatcaaatcaaagttgacagttagtatagcttggtatgtattgttttggctttattaaaatattaagagaataatgataatgacaatttagcagtacaatggtagtattatgtgggtagcttggttccactaaaatcataagcctatacacatcttgttcctgcaatgttgtttgctattttaatcacgaaatcaatattgagtttgaatgcagttctgaagcagctatccttggcatcactggatataggtatggtgccttttttattgtgttcaagtcaaagtttagcccattacagttgtactttgagaggattggaatgtctcttagtataattctcaagtctcttagtatgattctcaagttttatcttatagctgcatggatccatagcattgctataaaaagttaattctctgatagttgttgttaaaccaaactatattgggtttgttgggtgttttgacagtctatatatgcttcgtgtcctccaatcgctggacctttgtctcactatattgtcttaataggtcgcacaaacagaagcaagtactcatatgctcctaaatctggtgtgaggtacgacgggttttacagaattaagaagtgttggaggcagtttggtgttcaggtaacttagctctcctcctgtatacagattgcagatgtagctatactttcatattatgcagctacttgtcacctacaaatgaagctaagtgtaagagggaagagcggaacaaacaacaacataaaaggtgaactaagatgaccaatcatttagttgaaaagctggttgttagttatttgtttgttggacgtgaataaccattcttgtgttgctactgcttactttgataatatattttttttgttttttttctatgcttccaactcatactatctctccttgtttatcctatccaggtaaaggctgatgtttttaagaaagttgctttaaactctatattgaatctgaaggtagcgttagatctgcccttacttttctttgctgtggtgtttagcaaccagtacttggaaacataaggagggtgaacattttcttgctgtcttgaggaggcttgtgagatttcttgatggttggattgaaacagaaaacgttgagaatgaaatgccaatttcctttgttgtctcaatccattcctaggctgggatcgaccaaaaaatggtgaggttttgttatgaccggccacactacctaatgatgacattagagataactgatatagatgagttcatgcacatatagaccatatgtgactttcacactgtaagacccaaatctggtagaaagaaaaatgataataataataaaataaataaacaaatatagttaatatagtactttgggaattagggaatgagaaaagaaatttgtaataaagtcaattattgttagagtcaaatatgagaaggagaataaaatagtaatacttaaaataatatggtgtatattcacatttagatttcaattgagacatttggaaaatctgaaatttaaaacaggagtataaatttgagtttgaataattgaatttggaattaggaatagaaaatgggaaagaaaatttcaattaagccatttattcctctcataaataaataacaagaaaaataataaataataatattgaaaatagtagaggtgatattcaccttagttttaatcctgacacttggaaaatttgaagttcaaaacatgagtttggtttgaaaattgaaataggaaaagtaaaatcagaaaaaaggaaaagactaaagccatcatgggccgactaccctcgctcgcggcccaattctatctgatcactcatgcatggcccgcctggctctcccgtgttgcgtgcgctttgagtcaccggccgagtgggcccgcgtcgccagcctccatgttcgcgcgcttgctccgtctcactaatgtgtggggtccggctgtcataaccatccccttgctccgagttcacctcaactgaatccgctgattccgcgtgggcacataacaatcaacgcctggaatccggagccgttgctgcgcccagatctcacctcggggctacttaaggcggtaatccgcagtgccctacccctcccttatccatcctggcggacctccgcgcccagcagagagtgacgaaaggggattgtgggggccgccgcggtagacctgcatactccgatccgctttgcttcaaccgctggcctggacgtgtcgccggagtgcctttgagttgcccgcagctcaatcgggggaaagggagggacctggtggccgggaattgataaacggagcagtagtcgccgccgtggtccacacttcactgtgggcggggcttggtgtgccgcgatccgaggtatgaagccccccatgcttttcgtctttctcctctcaacgtattgcatgcgctagtggtgggtttgaataccggggcactgggttgggagatcgccggcgatgaaagccgtcgtgttctgcttgggccccgccgtggccggtacccaggagagagaaaagtggggtccatcggatagcccatcgatggatgagattaaatgtatgggcgagtagtgcctggccatcggattcagatggacgctcccgattaagtgatgcataccccttcgttcttttgatccgagacgttgatcggcgatccgatgggttagatcggatcggaccttaatgaaatccgggtcgtagggtgtcctgtgggcggctgtgattaaaaggttgttaccctttcagttatgtggattttgggccctcggattgggatcggacggtccatatcgcgtactggttcgtacctatgctgatctaatcagggtcgtctatatttgatttggcggcccaaagacatgagtaccctttcgtccgacagcttttacagaagaacccctgtagattttataaaataacctgttgtcagtgtggtgttggaggaatagggtttcggaccctggaattttgcgcatagcaccctggaagagttcaatatagtatccgaagtccaaatatgatatctggaatcataaaacccattaagaaatggatttttatatagaaagttaatcctaaaacttcacaaattcataacttcttcgtttaaactccgaattgacccattccagtcgcgttagcttcataaaaatattctctatgcagtaacaacattaattataccataacgcatacttttatagttagatatttatttatcctttgtctactagattaactctactaatctaggttaatctctctatatatataatctgggtaaaaggtaatccctaatcaaattataatctagattaaagttggattagttattcagaatatatttcctcatatattgtataataaacaatttataatataatttaatattcaaaccacatagatcttccgtaaatcataactcagtaaccgtaactccgagtttagcgattctcgaacccacgacctcgtagcaacgcgtagattattattatgcaatttgttcttatgtttggtgtgatgttaattttgcctataccatgtttgtttgttttgctacgactagcagtgaggttacgagtcacttgaagagcaagttacctggaatctcaagtgtcaggcaagttgtgcccttgaccacttttattacccaataatgttctttataatcatttattcatgcataggtttaattttgatgggacccaataggtcaccctagtctgattatcttattaccttgtttacccctgaactatttgggtagttttgctattgctctatatggttttgggtttaatattacattatgttcatgttctaattatactgttattttacttattgttcatgacaagatcattattttaattggaacatggagcttaacttgaaaaatacgtgccaccacaagggtggaatgggacgcccttgactcactaactaggaaagctagtggaggactaccttacccgatagaggcaagggcagtaggggagtaggcgtgtagggaggttcccgggttgattttgttgcgatggcggtcagacgagggattcctgcattgctctttctagaaactgtagtgggttttctgaagctagtggaactttgtaaaggcctcgtagtggatccctagccattcacctcggtagtgtctaagggtctagctaaccctggcgacatgggatacacgactagtgggtacagggtacaacctctgcagagtgtaaaactggtatactagtcgtgctcgcggtcatgagcaactcaggactctcgcatgattaaattatggaactaaattcaatttgtcatatgcattaatacacgactagtgggtacagggtacaacctctgcagagtgtaaaactggtatactagtcgtgctcgcggtcatgagcaactcaggactctcgcatgattaaattatggaactaaattcaatttgtcatatgcattgcatgggatttattattaattttgttctattattattatggtttggtatttacttacatttagtaactgctaataaaatttgaccaacttattaaaagcaatgctcagctttaaccccttttattgatcagccttacacatcatatgaactctcacctttggtggagttcatgcacattattccccacaacttgttgagcgatgaacatatgtgagctcacccttgctgtctcacaccccccacagactaagaacaggtaccacaggatgaagcgcatggcggatgctgtgatgtgttcgtgagaggcataggtcgtcatctcccaatcaactttgggttgctggatcgttgtgtctttatgatgtaattatttatttattttgtacagaactcctattatatagtaaaaatgtggcattcgtttctgtaccatgattcatcatatgtgtgagacttggtcccagcacacctggtgattgcgttcgcacccgtgtccctaaaacccgggtgtgacacacacactgattggaacttatacatggggcttttctattataatagagtggtattataagagaatgtcttatattcatgagcctattatttagatacctagactattgtttgtgatcatgatgaaattattaccactcttcttctttactgtgctactaatgaactcgtttgttctccagctttgttgtcatgatgcttcactcgcaataagacctgtttttgatcatttcaaaacttttgtgatcacttctggaactctcaacccaatagatcattaccctcgtctcttgaattttaatcctgtcataagcagaaggttcacaatgtccttaacaagagattgcatttgccccatggtcttgactcgaggaagtgatcatctacatgtgagtacaaagtttgatatgaatagtgatcctggtgttgtgaggaattatgaccaccttttgctggaaatggcttctgctattcaagatggcatgattttgtcccctctctattcctatatggatgtcattgtggacagc

SEQ ID NO: 21032 - DNA, 9967 bp, Zea Mays
cggggccccgcgccagggacccgccccgcctgaccagctgtggccagggccgccaccgcccacctccgtgtcttcgggtgtgcttgctacccgaacaccgctgccactgctcctcacaagctcgcaccccgttccaccctctgtgtgtttctcgggtactccccggaccacaagggctaccgctgccttgacctctcctctcgccgggtcctcatctctcgccatgtggtgtttgatgagtccgcatttccctactccaccaccacaccaccctcctccgaccctgaccttgacctcttcactctctttccgactgacgcggtggtcgagccacctattcttcctccctctacaggtactcgctcaccgcctgtcgattctactcccggcccggtgccttgcccgggtccggtggtgtcgcctccggtggtgtcgcctctctgcggagccccgtctccgatcgcccccgggccgagcaggggtggtgggactgcaccgcctacggggacgtcggtaccaaaccctccggctcgcttcgcgcagccggtgcgggtctaccagcgccgcctgccgccaccggggttcgcccctccaccgtcgccgtcgccaccgtccccaccggtgccttctcctccggtggcaccgccggtggcccagtccccgccagggacacctacacctccgccgcggccacccgcggcacgtgtcgagacgccggtgtaccacccaccgctccttcaccgcgacccgcgtcacgtccacccgatggtgacgcggcacgcggctggtaccctgccgccccgagtcctggcggccacgaccggagactcgcaggtttctccggtaccctcctccgtccgcaccgccctgctggacccccactggcgtcgggcgatggaggaggagtacgaggcgctcgtcgccaaccagacgtgggatctggtgcctcgtccgccctgcaccaacgtcgtcaccggcaagtggatctggacacacaagcggcgggccgatggtaccctggagcggtacaaggctcgctgggtccttcggggcttcactcagcgccccggagtcgactatgatgagaccttcagcccggttgtgaagccggccaccgttcgcacggtgctctcgctggcccttgctcgctcttggccagttcaccagctcgacgtcaagaacgccttcctgcacggcgccctcaccgagaccgtctactgctgtcagccggcggggttcgtggactcctctcgccctgacatggtctgccggctcaacaggtccctctatggcctcaagcaggccccccgggcgtggcactccagactggctacgttcctggtgacactgggcttcgtggaggccagtcagacacgtctctgttcgtccaccaccatggagcagagactgcctacttgctcctctacgtggatgacattgtcctcaccgcctccagtcagtcacttcttcgccgcctcgtcgacgcgctccaacgggagtttccggtcaaggatctgggcgtgcttcaccatttcctgggggtcactgctgagcctcggccctcaggactcctacttcaccagcgccagtacactcttgacattctggagcgggccaagatgattgactgcaagccctgctctaccccagtcgacacgcaggcgaagctctctggggccacaggtgacccagtcgaggaccccaccgggtacaggagccttgccggtgcccttcagtacctcaccttcactaggtcggacatctcctacgccgtgcagcaggtctgtctccatatgcacgaccctcgagagcctcacctcgcggctctcaaacgcctccttcgctacctccggggcaccgtcgactacggctgcttctccaccgatctacctcctccgagctggtcgtctacaccgacgctgactgggtcgggtgcccggacaatcggcgctccacctccagctacgccgtattcttaggcggcaacctggtgtcctggtcgtcgaagcgccagccggtcgtctcccgctcgagtgccgaggcggagtaccgtgttgtggccaacggcgtggcggaggctgcgtggctccggcagctcctcgccgagctccacagtcccctctccaggagcacgttggtctactgcgacaacgtcagcgccgtctacctctccaccaacccggtgcagcaccagcggaccaagcatgtagagatcgatctacacttcgtccacgattatgtcgccgctggtgtcgttcgggtcctccacgtcccgaccacctcccagtttgctgatatcttcaccaagggccttctgtcctcgaccttcgccgagtttcgctccagcctcaacatcagtagtggctagttgcggctgtggggggatcatatggtgtgctgagtgtggttacgtcttcctttttgagtccagtctgtgacctccgctgcgtcggaagttcagactgcggggggtgttagagtatatgtgctatgtgtttaggcccatgtggcccatgtacaacatttcaacatggtagactggtaggtcctcccctgcttcctcctcccctgctttctctcaggtgtcaacacccaaaaatgatgttcctcctcccctgctttccctggttttacactttcaggtttttgtcaagtgtgaactgtcaagaagtcgaactcaagactgcagcgagtagcgacaacataatgtcttctcgaaatgaagctccatcttctgtggctgcatccaaggtgcagcctagttctggtacaacagccaaaaaaagacaatcaaccttgcaatttaaggcaagtagtaaagcacagccaaagccagccaagtccgtagttgagatgttgcggagaacaccagaggaggtggtggatgagagactttcagactcttatcagcccacaatcttggctagtgcaaaaagtaaaggaggacaaaacactatgtggacatgcagtgggctttgttcttctatgagtgtggtgtacctttcaatgccgcagcagctaggcagttttagattgcaattgaggccacatcacagtttggttcagggtataagcctccaacaccttaccaactaggcgagccattgctacaagaggctgtgaagtcaacaaatacaatgagggaggaacatgagcgtgcatggaaacaatatggttgcacactcatgtctgatggatagtctgataggaggggacgccatctcattaatttcttagtgaacagcccagagggcacttactttttagagttcgttgatgcatcaagtgaagtacatgatgcatacatgcttgctgatttgcttgagaaaaaagttgatgagattaggagagacaaggttgtacaagttgttactgataatggtgccaattacaaagctgcaggcaagcttctaatggagaggattcctgcattattttggagtccatgtgctgcacattgcttggacctaatgttggaggacataggaaacttgaaggaattcaagaaaccaattgcacgtgcaaggcgtgtgacaactttcatataccgacatgggagaattcttagagagaaaactggtggggatgatcttgtgagggctgctgccactcgttttgctacttcctttctcacattgaagagcttgtacaagcacaaggatgctttgaaggctttatttgcaagcacagcttggactgataacagattgtcaaagactagtgctggattggatgtgtataacattgtcttctccacacagttttggaattcagtagaagattgccttagagcttcagggccactacttattgtacttagggtggtagatggagatgaaaggccagctatgccagaggtccaagcattgatgaaatgtgcaaaggaaaagatcaatcaaagctttgctgtccaaagcaagaagactttactcaagaaaatcataactataattgaacggcgttgggagaaacaaatggatcacccattgtatggggctgcaatgtatttgaacccaggaaagttgcatcctctcataagaaatgatgatgatgctactgttggtcagctaagaggttgctttcttgatgtgcttgcaagaatggtagatgatgaggaaactagagacaagatcaattctcaagcaatggattacgagtttcttaaaggagcagctttttcaaataagatggccaaagataacctacaaactatgaccccacttgagtggtggcgttcgtatggtggtcgtgctattgagttacagagatttgctagacgtttggtgagtctttgtgcgtcttcatcaggttgtgaacgcaattggagtacctttgaatttatccatacaaagaaaagaaactgattgttgcataagaggttgaattctattgtcttcatttcctacaacagaaagatgaaagctaggttccaaaaactacgccagaagaaggggaaaaactttgatccagtggttcatgaggacttcaactgggacaatgagtgggctgattctttgcatgtagtccctgaaggtgggcgtgggtgtgagtgtgaccttacatgggaccttgtggataatgtcattggagtatcacaagcacttcgtggccgaaacttaccaagaagggcccataatgtgtattcaagaagaaattatgttgctgcacaaaatatgtcagaggctgaagaggaagatgatgatgaagaagatgttccacatgatgatgcagaaatcacagattgtgaagatgaatctaatggtggcaatgatggtgaagaaggggaggcacccaatatcccaggagagtttgatgatgatttttaagcgacgggagagtggctatttgttgtagatacctttgtgggccggcagtatgccaggcgccacaaaggagtcagttagccctcctattttagtggagagattagctctatttgtttagaagataagaagagataaagagggagtcggatagccctcctattttagtggagagattagctctgtttgttagaggtggttgagattaaagtggcacctaagtctataaaaggagctgctgtagtttgtattagggctcatcaaagaaagttttacctggccggtggagcttccttggtcatcctggcgcaccttgcgccagctgacggaatcagctccatctctggccgatccccatatccactaagatcccttccccagtcccaagccttgctgcgatcaccgctgcgcagtcctaggcgcccacgacatatcaatttggtatcagattcctccgacgcatcgaccaacatgtccggcgttgatcacgatcctgcgaagacctcctccgactcagccaagttggatcagatattggcgcagctctccaccatcaactcaagactcgatctgcatggacagcggatcacgcttttggagaagcgcccaatcgacgagcagctgccggaatcttcagaaaccggcccacgtaccgcagcgcctgtcggggtcatgcatagcacaggatctgctcctcgtgaccgcgtcgacgatggtggctatcgaagacccaatgtctcctttccccactacgatggtgagtctgaccccctgtcgtggatcaataaatgtgagacttacttcaggggcatgaggactccacccgatgagaaggtgtggcaggcatcactccatttggacggtgtggcagcagaatggttctacgctctggagcgggacacgggcggcgtcctcacttggtcccgcttcgttgagttcacccatatgcgatttggaccacctctacggaccaacggtatggctgatctcaaggaccttcggcgcaccggcaccgttgaagactatcaacgtcagtttctgtccattctctgtcgctgcgaggatatgacacagctccagcaagctcagatgtttaccgcaggcttgggtgaaccgcttcggactgatgttgaactgctgactccaactacattgcagcgggccatgcacctggcacgcgtctatgaacgtcgtatggatctgtcctcgaccccatcaaggacaccatatgctacatcaaaaccaacggcatctacaactgcaccaaaaccctcgtcatcggctaccagcagaccacgtttgcgcaggctctcaccggaggaggttgccgccaaacgggccagcggtgaatgctaccactgctctgaaaaatatacagtcgatcacaagtgtgctgctcgcggagtttttctgttggaactggatggagaagataccgggacaacggatacactggcagaggagctggggcatatcacttcatgctctcactgggattgacatcgccgacacactgaaactgaaagtctctatcaatggtgtggctctcattgctcttgtggattcaggatccacccatacattcatccgtgatgctattgtgccaagactgggactgcatgtgactccaacagcaggactgcctgtcaaggttgcaaatggagagaaggtgttgagtgggggtgtctgttctcaaaccccactcactgtcggcgaagagaattttaccacaacctgctacactcttcccctggatggctttgatgtggtgcttggggtagaatggctgcgttctttgggtcccttcatctgcaactttgaaaagttgacgctgtctttttggcgtcacggacacatggtgcgttggacaggcattggcggctctccaccccgctgtaatgctctggacatggcacacaaactgctggataccctgctgctatcctttgaagacctctttgtcgagccccagggacttcctccacctcgccgccatgatcatcgcatccggcttctgccagggacagtaccagtggcggtacgaccataccgctaccctcagttgctcaaagatgagattgaacgacagtgtgaccagatgctatcccaaggtatcatccgagagtgtacctcaacgttctcatcaccagtgctgcttgtgaagaaatcagacaacacatggcgcttctgcattgactaccgtgagctcaacacgaagacggtcaaggacaaatttcctatcccagtagtggatgaactcctggatgagcttcggggagcccggttcttcaccaagcttgacttacgtagcggctaccatcaggtgcgcatgcacccagaggacatcaataagacggccttccgcacgcaccatggtcactacgagttcttagtcatgccttttggcttgactaatgcaccgtcgacatttcaggcgcttatgaatgatgtactcaagccgttcatccgtaagtttgtactggtattctttgatgacatattaatctatagctcatcctgggctgagcatcttcaacacatgcggcaagtattccagctgttacaagagcagaagttggccctcaagcgcaccaagtgttcctttggcgagacacaggtgggttacttaggccacatcatctcggataagggagttgcaatggaccctgccaagattgaagcagtggagtcatggccaccaccgcgctccatccgggcgctcagaggatttttgggactgactgggtattatcggaaattcatcgctggttatggcactgtagcagcccccttgacagcactgttaaaacgagaggcattcagatggacagaagaagcagaggaggcttttaatctactcaaacaggccttaatgtccgcaccattactgcagatgcccgacttcggccgcagtttcatcattgattgtgatgcgtcagggtctggttttggcgccgtgttacaccagggagatggagctattgctttcttcagcagggcagtcgcacctcaacatcagaagttgccggcatatgaacgggaactgattgggttggtgaaagcagtccggcactggaggccttatatctgggggcgccagtttctagtccgcaccgatcactacagtcttaaatatttattagatcagcgactgaccacaattccccaacatacatgggtgagcaagttattcggatatgattttatggtggagtacaagcctggcaaactcaatggcgcagctgatgctctctcacgtcgtgtcgagtcaagcatggcactcaacaccatctctacaccttcttttgagctgtttgacagtttgcgagccgaggctgcaacggacccacaaatccaggatgtgcgccagcagcttgctgctggtactgtttcaccaggttggacagaattggatgggttgctccttttcaaaggaaaagtctatgtgccagatgcctctactctttggccgatactattatccagtgcccatgacacaggacatgaaggaatccaaaagacaattcacaggtttcggtcgtcattctataatcctcatgcattacagagggttaaggaattcatcaaaggttgttcagtctgccagcgcaataaaactgaacatctccatcccggtggtctcctgcaacctctatcagtaccttcggaagtatggagtgatatttctatggacttcattgaggggtttccaaaggtgggcggcaagtcagtgattctcacagttgttgaccgtttctccaagtttgcacactttattgctctcggacacccttacacagcagcatcggtagcaaaagccttcttcgataacattgtccgtctccatgggttgccatgctccattgtcagtgatagagatacagtatttactagcacattctggtcagaattgttccagctagcaggagttaagctgcacatgagttcagctttccacccacaatctgatggacaatcagaagtggtaaatcgaattatcaccatgtatcttcggtgcctagcaggggatagaccaagagagtggcttaaatggcttccatgggccgaattctgctacaacacttccttccagactgctcttcgatgctctccatttaaggtggtatatggccgagaacctcctgctcttctgccctatcatccaggaacatcacaggtggccgctgttgacaaacaactgcagacacgcgacgaattcttggcggatattcgtgatcgattgattcagtcacaggtgacaatgaaaagctaccaggacaggcatcgacgggaagtggagttccatgagggcgattgggtatggctgcgcttacagcagcgcacaacagttggtgtcacttctgctacacccaacaaacttggcccaaagttctttggaccatatcaagtgctatcaagggtgggcactgtctcctacaagttgcagcttcctcccagggccagaatacatgatgtgttccacgtttctctactcaagaaattcataggggaagctccaacccaagttataccgctgcccgagctcctcaacggcagagtcatccctacaccagaaaaagtcctccgtgcaaggctgaatcgtggggtgtgggaagttctgatcaagtggacaggccgagcagagacggatacttcttgggagcagctggaagacttcaagcttagatatccagccatgacgctcgaggacgagctcttcgtcggcgaggggggaaatgttgtagatacctttgtgggccggcagtatgccaggcgccacaaaggagtcagttagccctcctattttagtggagagattagctctatttgtttagaagataagaagagataaagagggagtcggatagccctcctattttagtggagagattagctctgtttgttagaggtggttgagattaaagtggcacctaagtctataaaaggagctgctgtagtttgtattagggctcatcaaagaaagttttacctggccggtggagcttccttggtcatcctggcgcaccttgcgccagctgacggaatcagctccatctctggccgatccccatatccactaagatcccttccccagtcccaagccttgctgcgatcaccgctgcgcagtcctaggcgcccacgac

SEQ ID NO: 21033 - DNA, 1963 bp, Zea Mays
gtcgatcatagctgcgacgacacaacagatggttgtccgtggtgcagaagattgatggccacgacgcggaggattggtagctgtggcgtggagggttatcccgcagcagcgcctctataggttgggccaccatggcggccgattgttgcagattgggcgagtagatccacgcacaaccgtagtcgagccacgcctggacctccacgagcatggaggcgggctgcagcagtggcacggcaacctcaacgtagaacgcagcctccacctcctcccttggtgtgtccggttgcagtccatcgacaccatcgtcctcgacccggccgcctctgccctcgcccaggccgcactcgctcgcgcctaggttgcctacgcccaggcagcccgcggtagaagcggaggggaggggctgacccacgcatgcttgagcttggccaggcgagtgtcatgggaatcaaaacgggcattgatggcggcgagttgctcgaggatgaggtccatcttggcggagtaggtcacaagatcgtcatgcgcgccggccatggtggcgatgcgcgcgtagtggcttcggtaccaaattgttgtgaactgcgatgcactcgcaagatagttccggtactcagccctcccgtaggaggccctaggagtaaactagatctatatcttcttgcctccctctactaacaccctggtcgtccttatatagagaggtaaccctaacttaatagctaagcaacataacaaaccctatctggtcggcactgttcacgcgctacagtaaccacacgtgaacattggccgcagctaacctaaccataatgacctagctaatgggcttaaggcccataacaatcagacatcccgccgcgactcttggtgctggcggcttcgcctgcgctcatggtcgatcacggatttggtagatatactccaacgtggggtattgtctgtccctgtgatttattcaccgtcatagcaaagctgagtctaagagggaattgagtcctctcaaacttgaaaggaaagatctcatcatcagaaggacataaaggaatgtgtggtagaaaaactctcttccctgcatgttgtcctaaaacaatctcgacatcaattgtatttctgtgaaaatcacgaattattaatcttgtgccattgcacaaaccgttgggaggatcaagatttcggagcaaaatcactggacagttgacctttagtttgaggatgtgcagagacagtccactcggtgtgagagtttaagaactcaggaggatagttgttgttaggatcatcaacagcaatatcgaaactatggtaaaccatttcttgccttgagaagcgatcgatgaaactcatatttatcttgtcaacattttcattttttgttgacaagatcgctcgagatgtgatgtaatctcgattatgcatgttcgtctttagcgatggaaatatctcttcaattaatctatcaacatcatcatcttcaccggtataaggaatgtgtatctcgtcaggtaatctcacattatcatcgttgcatgtctcttcgatctcattaccaatacatagtagatagtctgaaaaccattgatctgactgtgccctcatgttgcacacaagtttaagatgttgcatactatcccatagagaagatctacgcaatgttgagtttatgatttgggcccttgtacctttccgtacaaccggaaggacctatctaaagtcgccaccaaataccattgttttccctccaaaaggcaaatcaggtctatccattatatctctcatgctcttatcaagtgcctcaattgcttgtcgtttagtcatcatggcctcatcccataagatcagtgatgaccttcgtaactgtcatgtacgggcgctcgtacgccaggcagcgtcgcgcccgtgacaggcgccgcacacaggagcgcacagatcgccaggagcgcgatctgggagggcgcgc

SEQ ID NO: 21034 - DNA, 908 bp, Zea Mays
ccgagctgctcgtccttggttccggacttccgggtgagcgacctcttccttgcacgcgccagtcgtctcctctactgggtcgtgcgtcaccggccgccatggatgcctcctcgtcgtgctcttgttcatggcggacacctggacctatctcccatggcgccgctccctgtttcctgctggccgccgctgcccttctatggtgctcgcccgatcccaagctgagcttgtctccatggccgccggtcagcccctgctccctgttcgcctcagccgcgaccttgccggacctcgtccctgctcggcttctccagagcgcctgccgccagctcgattcctcgcttcaaccatgggacctgctgctcgccaccgcgtgtgcactttttcctccgagcaacagccccggatctacgcagctccggccttgttttcgacctcactcgctaccgatgtcatggcttgtgcacctcgtgttcgacaaaatcccagagtgatggacatctatgcgcgattcgagtcgattccgccagtctgtagaaaagaaagcgacatgtatgtgttcacaatttggggagccagccgcccctccttactcctcgtcgttgatccacgccacatccgtgacatgctcgtcgatcccgatgatctatctttcaattgcacgctacttgcgttggggtccgaagctctctgtcatgctcgactttggatgtcatcattccgtgcgccatcaagaaatcccgggagtgggtaaagaagcgattctcgcgtggtgctcgtcaaatattcaacgaacttcttgaacatattatcgttgttattcctgcgaattccaagtcgaatttaggtaaactaattcgctacttctattattttgttttaatgattggatgtgttggattaaattattg

SEQ ID NO: 21035 - DNA, 3707 bp, Zea Mays
atgattattttgtttccacgagcattctagctagggttcagacgaatttctaggaggaggtcgcgcgacaccgtccatccacggcgaaagcaggctcgccccacaacagctttgttccattgcatcctccccaactcatgttgtgctgtgcctggtggtcaggaaagaggctcctccctttccctctccacctcgccgtgcttctccagtccacctcccccctcgtcgttgcttcttccctccccttccctcgtcgtcgcgctatcccgccggtgcgcgggcgtggggccaagcgccgccgaaaggtagcagcagaggagaagacggacacggacgcaatagcgtccacccccgtaggcaccccccgcccaaagactggtggcaggcctcctacaggcagatgctaggtgcgtttttctcctccatttgcctctgcctgtcagtggtgatggttgtgcgtttggattagtcatgattagtgtggtggtaatgctcaagttggggcactgtcactggccggattgagtgtcattttttggttttatgtcacaatagctaacattacagttttaggtgtgattgaccactaggtctttatctctgctctgagtactaagctggcaggatcgaaaagttcaatttttcatttggtggtctgaaactaaagctccttcaccttcagccctgtgttttcactatgggaatggtcttccttagtccatatgaatattacctgtggcctacggatatgaacatgataattattttatagctttgtgattgatattgccatgctattcagcctcctagcagcaccggtaccaacctttctattttcacagtacattggcttcgtttctttttgttgcaaataatttcttagaaaagtttgactctctaaaacctaggttgttgagtagatacataacatcacataagttgtacggaaagggtagtagtgatgctctttatgagaatctttgaggaagagagatgaccccctaacacatcaaatccaaacttatttttgaactattatttataagataatctcatttgtcccagttttaccgagcaaaacttcaaacaagtacttaaaagggactttcctgtttatagatgccattttgataactgatgctgtctcaatattactgtgtccttctggtgcttcaccattagttttatttccaaccatatgattgacattgaaaaggacaccagccggcttagcctttcggtgactctaaacaccacgacacattcaggtgagcaggtgacacttccacattataatacatttgtagactgaactgttctcctactacatacaactgcatgtttaaataatcatattacttttatgtgtacagatccacatataatgtttcttctatgtgtctaaagcaacgttctaaaactcgcgcagggcgcgaataagttactagttttatatttaattgtcgatttgagatgtttgtaagacaagcttgtgtacttgtattctaagttaacaatttacatttgagatatataaaaaaaaattgaattatcggaccaccctagcatcaaatcccacatatataagcaccactgacctgatgcctccattccttgcatggtttgccccagaggccagagccatgtgacccaccaccaaagaatgtcctgacaaggtgcttctcgctgaccatcgaaacacagagcttcatgtctgcccagtacttgcaacacacgttctagccagtaagattgtaattcttttggtagcttgcagtcttgcacactcgtaggaagctaggaacgtaggattgtggtggcccctgggtagcggcgtagcgcattgcgcattgttgtgagaaactaggagtgcacatcaatagccggcggtaggaatgtaaatttttttaattcacaagtaactagtagattgtaatgaagttttcttcattgtgaatgaagatggtataatggagacttttaaggctgttagaaagataagcccagcatcgaaagaaatagaatagttgtcttatttgaactatgttgtaagtattagattttctggaggcaaattttatacctatttgtggatttgaagatgtttgtaacacaagcttttgtgcttgtactgtaaggttgacaatttacatttgagatattaaaaaaatccacttattgaaacaccctagcttcaaatcctatataaatgccactgacctgatgcatccattccttccatggttggctccagagccatgtgactccctaccaaagaatatcctggcaaaaggattgtcaactttaatgcctcccacatcaccaccgacccctactgggtggctgccagggccacttggtacggtgcgccaaccggcgctggcccctatgacaacggtggtgcttgtgggttcaagaatgtgaacctacctcctttctcggccatgacatcgtgcggcaaccagcccctgttcaaggatggcaagggctgtggctcgtgctaccagatacgttgtgtcaaccacccggcatgctctggcaacccggagactgtgatgatcaccgacatgaattactacccagtcgccaagtaccactttgatctcagtggcacggcgtttggtggcatggcacagcccggccgcgacaatgagctccgccacgccggcatcatcgacatccagtttaggagggtgccctgcatctaccccgggcagacagtgaccttccacatcgagcacggctcaaaccccaactacttagcagtgctcgtcgagttcgaagatggcgatggcgatgtggtccaggtggacataatggaggccaactctgggtggtggatgccgatgcgggagtcgtggggatccatctggaggatggactccaagcgccggctgcaggggcccttctcgctgcgcatcactaacgagtcaggcgagacattggtggcttaccaggtcatcccggcaaactgggcgcccaacagctactaccgctccaacatccagtacgaggcttttggctctgctgctggacaggctactggctctgctgttggactggtcattagctctgctgctcgactgcacacgttaattaccaggatcattggcttgatctgtttggtattattgtatcatttgcaagggattgaggtgccttagttttaattagcacttgacatgttgggtgtcctacgctgtaggtggtgttgtgtgtttgctggaggcgtcgtcggtccagagtttcatcttttcgaaaaagttttgaaaccaaataattttcctatgaatttcgttgattcctgcgtgacaggtagctgatgtagctctgtgggagatgtacacatgtatttggtgctagatagctgggctgtcctgtcttgttctggctgttgtaaggggctcactgctttcaactgttctataaatcttactagtcggttgcccgtgcgttacgacgcttacaataatacccacgtaaactatccaccaaaaagatctcaagattttttattgattgtctcagctctctgtataatatttttttatttggctaaccgatgttattgtttactccatgcaatatgtgttggtacaacacggccaatgaagtgaacgattagaaaagagtttacaacgactaactgaatgaatagagattataaaatgatataattctaccatacagagaccaaataagataaa

SEQ ID NO: 21036 - DNA, 1208 bp, Zea Mays
attacttgatacgttgtgtcaaccacccggcatgctctggcaacccggagactgtgatgatcaccgacatgaattactacccagtcgccaagtaccactttgatctcagtggcacggcgtttggtggcatggcacagcccggccgcgacaatgagctccgccacgccggcatcatcgacatccagtttaggagggtgccctgcatctaccccgggcagacagtgaccttccacatcgagcacggctcaaaccccaactacttagcagtgctcgtcgagttcgaagatggcgatggcgatgtggtccaggtggacataatggaggccaactctgggtggtggatgccgatgcgggagtcgtggggatccatctggaggatggactccaagcgccggctgcaggggcccttctcgctgcgcatcactaacgagtcaggcgagacattggtggcttaccaggtcatcccggcaaactgggcgcccaacagctactaccgctccaacatccagtacgaggcttttggctctgctgctggacaggctactggctctgctgttggactggtcattagctctgctgctcgactgcacacgttaattaccaggatcattggcttgatctgtttggtattattgtatcatttgcaagggattgaggtgccttagttttaattagcacttgacatgttgggtgtcctacgctgtaggtggtgttgtgtgtttgctggaggcgtcgtcggtccagagtttcatcttttcgaaaaagttttgaaaccaaataattttcctatgaatttcgttgattcctgcgtgacaggtagctgatgtagctctgtgggagatgtacacatgtatttggtgctagatagctgggctgtcctgtcttgttctggctgttgtaaggggctcactgctttcaactgttctataaatcttactagtcggttgcccgtgcgttacgacgcttacaataatacccacgtaaactatccaccaaaaagatctcaagattttttattgattgtctcagctctctgtataatatttttttatttggctaaccgatgttattgtttactccatgcaatatgtgttggtacaacacggccaatgaagtgaacgattagaaaagagtttacaacgactaactgaatgaatagagattataaaatgatataattctaccatacagagaccaaataagataaa

SEQ ID NO: 21037 - DNA, 765 bp, Zea Mays
ggccttccagcacacgctagcggactctcggatgagagggggctgttcgccgattgggtagggggcaaatttgcggcgcgcgttggccagcgcgttggccagcccactgcgggatctgggcatccggcgacggcggcccgagcgacgcctctactgaagggaagccagggagggaggagcgacacagcgtctggcaaaagggcaatccggcggttggctggctcgccggcgcggcttcccctccgtagatcctaaaccctaaacgccatcgccaaagccttcgtcagccagtcctccaaggcacaggaaagttgagggaagcacgggtggtatttggagttttgtgcagataagaccaccacgcatccaatccatccctgtcttctcttcccacttcccagtccccaatcgcgttctcttccttggcgacatggcggccgccaccggctacagcgacgccccaaccgacgagcaactgctggcgtacgctgagctgcccaaacatggccgcgacatggcggaggtgttcgccgtgcgcatccccgccaccgtcggaggaaacctgccgccccgtggcagcatcgttttctacggcggccactgctgcagcgatttcatttacagctggagtccactggaagaggaagaagacacctcgaagcaaatctgcgacagccaggtctgtttaattaaatcgtacgagacgttgtgttaaatgtatcacaacatccgtcgtctatgagcaggcaggacagcaagtgatcc

SEQ ID NO: 21038 - DNA, 3097 bp, Zea Mays
ggccttccagcacacgctagcggactctcggatgagagggggctgttcgccgattgggtagggggcaaatttgcggcgcgcgttggccagcgcgttggccagcccactgcgggatctgggcatccggcgacggcggcccgagcgacgcctctactgaagggaagccagggagggaggagcgacacagcgtctggcaaaagggcaatccggcggttggctggctcgccggcgcggcttcccctccgtagatcctaaaccctaaacgccatcgccaaagccttcgtcagccagtcctccaaggcacaggaaagttgagggaagcacgggtggtatttggagttttgtgcagataagaccaccacgcatccaatccatccctgtcttctcttcccacttcccagtccccaatcgcgttctcttccttggcgacatggcggccgccaccggctacagcgacgccccaaccgacgagcaactgctggcgtacgctgagctgcccaaacatggccgcgacatggcggaggtgttcgccgtgcgcatccccgccaccgtcggaggaaacctgccgccccgtggcagcatcgttttctacggcggccactgctgcagcgatttcatttacagctggagtccactggaagaggaagaagacacctcgaagcaaatctgcgacagccagggtaacctcgtgctaactgggccatcattggccacctcggcatacagtccaattgctttcttcctctacctccatgatggcagcccgcaagccggagaagccaccgaggacgacgaggacatcgggaggatactctgcgactgcatcggcgacgacttctccaactacaacagggccatagtcgagactgtccaaacgggctatggccccgctgaagtgatctatgccgtcctgagcaacggcgtccaaggccgggtcgccgtcaaacttgctcgcccgccggtgtccaaagctggagaagaagacgccaccaccattcttgggaggatcgttgctcgcagcaagctgttcgacgtcggctgcgtgctcttctacaaagagggtgacaatggagtgaacgtgcgaccgggggggctgattcagttggcgagggaagcgctcgccgtgccgctgcacatgccgctgacgattgagcttgacctgcatcgctgttccggcgatgaaattgttggaggggtccttgagttcaatcctgcgaccaacggccagcacacggaacgacttgttggagaaaatggcgctgaattggaagtggcaatttcatggtcgcagtacccttggcgccccgcccaaagactggtggcaggcctcctacaggcagatgctaggtgcgtttttctcctccatttgcctctgcctgtctgtggtgatgattgttcgtttggattagtcatggttagtgtggtggtaatgctcaagttggggcactgtcaatagccggattgagtgtatttttttggttttatgtcacaatagctaacattacagttttaggtgtgattgaccactaagtctttatctctgctctgattactaagctggcaggatcgaaaagttcaatttttcatttggtagtctgaaactaaagctccttcaccttcagccctgtattttcactatgggaatggtcttccttagtccatatgaatattacctgtggcctacggatatgaacatgataactattttctagctttgtgattgatattgtcatgtgattcagcttcctagcagcaccggtaccaacctttctatttttcacagtacactggcttcgtttctttttgttgcaaataatttcttagaaaagtttgactcttcaaatcctaggttgttgagtagatacataacatcacagaagttgtacgtaaagggtagcagtgatgctctttatgagaatctttgaggaagagagatgaccccctaacacatcaaatccaaacttatttttgaactattatttataagataatctcatttgtcccagttttaccgagcaaaacttcaaacaagtacttaaaagggactttcctgtttatagatgccactttgataactgatgctgtctcaatattattgtggccttctggtgcttcaccattagttttatttccaaccatatgataggcattgaaaggacaccagctggcttagcctttcggtgactctaaacaccacggcactttcaggtgacacttccacattataaacattgttgtgagaaactaggagtgcacatcagtagccggcggtaggaatgtaaatttttaaattcgcaagtaactagtagtttgtaatgaagttttctttatacctatttgtggatttgaagatgtttgtaacacaagcttttgtgcttgtactgtaagttgacaatttacatttgagatattaaaaaaaatccacttattgaaacaccctagcttcaaatccttcagtcttgcacacagagctacatgtctgtccagtccaaggtggttgcgcttggtgcactgatcttcttccttgtctcgtatggctcttgcactggaggatggactccaagcgccggctgcaggggcccttctcgctgcgcatcactaacgagtccggcgagacactggtggcttaccaggtcatcccggcaaactgggcgcccaacagctactaccgctccaacatccagtacgaggcttttggctctgctgctggacaggctactggctctgctgttggactggtcattagctctgctgctcgactgcacacgttaattaccaggatcattggcttgatctgtttggtattgttgtatcatttgcaagggattgaggtgccttagttttaattagcacttgacatgttgggtgtcctacgctgtgtgtctgctggaggcgtcgtcgatccagagtttcatcttttcgaaaaagttttgaacccaaataattttcctatgaatttcgttgattcctgcgtgacaggtagttgatgtagctctgtgggaaatgtacacttgtatttggtgctggatagctgggctgtcctgtcttgttctggctgttgtaggggctcacaactttcaactgttctagaaatctt

SEQ ID NO: 21039 - DNA, 3391 bp, Zea Mays
ggccttccagcacacgctagcggactctcggatgagagggggctgttcgccgattgggtagggggcaaatttgcggcgcgcgttggccagcgcgttggccagcccactgcgggatctgggcatccggcgacggcggcccgagcgacgcctctactgaagggaagccagggagggaggagcgacacagcgtctggcaaaagggcaatccggcggttggctggctcgccggcgcggcttcccctccgtagatcctaaaccctaaacgccatcgccaaagccttcgtcagccagtcctccaaggcacaggaaagttgagggaagcacgggtggtatttggagttttgtgcagataagaccaccacgcatccaatccatccctgtcttctcttcccacttcccagtccccaatcgcgttctcttccttggcgacatggcggccgccaccggctacagcgacgccccaaccgacgagcaactgctggcgtacgctgagctgcccaaacatggccgcgacatggcggaggtgttcgccgtgcgcatccccgccaccgtcggaggaaacctgccgccccgtggcagcatcgttttctacggcggccactgctgcagcgatttcatttacagctggagtccactggaagaggaagaagacacctcgaagcaaatctgcgacagccagggtaacctcgtgctaactgggccatcattggccacctcggcatacagtccaattgctttcttcctctacctccatgatggcagcccgcaagccggagaagccaccgaggacgacgaggacatcgggaggatactctgcgactgcatcggcgacgacttctccaactacaacagggccatagtcgagactgtccaaacgggctatggccccgctgaagtgatctatgccgtcctgagcaacggcgtccaaggccgggtcgccgtcaaacttgctcgcccgccggtgtccaaagctggagaagaagacgccaccaccattcttgggaggatcgttgctcgcagcaagctgttcgacgtcggctgcgtgctcttctacaaagagggtgacaatggagtgaacgtgcgaccgggggggctgattcagttggcgagggaagcgctcgccgtgccgctgcacatgccgctgacgattgagcttgacctgcatcgctgttccggcgatgaaattgttggaggggtccttgagttcaatcctgcgaccaacggccagcacacggaacgacttgttggagaaaatggcgctgaattggaagtggcaatttcatggtcgcagtacccttggtaatgcctattattattagcctataattcaagagtgcatttttatatgtatcaatgactaagtgttttaaatcatgtttcatacaagacagttgcactagagcaagataacatttcgtggtgggaacgccaaataaataaaaatagagggagtatcactttgggtttttctaatatatttgcaatagtgcataataaaactgtgtgtgcctcaaagtgaggcgctcaatttcagcatctaaggttaggcataaaaataagctgagtgattaggaatatcgtccacccccgtaggcgccccgcccaaagactggtggcaggcctcctacaggcagatgctaggtgcgtttttctcctccatttgcctctgcctgtctgtggtgatgattgttcgtttggattagtcatggttagtgtggtggtaatgctcaagttggggcactgtcaatagccggattgagtgtatttttttggttttatgtcacaatagctaacattacagttttaggtgtgattgaccactaagtctttatctctgctctgattactaagctggcaggatcgaaaagttcaatttttcatttggtagtctgaaactaaagctccttcaccttcagccctgtattttcactatgggaatggtcttccttagtccatatgaatattacctgtggcctacggatatgaacatgataactattttctagctttgtgattgatattgtcatgtgattcagcttcctagcagcaccggtaccaacctttctatttttcacagtacactggcttcgtttctttttgttgcaaataatttcttagaaaagtttgactcttcaaatcctaggttgttgagtagatacataacatcacagaagttgtacgtaaagggtagcagtgatgctctttatgagaatctttgaggaagagagatgaccccctaacacatcaaatccaaacttatttttgaactattatttataagataatctcatttgtcccagttttaccgagcaaaacttcaaacaagtacttaaaagggactttcctgtttatagatgccactttgataactgatgctgtctcaatattattgtggccttctggtgcttcaccattagttttatttccaaccatatgataggcattgaaaggacaccagctggcttagcctttcggtgactctaaacaccacggcactttcaggtgacacttccacattataaacattgttgtgagaaactaggagtgcacatcagtagccggcggtaggaatgtaaatttttaaattcgcaagtaactagtagtttgtaatgaagttttctttatacctatttgtggatttgaagatgtttgtaacacaagcttttgtgcttgtactgtaagttgacaatttacatttgagatattaaaaaaaatccacttattgaaacaccctagcttcaaatccttcagtcttgcacacagagctacatgtctgtccagtccaaggtggttgcgcttggtgcactgatcttcttccttgtctcgtatggctcttgcactggaggatggactccaagcgccggctgcaggggcccttctcgctgcgcatcactaacgagtccggcgagacactggtggcttaccaggtcatcccggcaaactgggcgcccaacagctactaccgctccaacatccagtacgaggcttttggctctgctgctggacaggctactggctctgctgttggactggtcattagctctgctgctcgactgcacacgttaattaccaggatcattggcttgatctgtttggtattgttgtatcatttgcaagggattgaggtgccttagttttaattagcacttgacatgttgggtgtcctacgctgtgtgtctgctggaggcgtcgtcgatccagagtttcatcttttcgaaaaagttttgaacccaaataattttcctatgaatttcgttgattcctgcgtgacaggtagttgatgtagctctgtgggaaatgtacacttgtatttggtgctggatagctgggctgtcctgtcttgttctggctgttgtaggggctcacaactttcaactgttctagaaatctt

SEQ ID NO: 21040 - DNA, 2250 bp, Zea Mays
ggccttccagcacacgctagcggactctcggatgagagggggctgttcgccgattgggtagggggcaaatttgcggcgcgcgttggccagcgcgttggccagcccactgcgggatctgggcatccggcgacggcggcccgagcgacgcctctactgaagggaagccagggagggaggagcgacacagcgtctggcaaaagggcaatccggcggttggctggctcgccggcgcggcttcccctccgtagatcctaaaccctaaacgccatcgccaaagccttcgtcagccagtcctccaaggcacaggaaagttgagggaagcacgggtggtatttggagttttgtgcagataagaccaccacgcatccaatccatccctgtcttctcttcccacttcccagtccccaatcgcgttctcttccttggcgacatggcggccgccaccggctacagcgacgccccaaccgacgagcaactgctggcgtacgctgagctgcccaaacatggccgcgacatggcggaggtgttcgccgtgcgcatccccgccaccgtcggaggaaacctgccgccccgtggcagcatcgttttctacggcggccactgctgcagcgatttcatttacagctggagtccactggaagaggaagaagacacctcgaagcaaatctgcgacagccagggtaacctcgtgctaactgggccatcattggccacctcggcatacagtccaattgctttcttcctctacctccatgatggcagcccgcaagccggagaagccaccgaggacgacgaggacatcgggaggatactctgcgactgcatcggcgacgacttctccaactacaacagggccatagtcgagactgtccaaacgggctatggccccgctgaagtgatctatgccgtcctgagcaacggcgtccaaggccgggtcgccgtcaaacttgctcgcccgccggtgtccaaagctggagaagaagacgccaccaccattcttgggaggatcgttgctcgcagcaagctgttcgacgtcggctgcgtgctcttctacaaagagggtgacaatggagtgaacgtgcgaccgggggggctgattcagttggcgagggaagcgctcgccgtgccgctgcacatgccgctgacgattgagcttgacctgcatcgctgttccggcgatgaaattgttggaggggtccttgagttcaatcctgcgaccaacggccagcacacggaacgacttgttggagaaaatggcgctgaattggaagtggcaatttcatggtcgcagtacccttggcattgaaaggacaccagctggcttagcctttcggtgactctaaacaccacggcactttcaggtgacacttccacattataaacattgttgtgagaaactaggagtgcacatcagtagccggcggtaggaatgtaaatttttaaattcgcaagtaactagtagtttgtaatgaagttttctttatacctatttgtggatttgaagatgtttgtaacacaagcttttgtgcttgtactgtaagttgacaatttacatttgagatattaaaaaaaatccacttattgaaacaccctagcttcaaatccttcagtcttgcacacagagctacatgtctgtccagtccaaggtggttgcgcttggtgcactgatcttcttccttgtctcgtatggctcttgcactggaggatggactccaagcgccggctgcaggggcccttctcgctgcgcatcactaacgagtccggcgagacactggtggcttaccaggtcatcccggcaaactgggcgcccaacagctactaccgctccaacatccagtacgaggcttttggctctgctgctggacaggctactggctctgctgttggactggtcattagctctgctgctcgactgcacacgttaattaccaggatcattggcttgatctgtttggtattgttgtatcatttgcaagggattgaggtgccttagttttaattagcacttgacatgttgggtgtcctacgctgtgtgtctgctggaggcgtcgtcgatccagagtttcatcttttcgaaaaagttttgaacccaaataattttcctatgaatttcgttgattcctgcgtgacaggtagttgatgtagctctgtgggaaatgtacacttgtatttggtgctggatagctgggctgtcctgtcttgttctggctgttgtaggggctcacaactttcaactgttctagaaatctt

SEQ ID NO: 21041 - DNA, 1482 bp, Zea Mays
ggcaagttgtccattgccctgccctgccctgccctgcccagacactggtcaagcgacgcaagggaaggatgtggttagctagcagcctgaaattctccgcccatcaactcagtcagcaggaagcaacccgcctagcgccctcgatccaaggacctcagagattcggccgtcgccactccggggccaagaaatgctcctcctgctcttcttctctgtcctcgccgccgttgccgccttcctcctcttcaagttcgccaccgtcgtcgatggggacttgacgctcgtatcccgcggtccgccgctgcgggagagggtcgacggcaaggtcgtgtggattactggagctagccgcgggattggggaggttcttgcaatgcacttcgcaaatttaggagcaaagctgatactatctgcacgtaacaaggacgcgcttgcgagagtgaaaaaaaacatcctcagcaagaatccagatagcagagttgaaatgttacccatggatttatcagctggtgaagaatctctgaaagaagtcgtacatgtggcagaatcatttttttctaatgcaggcgttgactatatggtccataatgcagccttcgaacgtcctaaacggagggctctagaagaaagtgaggaaggtcttaagataggctacattgaatgtcaatgtcttcggaactattactttaactcgccttctagcaccttacatgcttgatagagagatgggccattttgttgtgatgagtagtgctgctggaaaggttcctgctcctggtcaggccatttactctgcctccaaacatgctcttaatggttactttgcttctctgcgatctgagttgtgtacaaaaggcattaaggtcactgttatctgccctggaccgattgaaacactacaatcttctgctgcagcttcttcatcgcaaacacattctgctgagaaacgtgagaaacgtgtttcggtggaacggtgtgttgaactgacaattgttgctgctactcatggactgaaagaagcatggatatcatatcagcctgtgctgactgttatgtacttggtgcaatacatgccaacaattggttattggctaatggacaaggttggtgcaaaacggctggatgcggccgcaaagaaagggaacacgtatagttggagtctcattttcagcagcaagaagtcagcatgaccaaattgctcgtagctgctatcaccatctttctcgattcatatggtcacgtgacttatattgttgtacgcaaaaaggtcggcctgaaaaggatcagatcatgtatagaaacaatatagtttagtgaaaaattggacccgtcactatgaccaataattatgattcagttgtgttagatttattgtgtggcgtaatgatgtactgtgtgtaatatatctttgtaataagcatatacccattttactctattattaatacagctttctaccctgtctagggctaaagttttcat

SEQ ID NO: 21042 - DNA, 3132 bp, Zea Mays
atgctctgctttggcctcgcgagctcgctgcgggacgccctagccgctgctcgccccgaccacatctccctggccgagcgctcccctgttgaagccccttgccgatgccttgccctcctccctccccacggtcttcttccccatggcgtcgggatccctccttccgacggctgtgctcctcaagcgtgctctactcgagctctgccggatctgcaacttccctgcgcgcgaccgcggcacatggtcctgtgctgcccatggcctcaactctccagctccctccatggccgagcaggcgctcccagcagcagcgatgcttgtttcctctccctagccactacgccatcatgctcccgctgcccctgcctttttttcctaagagccgagctccattcctggccgtgcccaggaagtcctgtccgtgggttggggccaaggctttccctggttggcctcgccgtgagcagcacccccgatatctgcgcgcgctgccggctcgctgttttgggaagcccagtggacaacacgacgtcgacgctcaccgggtgtttgctgtttttgcgcagccccatccgcgacgtcgttcacccccgaaggcaagccgctcaacgctcgtcgacgttcggagctatgcacaaatcagaatcgccatcgttcttacaaacgccgattgagtttgtttatggaacgaaagaggatgatcgtgcaagtgatgtggtgccacccacaagatgcagtcggtggacgaaccaaggaaggatggacataacaagtggatgctcgccaagcgagtacctcccctagcaaacactatctaagtgttaaattaaaggcaagctctggttttatgcataaccgtttattatgatattttactacacttaatgtttgtaggtttataatgtgcacttaagtgtaggagttgattgaaaccctagttgcatgaactcaggaatccttttgagatggatattagtatgctaggttgagtagctgctttactaattagggatctcggtagaagtcgagtgatttttctagcactcgtgcgaggtcaggacttggttgtatccattttgataacagaataatgatggtctatagacacggatccatggggatgcgttgtctacgagatgagaaattggaataaggattaatgtgcggatacctgtgtcaagcgtttgaacatactatacacatgccgagaaatatggtaaatcgtatacacatgccgagaaatatggtaaatcggtaagcctagtagctgagtgaacctagcagcagactttactcctgacacgacctgagacatggtctcccattccggttatggtgggtacaagtgtggtcactgcacgacggcagtcagggtcagtgaggcattgtacaccaaggcggtgagccctgatttgttgacggggaattgatggggacggttgatgtgtgtggggacggagtgcctcgccacgtcgtgtgtttaggtttaccttgcaaggataaaaactcaattcgaatcgtctgcttctcgcagctaatgagactgcttgatccattgtactgcattgagtaataagtggaaatgaggtgactggcaaaagatgttgattgatataatgtttgataccatgtatgaatagctaggtactcatctagttttaaaaagatcatactaaaacttgaaaagctaaaaattgattttagactcagctagtgcttttggcaaaccaaacccctcagcaaaacagctgcatgtctagaggtagaggagtagactcctcacaccggttaagtctagctgagtattagtatactcagccttgcttgtggcataattttttgcaggtactacttaagatgattgattgctggtgtgacttggccttcatccctgccaccgggatagatggtcgagagggttattgcttccgtaggagaggaccagaaggagtagcgtggccaggcttcgccatgttactcggttttctccgttagttatttctgctgcattaaaatttatggttattatttctgaaactccgataatgtaatcactaatgatactttcttaatttatggtattatgttttattgtatttctctgtgcctcaccttcgagtgagctagtggtattcgatcctggtaagtggctttatcggactagatccgagggactgacgggttattcctgtttaagtgtgttgctgcccttaagggtgtgacttaggcacttaagctggaataattcgggcggttccgccacaattactctaggaggaaaattttatgctaaagtttggctcaatggtgggagggagatagtagatgaagctatcatccgagatgaagaagtggtcattccggatggtttgttcctgacgctgggcactagctagcttactttttaaactaccgttcagacgtgtttttaaacacacgcactgacctgcgcgcacgcacacactgaggcgagggagagagagagagagtgagtgagtgagtaatgggcggttcatcaggccttgtggactggagaggacggccggtgaacaccaagaagcatggaggagtgagagcttcaattttcattcatgcgctggtgctgctcagcaacgtagccaacattgccagtatactgaatcttgtaagctatctgcgcgaggagatgcacatggatgtcgcgagggcgacgacgatggccagcaatttctttgccgcgctgcaaatgttctccatcccagcagccttccttgctgactcctacatcaagcgtttctacactgtcctcatctttggcccaattgaaatactggggataaacttgaaggaaccgctgcatttgggagagctttgaatttcctcttggtgaccaaaaagtcagtgagcactgcaggttgatgcagctggtgttctactactccatggcggcctgtcactggtgactttatttaggtgtcaagtgtcagtagttggtgacctgtcgctcgcctttattgacttttatttggcaataggtatccgaccactagaactccgatccattatgtaggtcgagcacctcactaaaaaccgaaggatttattcgtttcaccgttaattcttatgtattgaaaggtattgagtcggtttaaa

SEQ ID NO: 21043 - DNA, 1815 bp, Zea Mays
ggcattgtacaccaaggcggtgagccctgatttgttgacggggaattgatggggacggttgatgtgtgtggggacggagtgcctcgccacgtcgtgtgtttaggtttaccttgcaaggataaaaactcaattcgaatcgtctgcttctcgcagctaatgagactgcttgatccattgtactgcattgagtaataagtggaaatgaggtgactggcaaaagatgttgattgatataatgtttgataccatgtatgaatagctaggtactcatctagttttaaaaagatcatactaaaacttgaaaagctaaaaattgattttagactcagctagtgcttttggcaaaccaaacccctcagcaaaacagctgcatgtctagaggtagaggagtagactcctcacaccggttaagtctagctgagtattagtatactcagccttgcttgtggcataattttttgcaggtactacttaagatgattgattgctggtgtgacttggccttcatccctgccaccgggatagatggtcgagagggttattgcttccgtaggagaggaccagaaggagtagcgtggccaggcttcgccatgttactcggttttctccgttagttatttctgctgcattaaaatttatggttattatttctgaaactccgataatgtaatcactaatgatactttcttaatttatggtattatgttttattgtatttctctgtgcctcaccttcgagtgagctagtggtattcgatcctggtaagtggctttatcggactagatccgagggactgacgggttattcctgtttaagtgtgttgctgcccttaagggtgtgacttaggcacttaagctggaataattcgggcggttccgccacaattactctaggaggaaaattttatgctaaagtttggctcaatggtgggagggagatagtagatgaagctatcatccgagatgaagaagtggtcattccggctcattaggcccaggaagaggcttagaaagccgaagaggctgtagatcttgaacgacgtataggatggtttgttcctgacgctgggcactagctagcttactttttaaactaccgttcagacgtgtttttaaacacacgcactgacctgcgcgcacgcacacactgaggcgagggagagagagagagagtgagtgagtgagtaatgggcggttcatcaggccttgtggactggagaggacggccggtgaacaccaagaagcatggaggagtgagagcttcaattttcattcatgcgctggtgctgctcagcaacgtagccaacattgccagtatactgaatcttgtaagctatctgcgcgaggagatgcacatggatgtcgcgagggcgacgacgatggccagcaatttctttgccgcgctgcaaatgttctccatcccagcagccttccttgctgactcctacatcaagcgtttctacactgtcctcatctttggcccaattgaaatactggggataaacttgaaggaaccgctgcatttgggagagctttgaatttcctcttggtgaccaaaaagtcagtgagcactgcaggttgatgcagctggtgttctactactccatggcggcctgtcactggtgactttatttaggtgtcaagtgtcagtagttggtgacctgtcgctcgcctttattgacttttatttggcaataggtatccgaccactagaactccgatccattatgtaggtcgagcacctcactaaaaaccgaaggatttattcgtttcaccgttaattcttatgtattgaaaggtattgagtcggtttaaa

SEQ ID NO: 21044 - DNA, 1847 bp, Zea Mays
ctcaattcgaatcgtctgcttctcgcagctaatgagactgcttgatccattgtactgcattgagtaataagtggaaatgaggtgactggcaaaagatgttgattgatataatgtttgataccatgtatgaatagctaggtactcatctagttttaaaaagatcatactaaaacttgaaaagctaaaaattgattttagactcagctagtgcttttggcaaaccaaacccctcagcaaaacagctgcatgtctagaggtagaggagtagactcctcacaccggttaagtctagctgagtattagtatactcagccttgcttgtggcataattttttgcaggtactacttaagatgattgattgctggtgtgacttggccttcatccctgccaccgggatagatggtcgagagggttattgcttccgtaggagaggaccagaaggagtagcgtggccaggcttcgccatgttactcggttttctccgttagttatttctgctgcattaaaatttatggttattatttctgaaactccgataatgtaatcactaatgatactttcttaatttatggtattatgttttattgtatttctctgtgcctcaccttcgagtgagctagtggtattcgatcctggtaagtggctttatcggactagatccgagggactgacgggttattcctgtttaagtgtgttgctgcccttaagggtgtgacttaggcacttaagctggaataattcgggcggttccgccacaattactctaggaggaaaattttatgctaaagtttggctcaatggtgggagggagatagtagatgaagctatcatccgagatgaagaagtggtcattccggctcattaggcccaggaagaggcttagaaagccgaagaggctgtagatcttgaacgacgtatagaatttgtctacctccagaaccatatgacccagaacagatccatcgctaaagtgaattctggatgaatttagggtggtaaacgtagcaatagatgaagccatcaatttgttactgaacaaagctacggagaaggatgtatggggaatagcacgaagcggatggtttgttcctgacgctgggcactagctagcttactttttaaactaccgttcagacgtgtttttaaacacacgcactgacctgcgcgcacgcacacactgaggcgagggagagagagagagagtgagtgagtgagtaatgggcggttcatcaggccttgtggactggagaggacggccggtgaacaccaagaagcatggaggagtgagagcttcaattttcattcatgcgctggtgctgctcagcaacgtagccaacattgccagtatactgaatcttgtaagctatctgcgcgaggagatgcacatggatgtcgcgagggcgacgacgatggccagcaatttctttgccgcgctgcaaatgttctccatcccagcagccttccttgctgactcctacatcaagcgtttctacactgtcctcatctttggcccaattgaaatactggggataaacttgaaggaaccgctgcatttgggagagctttgaatttcctcttggtgaccaaaaagtcagtgagcactgcaggttgatgcagctggtgttctactactccatggcggcctgtcactggtgactttatttaggtgtcaagtgtcagtagttggtgacctgtcgctcgcctttattgacttttatttggcaataggtatccgaccactagaactccgatccattatgtaggtcgagcacctcactaaaaaccgaaggatttattcgtttcaccgttaattcttatgtattgaaaggtattgagtcggtttaaa

SEQ ID NO: 21045 - DNA, 1816 bp, Zea Mays
cactcgctagctcattcatcgtataagtatgttagattttcccatgcttgcatctaaatatcgaccacatagggagtgtggggtattgcgttcagatggtttgaacctttctacatcatgtatgcacataatacgatgacaacactctattgcaatttcaatcacgtaaataataaaaccacatctaaattgtcatattaataagcttaagctgtcggaataaatagaaatgttttttaaccagtatctaactgttatgtgcagggctacatcctgctcgcggtccaagcacatgtcccatccctgcacccaccaccgtgcgtccctggacaagagacaagtacgtgtgagtcggtgagcggttcgaacctgagcctgctcctcctgggtctctacctgatccccatcggcgatggggcggctcgggcatgcctcccggctctcggcggggagcagttcgacacgtcggatcccgtagagcagaggcaggagtcgagcttcttcaactggtacaccttctccgtctcgacgggtggcttcgtggggctggtcttcatcgtgtgggtggagaacagtaaaggctgggacgtaggcttcgccgtctgtgccttgtccgtgctcctcgggatgctgatatggattgctggcctcccgttatacaggaaccagctgccaactagtagccccatcacaagaatactgcaggttcttgtagctgcattcaagaaaagaaatgttgcattaccggccaaccccagtgagctaaagcaaataagtcaagacgacgccggttccctcgagattctgcatagaaccgacggatttcgctgccttgacaaagcagcggtggacaccggaaggaccggtggctggattctctgcagcataacccagcagggcaacacaatggacaccaggcttggcgcacttcacatctcacccgcgacgctattcatcatccctacgcttttccagatggtaatcctcgtcgtttacgaccggttcattgtcccgttccttagacgaataaccgggtacgtgggcggtgtcacgcaccttcagcgcatcggcatcggattcctttcaaccatagtggccaccggcgttgcagcaatagtggaggccagtaggaaaaaggtggcacgagacagtggccttgtggatgctacagctggaattccaatatctgttttctggctgaccatacagttcttcctgctaggcattgtggatgtcacctcctttgtagggcttcttgagttcttctacagtgaggcgtccacggggatgaagtctattgggagctccatcttctactgcatccttggggtgtcagcttggttggggagcctgttgattcaagtggcaaaccgagttacaagacaccgcgatggcacgggaggctggcttgatgggacgaacttgaacaaggggaaacttgatcgattctattggttgttagcagttcttgagctggtgtcgctattagtctacgtcttcttcgcctccaggtatgtttacgggaatgaccaaagggttgtggctgatgaagataataatacggctccatctgatggtaccataaatgtgatctgatcatcagcaaccatttcaaagtagatttttcgtctgattggttacccgcgccatttcatcttgaatcaccgcatgcattgactttatttgagattatgttttgttgtttgtacgaggaagccacaggctgcatgggtgcatgcaaaataagtcattttgatacaattaacctgcatccactcatacgctcaaaattatcgtatctggctggacagggcgg

SEQ ID NO: 21046 - DNA, 1464 bp, Zea Mays
gcgcactccttcccctggtcgcccaaggccacgtcctttgctcctccccatagcgtctccttctctggttgcagttatgaaacagcagctgccgttgtccctccctggctctagctctccaagccgatgctgctcgctgccccctctccaagctgacgccccaaccaaggctgcctcccccacaacagcaccttgcccatggccgagcttgtccctacagcgtggatgctatcgccctccccacgctagcagcaagcagtgccctcccctttctgcagcaagtggatgctcccagcccctcccttgttcctatggccatttccagccatctcccatggccgaccccaactcctcccatggacgccgttccctccctgctccagttttctccatggttgcggccttgtggaaccacgcaacctctgctgctcccatggtgatctctaaatacctttgttgttttactagttctttgttaataccccgctgatgtgatgttttatgtgtgttgatgtgtgcgatatggagtaaaatccttggagaattaggtggagaataaggttaagtttaacgctccttaggtgttcgatgatatgctcgaactggtggtcgtcttcgttcttgctgaaatcgagtcggagcatgatgtggttcgttaattgatcacatgatgcggacgacaagaaccgagttgatcccaaaatgatgctggtgaacgaacccgaagcttggatgatctggtcaaataccaggatgagagatgctccccaagcggacgtcatctaacaacactgacttagtgttattccaggcaagccccggtgcatttgtcaccctcttgttgttataaaacttttatcacttatatgttgcattaggtgataggagttgtgtgaataaacagttgatgcattaccattccttggaattcgattactattccttgatacctgttttataaagcgaactaatgaggcttagccctacttagaaaaactaaaagttgtttcttttaaaaaaagaatgatgtggaacactgttatgggctttttgtttcaaaaatcaaagcaaacttatggtgatgattcgccttcggctggagtgggttcatcattcgaaaaagagtacccctgtcgggtaccaaaaatgggaaaatggttggaataaatctagaccaggcgctgagcaggaaaggtcgtctgttagtgtcgattaaggaccgttccgattgttggcctactaatctaggaccctttaactggccacatgcctcatcatgggtaagcttagcctcggccagaccaataccagaacagctcgcacgcactgggagtggagagatggcgagagtaacgtgtgcccacctggcaagtggctagatggtggggtgttgtgctctcgggtcacgtgaacccgttctggtcttgagaaacctggtggcgagttaacatatgcaagggttaa

SEQ ID NO: 21047 - DNA, 1194 bp, Zea Mays
ctccttctctggttgcagttatgaaacagcagctgccgttgtccctccctggctctagctctccaagccgatgctgctcgctgccccctctccaagctgacgccccaaccaaggctgcctcccccacaacagcaccttgcccatggccgagcttgtccctacagcgtggatgctatcgccctccccacgctagcagcaagcagtgccctcccctttctgcagcaagtggatgctcccagcccctcccttgttcctatggccatttccagccatctcccatggccgaccccaactcctcccatggacgccgttccctccctgctccagttttctccatggttgcggccttgtggaaccacgcaacctctgctgctcccatggttcgttaattgatcacatgatgcggacgacaagaaccgagttgatcccaaaatgatgctggtgaacgaacccgaagcttggatgatctggtcaaataccaggatgagagatgctccccaagcggacgtcatctaacaacactgacttagtgttattccaggcaagccccggtgcatttgtcaccctcttgttgttataaaacttttatcacttatatgttgcattaggtgataggagttgtgtgaataaacagttgatgcattaccattccttggaattcgattactattccttgatacctgttttataaagcgaactaatgaggcttagccctacttagaaaaactaaaagttgtttcttttaaaaaaagaatgatgtggaacactgttatgggctttttgtttcaaaaatcaaagcaaacttatggtgatgattcgccttcggctggagtgggttcatcattcgaaaaagagtacccctgtcgggtaccaaaaatgggaaaatggttggaataaatctagaccaggcgctgagcaggaaaggtcgtctgttagtgtcgattaaggaccgttccgattgttggcctactaatctaggaccctttaactggccacatgcctcatcatgggtaagcttagcctcggccagaccaataccagaacagctcgcacgcactgggagtggagagatggcgagagtaacgtgtgcccacctggcaagtggctagatggtggggtgttgtgctctcgggtcacgtgaacccgttctggtcttgagaaacctggtggcgagttaacatatgcaagggttaa

SEQ ID NO: 21048 - DNA, 494 bp, Zea Mays
ccgccgtcgtggctagaacgcttcaaagcgtgcttgtgacatcgcggcgcggcgctgtgaaccacctctctattgaccgtcaactggtgctttccccggctgtcttcgcgcgagcaccgaagtgttgaacacctagaagaagtggtgtctgaagaaggagttcacttcagtgcctgctgatccagtggtggagtttcatctaactgcttaccacaatagaaggattttagatcttctcctgcaataaggcaagccccggtgcatttgccaccttccttgtattacaaaattttatcacttataagctgcattaggtgataggagttgaatgattaaacacttgatgcattaccatccttgaaagattgattatcataccttgttacctgttttataaaaactagtaatgcttagccatgcttatagattaagaaaaatgtttttgatctatgactcatgatttttaaaaagaaaaagggcttgggatgatgaag

SEQ ID NO: 21049 - DNA, 749 bp, Zea Mays
tgaaaatactctccactacatatgggctgaactcagagctgtctgcctttgatcagttgcactagggcttggttgtgtgaagtctctcccctgcccttgagctctaactcgtggccaccgtatgagtgaagtggtagtgttcagcctgagtaacctccctccccaaacctgatttgctcttgtgttgtgtgccatctactcggcttggtgttcatcacagccgattccccccccccccccccccccccccgccgcccgccgtcgtggctagaacgcttcaaagcgtgcttgtgacatcgcggcgcggcgctgtgaaccacctctctattgaccgtcaactggtgctttccccggctgtcttcgcgcgagcaccgaagtgttgaacacctagaagaagtggtgtctgaagaaggagttcacttcagtgcctgctgatccagtggtggagtttcatctaactgcttaccacaatagaaggattttagatcttctcctgcaataaggcaagccccggtgcatttgccaccttccttgtattacaaaattttatcacttataagctgcattaggtgataggagttgaatgattaaacacttgatgcattaccatccttgaaagattgattatcataccttgttacctgttttataaaaactagtaatgcttagccatgcttatagattaagaaaaatgtttttgatctatgactcatgatttttaaaaagaaaaagggcttgggatgatgaag

SEQ ID NO: 21050 - DNA, 813 bp, Zea Mays
tgaaaatactctccactacatatgggctgaactcagagctgtctgcctttgatcagttgcactagggcttggttgtgtgaagtctctcccctgcccttgagctctaactcgtggccaccgtatgagtgaagtggtagtgttcagcctgagtaacctccctccccaaacctgatttgctcttgtgttgtgtgccatctactcggcttggtgttcatcacagccgattccccccccccccccccccccccccgccgcccgccgtcgtggctagaacgcttcaaagcgtgcttgtgacatcgcggcgcggcgctgtgaaccacctctctattgaccgtcaactggtgctttccccggctgtcttcgcgcgagcaccgaagtgttgaacacctagaagaagtggtgtctgaagaaggagttcacttcagtgcctgctgatccagtggtggagtttcatctaactgcttaccacaatagaaggattttagatcttctcctgcaataaggaaagaatttgatgacttgggctttattagttgcttcttgtggaggtcttgaagcttaggttacttatgtgtatattttatggaaaggtttcacctttccaaatattgtagttaagttatgcactctaaagactatcaggacttgtaataatttcaatcccttttgtggtgtaagacttcagttctggaatgtatagtgtattttgtaaaagtcttccgctctatctccaatgtgtgtatcaaatgtgattactgtaatatgcctgttatgtgggagatccttgggatgatgagttcaagttgatgaact

SEQ ID NO: 21051 - DNA, 3076 bp, Zea Mays
attttcgtcccgaccaaaaaatatgaaaataaaaataatttagctatttttttcgaccgttttcctcctagccacccgtcagtccgccaccgctcgcacgtgcagagtgcaggggcaccatcacatcctcctcctgccccgatccgccagccgcgccgctcgccgcaccccgatgtgggccgccgacccctctgcagctccggccgcggccgtggtcgctgacccagatggccctgatgccgtgcggctcacctggaacacctggccacggtcaaaggtcgaggccagccgctgcgtcgtgccgctcgccgccaccatctcgcccggtcgcgtcccggacccctccgcggcgtccccgccgccgctcccttaccctccgctccgttgcaaggctccctgctccgcgctcctcaaccccttcgcgcgcgtcgacttcgccgccaagatctggatctgcccgttctgcttctcccgcaaccacttccccctgcactactctgccatctctgagtccaacgttcctgccgagctcttcccgcagtgctccaccgtcgagtacatcgtcggcggagccggcgtccctggggtgggcagctcgccccctccgcccgtatttctcttcgtcatcgacacctgcgtcatcgaggaggagctggggtacgtcaaaatggccatgcgaaaggccaccgcgcttctgccggagcacgcactcgtgggcctcgtcaccttcggcacgcaggtgcacctgcacgagctcggattctccgatctcagcaagatctacgttttccgggggaccaaggagatctccaaggaccaaatattggatcagcttgagctgtcgggcgctgggcgcccgggcttccccatgatgccacagcaaccgagcgggccgcaggtgaatgggatgcatccgtcggtcacggccggggtcaacaggttcttgctcccggtgtcagagtgcgagtgtacactcagcacgttgctggacgagttacagcctgaccaatggccagtggaggctgggaaccgtgccatccggtgcaccggtgttgctctcagcgtggctgccgggttgcttggtgcttgcatgcctgggactggtgcaatgatcattgcattgctaggtgggccatgtaccgagggccctggaatgattgtttcaaaagatttgtcagaaccagtttagatcacataaggatcttgacaaggatgcagcttcctcacttccagaaagctgttaaattttatgatggtcttgctaagcagttggtcagccaagggccatgtgttagatgtttttgcatctgctctcgatcaggttggactagctgagatgaaggttgctattgagagaacaggtggccttgttgtcttatctgaaagttttggacattcagtattcaaggattctttcaaacgcatttttgagggaggtgaacagtctctaggcctttcattcaatggtacaattgaaataaactattcgaaagatattaaagtccaaggtattattggaccatgcacatctttggagaagaaaggagccgtgtgtgctgacacaattgttggtcaaggaaatacaacagcatggaaaatgtgtgggctcgatagaaatacttctctgacagtattttttgatgtctcaccgagtgaacggtcgagccaaccaggacaccaaaatccccatttgtatatacaatttgtaacaagttaccaacacccagaaggtcaaatgagggtaagagttactacgatatgcaggaaatgggtagacggttccactaataccgaggaattagttgaaggttttgaccaggaaactgcggctgttgtgttggcaagatacatctcttttaaaatggagatggaggaagagttcgatgcaacacggtggcttgatagatctctcatacgtctttgctcaagatttggggattatcggaaggatgacccctcttcatttagtttgcattcaaatttctcattgttccctcagttcatgtttaatctgcggcgttcacaatttgttcaggttttcaataacagtccagatgagacagcttatttcaggatgttactcaatcgcgagagtatcactaactcggttgccatgatccagccttccttgatatcattttcctttgattcacctccatctccggtgtttctagatgtggcatcattagcggcagatcgtatactgctacttgatgcgtactttagtgttgtcattttccatggcatgacaattgctcagtggagaaacatgggttatcagaaccaacctgagcatgagcaatttgcacaactattacaagcaccacacgaggatgcgcagatgataataaaaggtcgatttccagttccaagactagttgtctgtgaccaacatggctcacaggcaaggtttttgttggctaagctgaatccatcggccacatataactcagctcatgatgttgctccaggttccgacatcattttcaccgatgatgttagcttcctggtcttctgtgagcacctacaaaggctggctgttcagtcttaaggacctgtatgcaatagttgtacaccctattggatagttgctgataattcattaggctcttaggttggacttgttagaaaatctcccttttttgttcctctttgcccacagttttctgaggccagactatttttcgggaaacagtcctaaaggaaggtgtaaattgccccggaggtctggtatctgcatactatttatgttgacatcgcccagcttttcttgtggaaagtcatttgggcagcttaggcaattatcctttcaggcacgtgagtttgtaaatgtgacatcgtggacacttgacatgctcttcgacatttgattttacagctaacttaaacataaaaaatagcgcaactgtaaattttttgtattatttcttaggcaccatgactaatttttttctgaaaaaaataaatttgtaccaaaattgggattttgatatctactttcaatattttaaattgtaaatcgttctggtttgtaagatatacgatttttatatactgaactgaatcttgtgtattc

SEQ ID NO: 21052 - DNA, 2063 bp, Zea Mays
tcagtccgccaccgctcgcacgtgcagagtgcaggggcaccatcacatcctcctcctgccccgatccgccagccgcgccgctcgccgcaccccgatgtgggccgccgacccctctgcagctccggccgcggccgtggtcgctgacccagatggccctgatgccgtgcggctcacctggaacacctggccacggtcaaaggtcgaggccagccgctgcgtcgtgccgctcgccgccaccatctcgcccggtcgcgtcccggacccctccgcggcgtccccgccgccgctcccttaccctccgctccgttgcaaggctccctgctccgcgctcctcaaccccttcgcgcgcgtcgacttcgccgccaagatctggatctgcccgttctgcttctcccgcaaccacttccccctgcactactctgccatctctgagtccaacgttcctgccgagctcttcccgcagtgctccaccgtcgagtacatcgtcggcggagccggcgtccctggggtgggcagctcgccccctccgcccgtatttctcttcgtcatcgacacctgcgtcatcgaggaggagctggggtacgtcaaaatggccatgcgaaaggccaccgcgcttctgccggagcacgcactcgtgggcctcgtcaccttcggcacgcaggtgcacctgcacgagctcggattctccgatctcagcaagatctacgttttccgggggaccaaggagatctccaaggaccaaatattggatcagcttgagctgtcgggcgctgggcgcccgggcttccccatgatgccacagcaaccgagcgggccgcaggtgaatgggatgcatccgtcggtcacggccggggtcaacaggttcttgctcccggtgtcagagtgcgagtgtacactcagcacgttgctggacgagttacagcctgaccaatggccagtggaggctgggaaccgtgccatccggtgcaccggtgttgctctcagcgtggctgccgggttgcttggtgcttgcatgcctgggactggtgcaatgatcattgcattgctaggtgggccatgtaccgagggccctggaatgattgtttcaaaagatttgtcagaaccagtttagatcacataaggatcttgacaaggatgcagcttcctcacttccagaaagctgttaaattttatgatggtcttgctaagcagttggtcagccaagggccatgtgttagatgtttttgcatctgctctcgatcaggttggactagctgagatgaaggttgctattgagagaacaggtggccttgttgtcttatctgaaagttttggacattcagtattcaaggattctttcaaacgcatttttgagggaggtgaacagtctctaggcctttcattcaatggtacaattgaaataaactattcgaaagatattaaagtccaaggtattattggaccatgcacatctttggagaagaaaggagccgtgtgtgctgacacaattgttggtcaaggaaatacaacagcatggaaaatgtgtgggctcgatagaaatacttctctgacagtattttttgatgtctcaccgagtgaacggtcgagccaaccaggacaccaaaatccccatttgtatatacaatttgtaacaagttaccaacacccagaaggtcaaatgagggtaagagttactacgatatgcaggaaatgggtagacggttccactaataccgaggaattagttgaaggttttgaccaggaaactgcggctgttgtgttggcaagatacatctcttttaaaatggagatggaggtaaacttttggtgcacttgaaaccttgaattgagcaatatgttcttgtcacttgaactgtcaacatttaatgctgttataaaagagtaacaatcatctattgctctttttgttatctaatcatcattctgattgggcacataatattcttttttttgttctatgttatttttggtttaaatgtttcttagcatgtttctttgagttactgttatgactggaaaagtatatcacatacgcccaaagcccttagaggcacaagcgccag

SEQ ID NO: 21053 - DNA, 3286 bp, Zea Mays
tcagtccgccaccgctcgcacgtgcagagtgcaggggcaccatcacatcctcctcctgccccgatccgccagccgcgccgctcgccgcaccccgatgtgggccgccgacccctctgcagctccggccgcggccgtggtcgctgacccagatggccctgatgccgtgcggctcacctggaacacctggccacggtcaaaggtcgaggccagccgctgcgtcgtgccgctcgccgccaccatctcgcccggtcgcgtcccggacccctccgcggcgtccccgccgccgctcccttaccctccgctccgttgcaaggctccctgctccgcgctcctcaaccccttcgcgcgcgtcgacttcgccgccaagatctggatctgcccgttctgcttctcccgcaaccacttccccctgcactactctgccatctctgagtccaacgttcctgccgagctcttcccgcagtgctccaccgtcgagtacatcgtcggcggagccggcgtccctggggtgggcagctcgccccctccgcccgtatttctcttcgtcatcgacacctgcgtcatcgaggaggagctggggtacgtcaaaatggccatgcgaaaggccaccgcgcttctgccggagcacgcactcgtgggcctcgtcaccttcggcacgcaggtgcacctgcacgagctcggattctccgatctcagcaagatctacgttttccgggggaccaaggagatctccaaggaccaaatattggatcagcttgagctgtcgggcgctgggcgcccgggcttccccatgatgccacagcaaccgagcgggccgcaggtgaatgggatgcatccgtcggtcacggccggggtcaacaggttcttgctcccggtgtcagagtgcgagtgtacactcagcacgttgctggacgagttacagcctgaccaatggccagtggaggctgggaaccgtgccatccggtgcaccggtgttgctctcagcgtggctgccgggttgcttggtgcttgcatgcctgggactggtgcaatgatcattgcattgctaggtgggccatgtaccgagggccctggaatggtaaagatggctcctgttttactcatattaatctatgttaacatgattgtgttacaattttgttattcttgtgaaatcttcaagtatttgaatgttggtttgtttaagatgtgttaaaaattgcaaaatattgctgctgcatggattgtcatgcttgaagtgcacttagcctaacttttgtaggcaaatacaggatcttatcatgctcccccgttcatagcagattattctctgtctattgttcatatttcctttaaaatctttctaatactgtattcacgagtgcagattgtttcaaaagatttgtcagaaccagtttagatcacataaggatcttgacaaggatgcagcttcctcacttccagaaagctgttaaattttatgatggtcttgctaagcagttggtcagccaagggccatgtgttagatgtttttgcatctgctctcgatcaggttggactagctgagatgaaggttgctattgagagaacaggtggccttgttgtcttatctgaaagttttggacattcagtattcaaggattctttcaaacgcatttttgagggaggtgaacagtctctaggcctttcattcaatggtacaattgaaataaactattcgaaagatattaaagtccaaggtattattggaccatgcacatctttggagaagaaaggagccgtgtgtgctgacacaattgttggtcaaggaaatacaacagcatggaaaatgtgtgggctcgatagaaatacttctctgacagtattttttgatgtctcaccgagtgaacggtcgagccaaccaggacaccaaaatccccatttgtatatacaatttgtaacaagttaccaacacccagaaggtcaaatgagggtaagagttactacgatatgcaggaaatgggtagacggttccactaataccgaggaattagttgaaggttttgaccaggaaactgcggctgttgtgttggcaagatacatctcttttaaaatggagatggaggaagagttcgatgcaacacggtggcttgatagatctctcatacgtctttgctcaagatttggggattatcggaaggatgacccctcttcatttagtttgcattcaaatttctcattgttccctcagttcatgtttaatctgcggcgttcacaatttgttcaggttttcaataacagtccagatgagacagcttatttcaggatgttactcaatcgcgagagtatcactaactcggttgccatgatccagccttccttgatatcattttcctttgattcacctccatctccggtgtttctagatgtggcatcattagcggcagatcgtatactgctacttgatgcgtactttagtgttgtcattttccatggcatgacaattgctcagtggagaaacatgggttatcagaaccaacctgagcatgagcaatttgcacaactattacaagcaccacacgaggatgcgcagatgataataaaaggtcgatttccagttccaagactagttgtctgtgaccaacatggctcacaggcaaggtttttgttggctaagctgaatccatcggccacatataactcagctcatgatgttgctccaggttccgacatcattttcaccgatgatgttagcttcctggtcttctgtgagcacctacaaaggctggctgttcagtcttaaggacctgtatgcaatagttgtacaccctattggatagttgctgataattcattaggctcttaggttggacttgttagaaaatctcccttttttgttcctctttgcccacagttttctgaggccagactatttttcgggaaacagtcctaaaggaaggtgtaaattgccccggaggtctggtatctgcatactatttatgttgacatcgcccagcttttcttgtggaaagtcatttgggcagcttaggcaattatcctttcaggcacgtgagtttgtaaatgtgacatcgtggacacttgacatgctcttcgacatttgattttacagctaacttaaacataaaaaatagcgcaactgtaaattttttgtattatttcttaggcaccatgactaatttttttctgaaaaaaataaatttgtaccaaaattgggattttgatatctactttcaatattttaaattgtaaatcgttctggtttgtaagatatacgatttttatatactgaactgaatcttgtgtattc

SEQ ID NO: 21054 - DNA, 2078 bp, Zea Mays
tgattgaagatccctcagtcattaccggccgggtgaagcttcacctagagctattgtcatcgtccgagacaaggggtatcctggatgctagtaagacaacctccaagactattaagagagcacctgtccacaaggaacctagcttggtgtcagtttggtaaccctggggtttgcacctctggggccaagcactgagctagccaggtcccagagccctgcaaactgggggcattatgcaagtgcttccaggcttcgcacaagacaccctcagaacgagttatggcatttatggttatcttaatggcaataacgcataagcctgtagcactgacattagatatgattctcttgtttgcttttcatgtttgtccatatgttcaatttgtttgcatcgccaacaggttggactagctgagatgaaggttgctattgagagaacaggtggccttgttgtcttatctgaaagttttggacattcagtattcaaggattctttcaaacgcatttttgagggaggtgaacagtctctaggcctttcattcaatggtacaattgaaataaactattcgaaagatattaaagtccaaggtattattggaccatgcacatctttggagaagaaaggagccgtgtgtgctgacacaattgttggtcaaggaaatacaacagcatggaaaatgtgtgggctcgatagaaatacttctctgacagtattttttgatgtctcaccgagtgaacggtcgagccaaccaggacaccaaaatccccatttgtatatacaatttgtaacaagttaccaacacccagaaggtcaaatgagggtaagagttactacgatatgcaggaaatgggtagacggttccactaataccgaggaagagttcgatgcaacacggtggcttgatagatctctcatacgtctttgctcaagatttggggattatcggaaggatgacccctcttcatttagtttgcattcaaatttctcattgttccctcagttcatgtttaatctgcggcgttcacaatttgttcaggttttcaataacagtccagatgagacagcttatttcaggatgttactcaatcgcgagagtatcactaactcggttgccatgatccagccttccttgatatcattttcctttgattcacctccatctccggtgtttctagatgtggcatcattagcggcagatcgtatactgctacttgatgcgtactttagtgttgtcattttccatggcatgacaattgctcagtggagaaacatgggttatcagaaccaacctgagcatgagcaatttgcacaactattacaagcaccacacgaggatgcgcagatgataataaaaggtcgatttccagttccaagactagttgtctgtgaccaacatggctcacaggcaaggtttttgttggctaagctgaatccatcggccacatataactcagctcatgatgttgctccaggttccgacatcattttcaccgatgatgttagcttcctggtcttctgtgagcacctacaaaggctggctgttcagtcttaaggacctgtatgcaatagttgtacaccctattggatagttgctgataattcattaggctcttaggttggacttgttagaaaatctcccttttttgttcctctttgcccacagttttctgaggccagactatttttcgggaaacagtcctaaaggaaggtgtaaattgccccggaggtctggtatctgcatactatttatgttgacatcgcccagcttttcttgtggaaagtcatttgggcagcttaggcaattatcctttcaggcacgtgagtttgtaaatgtgacatcgtggacacttgacatgctcttcgacatttgattttacagctaacttaaacataaaaaatagcgcaactgtaaattttttgtattatttcttaggcaccatgactaatttttttctgaaaaaaataaatttgtaccaaaattgggattttgatatctactttcaatattttaaattgtaaatcgttctggtttgtaagatatacgatttttatatactgaactgaatcttgtgtattc

SEQ ID NO: 21055 - DNA, 206 bp, Zea Mays
cttgaagcaaggaatctcacttgacattcaggctgtccaattctttgaggatattctcccttcattcttgcagcagcaacagcctaatagtcagaccactaaaatcattattcacatgtttgggtagaatttatgagcagcaggacaaataagcatgttccaacaaaagagagtgataaattaacagcctacaagttaatcatgat

SEQ ID NO: 21056 - DNA, 1487 bp, Zea Mays
agtagtcatcgacgtcgtcccgaccttcttttcaatcccgtctcggattcgttccgtctcagctaccgcgaccacgacgccgacgcgagagggcagggaacacagccactcgccgacgagaccccggcgcgcgcgagagaaagagaagagaggaggatcttttgttcgtgaaaaatattggaggcggagggaaggtgaaggagggggatcggagatgaacgtgttccggctggcgggggacatgacccacctcctcagcgtggtagtgctgctcctcaagatccataccatcaagtcctgcgcaggcatatctctgaagacacaggagctgtatgcacttgtttttgcagcacggtacctggacctgtttgttcattttgtgtctctgtataacactgtcatgaagctggtcttcttggcaagttctttctcgatagtttggtacatgaagcggcataagattgtgcggaggacatatgacaaggatcatgacacctttcgccattacgttttagtgttgccttgtcttcttctggctctcctcattaatgagaagtttacttttagagaggtgatgtgggcattctccatttatttggaagctgtcgcgatatttccacaacttgtgttgctacagcggacaaggaatattgacaacctgactggccaatatgtcttcttcttggggtaagagatctatatatggcagtatctaaaaatgcataaaaaacgaaaacaaatgtaattttcttagaaacaatgcattgaacaaaagttttgtatgaacaatatttgatcggcattgcctatatagtgaaatagacaacatggatgaattttcttattccgccttctgatattcgatgtatcatgctaggatcagtcttatccttttggacagagccttaatttgtctctagtttatatacgctattactaaagctgattcacttggttacgatgcagtgcctaccgtgtgctttatatccttaactggatttaccgatacttcactgagccccattttgtccactggataagttggatggcaggaatagtgcaaactctgttgtatgctgacttcttcttttattacataatgagctggaagaacaatgtgaagctagagctgccagcttaaggttgctgctcctgtccccaagatatagtagggtaatatatcagataggcaggccccatacacagcatgatcattgctatcgccaactgggttatgaaaaaagcattttagttgcgtggcttgtatcgccttgtatctctctgctattgttggaagaacaggaaagtcaggctcaccatgtaactttttacaataagctgcgtaagatcagcactagaaggttgtgaattgtgatcgtccttagggaattttgtgctgatgtaaccctttcggcaagtgattctcatacaatataatctcagactataattggtaattgtttgatatccttggcctagcatctgaa

SEQ ID NO: 21057 - DNA, 1261 bp, Zea Mays
agtagtcatcgacgtcgtcccgaccttcttttcaatcccgtctcggattcgttccgtctcagctaccgcgaccacgacgccgacgcgagagggcagggaacacagccactcgccgacgagaccccggcgcgcgcgagagaaagagaagagaggaggatcttttgttcgtgaaaaatattggaggcggagggaaggtgaaggagggggatcggagatgaacgtgttccggctggcgggggacatgacccacctcctcagcgtggtagtgctgctcctcaagatccataccatcaagtcctgcgcagataacattgctcctgagaagacccatcaaggaggaatatgttgacttgttgaggcatatctctgaagacacaggagctgtatgcacttgtttttgcagcacggtacctggacctgtttgttcattttgtgtctctgtataacactgtcatgaagctggtcttcttggcaagttctttctcgatagtttggtacatgaagcggcataagattgtgcggaggacatatgacaaggatcatgacacctttcgccattacgttttagtgttgccttgtcttcttctggctctcctcattaatgagaagtttacttttagagaggtgatgtgggcattctccatttatttggaagctgtcgcgatatttccacaacttgtgttgctacagcggacaaggaatattgacaacctgactggccaatatgtcttcttcttgggtgcctaccgtgtgctttatatccttaactggatttaccgatacttcactgagccccattttgtccactggataagttggatggcaggaatagtgcaaactctgttgtatgctgacttcttcttttattacataatgagctggaagaacaatgtgaagctagagctgccagcttaaggttgctgctcctgtccccaagatatagtagggtaatatatcagataggcaggccccatacacagcatgatcattgctatcgccaactgggttatgaaaaaagcattttagttgcgtggcttgtatcgccttgtatctctctgctattgttggaagaacaggaaagtcaggctcaccatgtaactttttacaataagctgcgtaagatcagcactagaaggttgtgaattgtgatcgtccttagggaattttgtgctgatgtaaccctttcggcaagtgattctcatacaatataatctcagactataattggtaattgtttgatatccttggcctagcatctgaa

SEQ ID NO: 21058 - DNA, 1916 bp, Zea Mays
atgaagactaggtttcaaataaggcgtgagaagaaagggaaaagttttgaccctttggtcattgaagagtttatttgggacaatgagtgggctgactcatcacatgtacaccctcaaggtactcgtgggtgtgagtgtgtccaggatggtcttacatgggaggttattgatgaagctcttggtgcatcaagctcactccgaggccgcaatcttccaaggaatgctagcagaggcttggtgattgggacaattgaagagagcatatatcaagatgacatgatgtttgtgaaatgcttctgtaggaatgacagcagaaagcagtcctacacctacagcactacagtagttcttgatcaccggagttggtcagaggtcagagatgagtcgctggagttgatcatgacggactggcgcctctgtcggttcttgatcaggactcagaagttggtcgggggaagggggggatgggttcgacaggaggagcagccggccaggaaggaggacgggagaagatcagaagacagagtgacagacgagacagagagatgaatactgaaaactgaaaaaaaggaaagtaaattcggttttggaaactggaaacaacgcgccaatcaacaattaaatggttttggaaactggaagcgacgcgccaatcaacaattaatgtggtccctacatggaaacgaggaggcacccaaaaattaggtcccagatgcgcaccctttccatttccaggttccaagtcgcaacagacaagaactggacgactaatcgcgattaagggacgattagaccacctaatcgggtcggtgaccctaatcggctacgtgtgaccgaccagaccgattaatcgcgattaatcgcggtaaatcgaacgatttgaaaaccctggccacgcttcgccttaccgccttaataaccatggcaaaatgacatgtccacaaccaaggccactagcaggggaggtaagctcgtgccgccgcagaggagggcaggaggcgatgacaggaccacagtggctgacaggagcaaggcacagaggcgggggggcatgaggtggaggacacctggacagttttagagctttagatcaagtgtttttccaagcgtgggatgggcttgaattccataaagcactaaaacgtggcctttttgcagcccaaagcgcttaaaacgagctctttatgtttttttgtgaaacgatgcagctctttacgccctcagtagcgctttagcactttaccgcttaaaaggcgcttaagcgactttttaataacattggtggtttgtttcttgttgatggaaagatgtcacggcttctcgcatatggaacacaaataagtgaaccatgtttgtgtaaggataaatcgctcagcctcttaacttgaattcataacatggtagcattgactttcttccatgtattagtttccagattttactttaaagtcaatgcaaagcatctggagattgaacaacaccatattgtctcagttcaatttaagaccaaaagctacttttttgtgctactttcttcatatttatagtcatttgaagaagtgttcttggcaaatatggatgcaaactgtaaagaatatttaataaaattgactaggattgatgttttatttaatgtgttcaggaaagtgaatatatcagtgtacagtaatatagtatatgaactagaaccaccttgaaagacagttatccatattccattattccatatggaacagcaaggaatcataagaaggtagacaggtcatcgtaaaatacaatgattaagctatgcagaaactatcaaaacaaaaagccactgcgcaaagaggtgcagaggcatttgaaagtgatagatccagataaggttattattttggtgatcgtattccacagtatatagttcaaaagaatgtgac

SEQ ID NO: 21059 - DNA, 1774 bp, Zea Mays
tctaccttttctttgtagattgtacctgcaccggttagagttggagaagaccaacccccaccgtcttgggacccggtaccatccccgagaggtactttttgggacttggtacccccattttttgcaatgagtatggggttaatggagcacattaggaagagaagacaggaggatgatgatgatatgatgatgttattccttcctgcattacatttgctgcattctagttctcttaaagggaggagagttaagaaacgacgacacacatccaagctaagtggcgaggagcatgttttagagttgcttgaagggcatgtcaagaactgtcgagtagcattcagaatggaacctggaatttttagagccctagccagctatcttaggaaggaaagtgcaacaaagaagccttctcctaaagctgttgatccaagaaaacatggaggttctccaaaagagaaattaagagcctcttggaactcaactctagagaagactcttgtggacctgttgcatgagcacaagatagctgattataggggtcaaaatggatggacaacagaagcatggaacaaaattgtcaaggaatttcatcagagggaacaatatgtctatttcacaaagacacaaatacaagataaggaaagagaattgaaaagggactataggttgctaaaggatgcaaagaatcaaagtggagctcattttgatgagaagacagggaggattacggctgacccagctttatggaaaaatatactgacttctcatcctaaggctaaaaagttccgcaacaagtcttttcctctatatgaggccttgggggagctttatgatgggcaaacagctgaagggacctacaactacacctccacccaacttcccgatcttactcaagtaggaaatagagatgagtttctcaacatacaacatgaacaagatgaagtggaagaaaccttgccggcacatgaagaagatgatgtccatgttgttgaggcaggagatgcaacaggtgaaaggcatgatccggtgccgcagagaaggactactgctacaagagggaacaatgaagaaacaaggacaaagaggcataaaaagggcgataacctagaaggaataatgggaagatacattgacatgagaatgaagcaagctgaggaagaagacacacaactagcaaaagagagggaggaaaaggaagtgagtcaagctgcagacttctcaatcaagaagtgcatatccattattggtacaatggaagttacaaaggaggaaaaagcgaaagcctacaatgtcttcaaggaccttgacaacaggcaaattttcttgagtgcatgcgatgatgatgtcgagtctgcactgatttggctgagaaacgagatggcttagctggtggagtcctctgaattgcttgttggatagacagtatgttatattgttcaaatgaaacattagctatctccctttggtttgttcttaatctaaatgcacacactctattgtaatgtaataagagacaatgagtggccaacttctgattttgatgcttcaaatttcatccgcttcacagacctaatacgatgggcactgatctttttatatgcatgcaacaaattaatgtatccatgtggtgtaaccaaacaatggaaaattagccatgtattaaattccagctgtaattgaaacacacatggtttaagtgacatgggatggattcactcaatcccaccgtgtattggattccaatatgtattaaatactagcgtgtcgaacaagg

SEQ ID NO: 21060 - DNA, 939 bp, Zea Mays
ctggatcctaatgggtgattttaacctcatctacagagatgaagacaagagctctggcaattttaacaggcagcttatggagagattcagaaggttcattaatgatctaggtttaaaagaattggctctgcatggtcggaaattcacttggtctaatcgccaagatacgcctactctcgtcaaacttgacagaatgttttgctcatcagattgggagcagctttttcctaatagtcttctgcaaagtgctagcacaggttcggatcattgccctttgcttcttgggctccaggttttgacgcatggccgcagcagatttcattttgaatcccattggacaaaattgcctgattttattacgacaatggaggctgcttggaattctgttccttcctccccttgcccttttgaaaccctttccaagaagtttagagccaccgtcaggcgtctccaaaggtggtctcaaaaaagggtgggtcatatctcctctcagcttgggatggcgcgggaaattatgcacaagctgcagtctgctcaagataacagacccttgtctgtgctagaaaattggttgttgaagcagcttgattgtcacattgtggccctttcaaccttgcaacgttctatggctcggagccgctctaggatcaccttgttggttgagggggatgttaatactgccttcttccacctccacgctaaataccgcaagaattttattggtaacttgttatccgacaatggtttgataaagtcaaggcatgaggacaaggaggaaactctaagtgatttttccacaatctgctgagatgttcgtctgaccgagttcatactattgatttagatcatctccaaattcctactcatgatctctcttcgctggatagccctttcacggaagatgaagtctggaaaacagtcttatctctaccttcaaac

SEQ ID NO: 21061 - DNA, 2886 bp, Zea Mays
atggcagcgctgtcgtgcgcgtgtagccgcatggcaggcccgagctgccgctgcccgcttgctggtgcctcctccggcatcgtggtggacacgatggcagcactggcgtgtgcgtgcggccgcgtgtttaagggttataggtcgcacaccatggcgcctatattgaatttactgcttatacaaataagaagaggtatcatggcaataattctgaaggtgtacaaagtgcggctgtcacctggtctgccgtctgcctatacccaattgcctatacaccgccttcttttgaggctatccgcaccgatgaactgtaaagaatactctaccgatataagggtgatttactttgactgccttaatactgcatacatactggagcgtgaagagagacgcaagagactaaagagagagcagcaggatgatgggtcaaggctacattcccagcagattaggaatgattatgctcctcaacccaaaagacatagtcgcattaaagaggcacctcagggctggctggactgccctgcatttggggaaccaatagataaaatcataccatctaaagttcctcttgacgaaacattcaatgagtcagtgcctcctgggaagcggtactcctcaaagcaactagttaacaaacaaagaaaagctggccgcgaaataggtctggtgattgatttgacaaataccacccgatattattcaccagcagaatggacgaagcaaggtactaagtatgcgaagattgcatgcaaggggagagatgctgtacctgacaatgaatctgttaataagtttgtctatgaggcaatgatgttccttgatcgacaaaaacaatcaaagaatcctaaatatattctggttcactgtacccatggtcataatcgtacaggtttcatgattattcattaccttatgcgcacacacgtctcttgtgttgctgaggcgattagtatatttgctcaaaggcggccacctggcatatacaagagggactatattgaagcattgtattcattttaccatgaggttcctgacaatatgatgatagcatgccctccaacaccagaatggaagagaccagatgatctcgatttaaatggcgaagctaagcaggatgacgatgatgacaatggtgatcctggaccactgcataatgaatcagaggataaagtcatcaccaatgacgatgtgttaggggatgaagtgccatatgaccagcaagaagctttgcgtgtcctatgttatcggttgcttgaaatgcctcttggaagggggcatgcacactttcctggatcacatccagtttctcttaacagtgaaaatctgcaactacttagacagcgatactactatgctacatggaaagctgacggaacacgttatatgatgcttataatgagacatggttgtttcttgattgatcggaattttagctttagaagggttcagatgcgctttccccataggagcctccaaggtctgcaagatatgaccttgattgatggagagatgattatagacacagtaccagattcaggcttgaagagacggtacttggcatatgatcttatggcgcttggctcagtgtccaaaactaggttgccattttctgaaaggtggaaaatgctggaagatgaaataatacagccgcgtaataatgagaaaggccttgagcgtggtgctaagagcaatccgttgtacaaatatgacatggaactattttcggttaggagaaaggctttttgggtgctattaacagtaaaaaaggttcttaaggtgtttattccatcgctatgccatgatgctgatggccttatatttcagggctgggatgatccatatgtaactcgtactcatgaaggtcttctaaagtggaaataccctgagatgaattctgttgactttctgtttgagcttacaaatgataatcgtcagctggttttcctatatgagagaggaaaaaagaaacttatggatggtgctcggatatcatttactgatgatgtagatccatcttctgtcgctgggaggattgtcgagtgctcttggaacaaggaagaacagtgttgggcatgtatgcgtattagatctgataaatcaactccaaacgacatcaacacataccggaaggtgatgaggagtatcacagataacattaccgaggagaagcttctcgaagagactgatgagataacgctcctgccgatgtatgccgataggatgaatgttcgtgttcatacaaagatggcacaacacaggcgaagattgccaccacagtgctagtctcgttgctagagtgctgggtcgctctcctagccagcggctggcttctgtagctgtgtaattagtagaggtttcagtagcccccccccccccccccccctatgatgatggccagccaactaattctttgcacttcatttgtgtcttgtcccctgccctcacacctacctgtataggcttccctgtaaattgtgtgctctatgttcctccatattctcccctatggttttatttttcatgggtgtagaatagcgtttaacaaggcgggtggtgttctatgtaggcgttgccatctctcggtgctgcctcgtgctagaataatgtagggtgtactggcgataccatgtggttgcgatatatggcttggttttagtgttttggtttgtgcgcacctgatccgatcctttgtccaacgaagattttttccccttatttttgggtaaaaaaggacgtcaatgttaccactctatggtatagtgcttttttgttcacatggttagatcatgtactgcgtggtccattttttctctttagtgtccgccactttgtggcgattgttcatagcaatttttctaactgttcataacaaactgggtgcag

SEQ ID NO: 21062 - DNA, 2933 bp, Zea Mays
ctagttcacctggccatctcataaatcccccgccctctcctgaccacggccccgactggagactgctgttcccctcgaccctcgtccgtccgtccgtccgtcacctgacggctcccaaaccctaccccgcagatccctccccttcctctacccccgcctcgccgccggtcttcgtcacccgtcgccgtgcccgtcggcgcggtgttaagggtccgctacgctgcacctcgcggggagaaaggggtgggcctcggggacctccgccctccgcgcaaggtcattgaatgaccttctatacgaatatggatttgaatgcatcaccggtgcctgacgatgatgagcaacagccttatgatgattcagttgaggttgggtatgctcagacggaacatgttgaatctgctgttgcaacattgcgccgggagcgtgaagagagacgcaagagactaaagagagagcagcaggatgatgggtcaaggctacattcccagcagattaggaatgattatgctcctcaacccaaaagacatagtcgcattaaagaggcacctcagggctggctggactgccctgcatttggggaaccaatagataaaatcataccatctaaagttcctcttgacgaaacattcaatgagtcagtgcctcctgggaagcggtactcctcaaagcaactagttaacaaacaaagaaaagctggccgcgaaataggtctggtgattgatttgacaaataccacccgatattattcaccagcagaatggacgaagcaaggtactaagtatgcgaagattgcatgcaaggggagagatgctgtacctgacaatgaatctgttaataagtttgtctatgaggcaatgatgttccttgatcgacaaaaacaatcaaagaatcctaaatatattctggttcactgtacccatggtcataatcgtacaggtttcatgattattcattaccttatgcgcacacacgtctcttgtgttgctgaggcgattagtatatttgctcaaaggcggccacctggcatatacaagagggactatattgaagcattgtattcattttaccatgaggttcctgacaatatgatgatagcatgccctccaacaccagaatggaagagaccagatgatctcgatttaaatggcgaagctaagcaggatgacgatgatgacaatggtgatcctggaccactgcataatgaatcagaggataaagtcatcaccaatgacgatgtgttaggggatgaagtgccatatgaccagcaagaagctttgcgtgtcctatgttatcggttgcttgaaatgcctcttggaagggggcatgcacactttcctggatcacatccagtttctcttaacagtgaaaatctgcaactacttagacagcgatactactatgctacatggaaagctgacggaacacgttatatgatgcttataatgagacatggttgtttcttgattgatcggaattttagctttagaagggttcagatgcgctttccccataggagcctccaaggtctgcaagatatgaccttgattgatggagagatgattatagacacagtaccagattcaggcttgaagagacggtacttggcatatgatcttatggcgcttggctcagtgtccaaaactaggttgccattttctgaaaggtggaaaatgctggaagatgaaataatacagccgcgtaataatgagaaaggccttgagcgtggtgctaagagcaatccgttgtacaaatatgacatggaactattttcggttaggagaaaggctttttgggtgctattaacagtaaaaaaggttcttaaggtgtttattccatcgctatgccatgatgctgatggccttatatttcagggctgggatgatccatatgtaactcgtactcatgaaggtcttctaaagtggaaataccctgagatgaattctgttgactttctgtttgagcttacaaatgataatcgtcagctggttttcctatatgagagaggaaaaaagaaacttatggatggtgctcggatatcatttactgatgatgtagatccatcttctgtcgctgggaggattgtcgagtgctcttggaacaaggaagaacagtgttgggcatgtatgcgtattagatctgataaatcaactccaaacgacatcaacacataccggaaggtgatgaggagtatcacagataacattaccgaggagaagcttctcgaagagactgatgagataacgctcctgccgatgtatgccgataggatgaatgttcgtgttcatacaaagatggcacaacacaggcgaagattgccaccacagtgctagtctcgttgctagagtgctgggtcgctctcctagccagcggctggcttctgtagctgtgtaattagtagaggtttcagtagcccccccccccccccccccctatgatgatggccagccaactaattctttgcacttcatttgtgtcttgtcccctgccctcacacctacctgtataggcttccctgtaaattgtgtgctctatgttcctccatattctcccctatggttttatttttcatgggtgtagaatagcgtttaacaaggcgggtggtgttctatgtaggcgttgccatctctcggtgctgcctcgtgctagaataatgtagggtgtactggcgataccatgtggttgcgatatatggcttggttttagtgttttggtttgtgcgcacctgatccgatcctttgtccaacgaagattttttccccttatttttgggtaaaaaaggacgtcaatgttaccactctatggtatagtgcttttttgttcacatggttagatcatgtactgcgtggtccattttttctctttagtgtccgccactttgtggcgattgttcatagcaatttttctaactgttcataacaaactgggtgcag

SEQ ID NO: 21063 - DNA, 1031 bp, Zea Mays
ctcataaatcccccgccctctcctgaccacggccccgactggagactgctgttcccctcgaccctcgtccgtccgtccgtccgtcacctgacggctcccaaaccctaccccgcagatccctccccttcctctacccccgcctcgccgccggtcttcgtcacccgtcgccgtgcccgtcggcgcggtgttaagggtccgctacgctgcacctcgcggggagaaaggggtgggcctcggggacctccgccctccgcgcaaggtcattgaatgaccttctatacgaatatggatttgaatgcatcaccggtgcctgacgatgatgagcaacagccttatgatgattcagttgaggttgggtatgctcagacggaacatgttgaatctgctgttgcaacattgcgccgggagcgtgaagagagacgcaagagactaaagagagagcagcaggatgatgggtcaaggctacattcccagcagattaggaatgattatgctcctcaacccaaaagacatagtcgcattaaagaggcacctcagggctggctggactgccctgcatttggggaaccaatagataaaatcataccatctaaagttcctcttgacgaaacattcaatgagtcagtgcctcctgggaagcggtactcctcaaagcaactagttaacaaacaaagaaaagctggccgcgaagttgtcggtggtgtcgaggattgggaggcagcatccagtggatgacatagatagctagggtgtagacatgtctttagttgattattagtcgctgactgcgctcgtggttgtggttcattggcactcctatttagttctgatatcctatggccatcctctttgcctagagagtagacaccctgcataaatagtggcatgtattcactattccatatgcacataaatgacaaatcacttatgctccgtttggatgtcgatattggagaggatggaattgaattgtgctgaatagcaaatctggcatggtattgaaatgagatgtaattccaattctattgttt

SEQ ID NO: 21064 - DNA, 2835 bp, Zea Mays
ccccgccctctcctgaccacggccccgactggagactgctgttcccctcgaccctcgtccgtccgtccgtccgtcacctgacggctcccaaaccctaccccgcagatccctccccttcctctacccccgcctcgccgccggtcttcgtcacccgtcgccgtgcccgtcggcgcggtgttaagggtccgctacgctgcacctcgcggggagaaaggggtgggcctcggggacctccgccctccgcgcaagccttatgatgattcagttgaggttgggtatgctcagacggaacatgttgaatctgctgttgcaacattgcgccgggagcgtgaagagagacgcaagagactaaagagagagcagcaggatgatgggtcaaggctacattcccagcagattaggaatgattatgctcctcaacccaaaagacatagtcgcattaaagaggcacctcagggctggctggactgccctgcatttggggaaccaatagataaaatcataccatctaaagttcctcttgacgaaacattcaatgagtcagtgcctcctgggaagcggtactcctcaaagcaactagttaacaaacaaagaaaagctggccgcgaaataggtctggtgattgatttgacaaataccacccgatattattcaccagcagaatggacgaagcaaggtactaagtatgcgaagattgcatgcaaggggagagatgctgtacctgacaatgaatctgttaataagtttgtctatgaggcaatgatgttccttgatcgacaaaaacaatcaaagaatcctaaatatattctggttcactgtacccatggtcataatcgtacaggtttcatgattattcattaccttatgcgcacacacgtctcttgtgttgctgaggcgattagtatatttgctcaaaggcggccacctggcatatacaagagggactatattgaagcattgtattcattttaccatgaggttcctgacaatatgatgatagcatgccctccaacaccagaatggaagagaccagatgatctcgatttaaatggcgaagctaagcaggatgacgatgatgacaatggtgatcctggaccactgcataatgaatcagaggataaagtcatcaccaatgacgatgtgttaggggatgaagtgccatatgaccagcaagaagctttgcgtgtcctatgttatcggttgcttgaaatgcctcttggaagggggcatgcacactttcctggatcacatccagtttctcttaacagtgaaaatctgcaactacttagacagcgatactactatgctacatggaaagctgacggaacacgttatatgatgcttataatgagacatggttgtttcttgattgatcggaattttagctttagaagggttcagatgcgctttccccataggagcctccaaggtctgcaagatatgaccttgattgatggagagatgattatagacacagtaccagattcaggcttgaagagacggtacttggcatatgatcttatggcgcttggctcagtgtccaaaactaggttgccattttctgaaaggtggaaaatgctggaagatgaaataatacagccgcgtaataatgagaaaggccttgagcgtggtgctaagagcaatccgttgtacaaatatgacatggaactattttcggttaggagaaaggctttttgggtgctattaacagtaaaaaaggttcttaaggtgtttattccatcgctatgccatgatgctgatggccttatatttcagggctgggatgatccatatgtaactcgtactcatgaaggtcttctaaagtggaaataccctgagatgaattctgttgactttctgtttgagcttacaaatgataatcgtcagctggttttcctatatgagagaggaaaaaagaaacttatggatggtgctcggatatcatttactgatgatgtagatccatcttctgtcgctgggaggattgtcgagtgctcttggaacaaggaagaacagtgttgggcatgtatgcgtattagatctgataaatcaactccaaacgacatcaacacataccggaaggtgatgaggagtatcacagataacattaccgaggagaagcttctcgaagagactgatgagataacgctcctgccgatgtatgccgataggatgaatgttcgtgttcatacaaagatggcacaacacaggcgaagattgccaccacagtgctagtctcgttgctagagtgctgggtcgctctcctagccagcggctggcttctgtagctgtgtaattagtagaggtttcagtagcccccccccccccccccccctatgatgatggccagccaactaattctttgcacttcatttgtgtcttgtcccctgccctcacacctacctgtataggcttccctgtaaattgtgtgctctatgttcctccatattctcccctatggttttatttttcatgggtgtagaatagcgtttaacaaggcgggtggtgttctatgtaggcgttgccatctctcggtgctgcctcgtgctagaataatgtagggtgtactggcgataccatgtggttgcgatatatggcttggttttagtgttttggtttgtgcgcacctgatccgatcctttgtccaacgaagattttttccccttatttttgggtaaaaaaggacgtcaatgttaccactctatggtatagtgcttttttgttcacatggttagatcatgtactgcgtggtccattttttctctttagtgtccgccactttgtggcgattgttcatagcaatttttctaactgttcataacaaactgggtgcag

SEQ ID NO: 21065 - DNA, 1034 bp, Zea Mays
cgactggagactgctgttcccctcgaccctcgtccgtccgtccgtccgtcacctgacggctcccaaaccctaccccgcagatccctccccttcctctacccccgcctcgccgccggtcttcgtcacccgtcgccgtgcccgtcggcgcggtgttaagggtccgctacgctgcacctcgcggggagaaaggggtgggcctcggggacctccgccctccgcgcaaggtgcaagtccaaaagaactgactacatcatatatgtaggtcattgaatgaccttctatacgaatatggatttgaatgcatcaccggtgcctgacgatgatgagcaacagccttatgatgattcagttgaggttgggtatgctcagacggaacatgttgaatctgctgttgcaacattgcgccgggagcgtgaagagagacgcaagagactaaagagagagcagcaggatgatgggtcaaggctacattcccagcagattaggaatgattatgctcctcaacccaaaagacatagtcgcattaaagaggcacctcagggctggctggactgccctgcatttggggaaccaatagataaaatcataccatctaaagttcctcttgacgaaacattcaatgagtcagtgcctcctgggaagcggtactcctcaaagcaactagttaacaaacaaagaaaagctggccgcgaagttgtcggtggtgtcgaggattgggaggcagcatccagtggatgacatagatagctagggtgtagacatgtctttagttgattattagtcgctgactgcgctcgtggttgtggttcattggcactcctatttagttctgatatcctatggccatcctctttgcctagagagtagacaccctgcataaatagtggcatgtattcactattccatatgcacataaatgacaaatcacttatgctccgtttggatgtcgatattggagaggatggaattgaattgtgctgaatagcaaatctggcatggtattgaaatgagatgtaattccaattctattgttt

SEQ ID NO: 21066 - DNA, 850 bp, Zea Mays
cgactggagactgctgttcccctcgaccctcgtccgtccgtccgtccgtcacctgacggctcccaaaccctaccccgcagatccctccccttcctctacccccgcctcgccgccggtcttcgtcacccgtcgccgtgcccgtcggcgcggtgttaagggtccgctacgctgcacctcgcggggagaaaggggtgggcctcggggacctccgccctccgcgcaaggagcgtgaagagagacgcaagagactaaagagagagcagcaggatgatgggtcaaggctacattcccagcagattaggaatgattatgctcctcaacccaaaagacatagtcgcattaaagaggcacctcagggctggctggactgccctgcatttggggaaccaatagataaaatcataccatctaaagttcctcttgacgaaacattcaatgagtcagtgcctcctgggaagcggtactcctcaaagcaactagttaacaaacaaagaaaagctggccgcgaagttgtcggtggtgtcgaggattgggaggcagcatccagtggatgacatagatagctagggtgtagacatgtctttagttgattattagtcgctgactgcgctcgtggttgtggttcattggcactcctatttagttctgatatcctatggccatcctctttgcctagagagtagacaccctgcataaatagtggcatgtattcactattccatatgcacataaatgacaaatcacttatgctccgtttggatgtcgatattggagaggatggaattgaattgtgctgaatagcaaatctggcatggtattgaaatgagatgtaattccaattctattgttt

SEQ ID NO: 21067 - DNA, 2916 bp, Zea Mays
ctggagactgctgttcccctcgaccctcgtccgtccgtccgtccgtcacctgacggctcccaaaccctaccccgcagatccctccccttcctctacccccgcctcgccgccggtcttcgtcacccgtcgccgtgcccgtcggcgcggtgttaagggtccgctacgctgcacctcgcggggagaaaggggtgggcctcggggacctccgccctccgcgcaaggtgcaagtccaaaagaactgactacatcatatatgtaggtcattgaatgaccttctatacgaatatggatttgaatgcatcaccggtgcctgacgatgatgagcaacagccttatgatgattcagttgaggttgggtatgctcagacggaacatgttgaatctgctgttgcaacattgcgccgggagcgtgaagagagacgcaagagactaaagagagagcagcaggatgatgggtcaaggctacattcccagcagattaggaatgattatgctcctcaacccaaaagacatagtcgcattaaagaggcacctcagggctggctggactgccctgcatttggggaaccaatagataaaatcataccatctaaagttcctcttgacgaaacattcaatgagtcagtgcctcctgggaagcggtactcctcaaagcaactagttaacaaacaaagaaaagctggccgcgaaataggtctggtgattgatttgacaaataccacccgatattattcaccagcagaatggacgaagcaaggtactaagtatgcgaagattgcatgcaaggggagagatgctgtacctgacaatgaatctgttaataagtttgtctatgaggcaatgatgttccttgatcgacaaaaacaatcaaagaatcctaaatatattctggttcactgtacccatggtcataatcgtacaggtttcatgattattcattaccttatgcgcacacacgtctcttgtgttgctgaggcgattagtatatttgctcaaaggcggccacctggcatatacaagagggactatattgaagcattgtattcattttaccatgaggttcctgacaatatgatgatagcatgccctccaacaccagaatggaagagaccagatgatctcgatttaaatggcgaagctaagcaggatgacgatgatgacaatggtgatcctggaccactgcataatgaatcagaggataaagtcatcaccaatgacgatgtgttaggggatgaagtgccatatgaccagcaagaagctttgcgtgtcctatgttatcggttgcttgaaatgcctcttggaagggggcatgcacactttcctggatcacatccagtttctcttaacagtgaaaatctgcaactacttagacagcgatactactatgctacatggaaagctgacggaacacgttatatgatgcttataatgagacatggttgtttcttgattgatcggaattttagctttagaagggttcagatgcgctttccccataggagcctccaaggtctgcaagatatgaccttgattgatggagagatgattatagacacagtaccagattcaggcttgaagagacggtacttggcatatgatcttatggcgcttggctcagtgtccaaaactaggttgccattttctgaaaggtggaaaatgctggaagatgaaataatacagccgcgtaataatgagaaaggccttgagcgtggtgctaagagcaatccgttgtacaaatatgacatggaactattttcggttaggagaaaggctttttgggtgctattaacagtaaaaaaggttcttaaggtgtttattccatcgctatgccatgatgctgatggccttatatttcagggctgggatgatccatatgtaactcgtactcatgaaggtcttctaaagtggaaataccctgagatgaattctgttgactttctgtttgagcttacaaatgataatcgtcagctggttttcctatatgagagaggaaaaaagaaacttatggatggtgctcggatatcatttactgatgatgtagatccatcttctgtcgctgggaggattgtcgagtgctcttggaacaaggaagaacagtgttgggcatgtatgcgtattagatctgataaatcaactccaaacgacatcaacacataccggaaggtgatgaggagtatcacagataacattaccgaggagaagcttctcgaagagactgatgagataacgctcctgccgatgtatgccgataggatgaatgttcgtgttcatacaaagatggcacaacacaggcgaagattgccaccacagtgctagtctcgttgctagagtgctgggtcgctctcctagccagcggctggcttctgtagctgtgtaattagtagaggtttcagtagcccccccccccccccccccctatgatgatggccagccaactaattctttgcacttcatttgtgtcttgtcccctgccctcacacctacctgtataggcttccctgtaaattgtgtgctctatgttcctccatattctcccctatggttttatttttcatgggtgtagaatagcgtttaacaaggcgggtggtgttctatgtaggcgttgccatctctcggtgctgcctcgtgctagaataatgtagggtgtactggcgataccatgtggttgcgatatatggcttggttttagtgttttggtttgtgcgcacctgatccgatcctttgtccaacgaagattttttccccttatttttgggtaaaaaaggacgtcaatgttaccactctatggtatagtgcttttttgttcacatggttagatcatgtactgcgtggtccattttttctctttagtgtccgccactttgtggcgattgttcatagcaatttttctaactgttcataacaaactgggtgcag

SEQ ID NO: 21068 - DNA, 2841 bp, Zea Mays
ctgctgttcccctcgaccctcgtccgtccgtccgtccgtcacctgacggctcccaaaccctaccccgcagatccctccccttcctctacccccgcctcgccgccggtcttcgtcacccgtcgccgtgcccgtcggcgcggtgttaagggtccgctacgctgcacctcgcggggagaaaggggtgggcctcggggacctccgccctccgcgcaaggagcgtgaagagagacgcaagagactaaagagagagcagcaggatgatgggtcaaggctacattcccagcagattaggaatgattatgctcctcaacccaaaagacatagtcgcattaaagaggcacctcagggctggctggactgccctgcatttggggaaccaatagataaaatcataccatctaaagttcctcttgacgaaacattcaatgagtcagtgcctcctgggaagcggtactcctcaaagcaactagttaacaaacaaagaaaagctggccgcgaaataggtctggtgattgatttgacaaataccacccgatattattcaccagcagaatggacgaagcaaggtactaagtatgcgaagattgcatgcaaggggagagatgctgtacctgacaatgaatctgttaataagtttgtctatgaggcaatgatgttccttgatcgacaaaaacaatcaaagaatcctaaatatattctggttcactgtacccatggtcataatcgtacaggtttcatgattattcattaccttatgcgcacacacgtctcttgtgttgctgaggtagggatacttagacccaaaatgatatttgattgattctattgtccagtattccatgacttctttttctaggcgattagtatatttgctcaaaggcggccacctggcatatacaagagggactatattgaagcattgtattcattttaccatgaggttcctgacaatatgatgatagcatgccctccaacaccagaatggaagagaccagatgatctcgatttaaatggcgaagctaagcaggatgacgatgatgacaatggtgatcctggaccactgcataatgaatcagaggataaagtcatcaccaatgacgatgtgttaggggatgaagtgccatatgaccagcaagaagctttgcgtgtcctatgttatcggttgcttgaaatgcctcttggaagggggcatgcacactttcctggatcacatccagtttctcttaacagtgaaaatctgcaactacttagacagcgatactactatgctacatggaaagctgacggaacacgttatatgatgcttataatgagacatggttgtttcttgattgatcggaattttagctttagaagggttcagatgcgctttccccataggagcctccaaggtctgcaagatatgaccttgattgatggagagatgattatagacacagtaccagattcaggcttgaagagacggtacttggcatatgatcttatggcgcttggctcagtgtccaaaactaggttgccattttctgaaaggtggaaaatgctggaagatgaaataatacagccgcgtaataatgagaaaggccttgagcgtggtgctaagagcaatccgttgtacaaatatgacatggaactattttcggttaggagaaaggctttttgggtgctattaacagtaaaaaaggttcttaaggtgtttattccatcgctatgccatgatgctgatggccttatatttcagggctgggatgatccatatgtaactcgtactcatgaaggtcttctaaagtggaaataccctgagatgaattctgttgactttctgtttgagcttacaaatgataatcgtcagctggttttcctatatgagagaggaaaaaagaaacttatggatggtgctcggatatcatttactgatgatgtagatccatcttctgtcgctgggaggattgtcgagtgctcttggaacaaggaagaacagtgttgggcatgtatgcgtattagatctgataaatcaactccaaacgacatcaacacataccggaaggatcatgctctctaagacgttcacttcagcaattctcagtgtcagtgatgaggagtatcacagataacattaccgaggagaagcttctcgaagagactgatgagataacgctcctgccgatgtatgccgataggatgaatgttcgtgttcatacaaagatggcacaacacaggcgaagattgccaccacagtgctagtctcgttgctagagtgctgggtcgctctcctagccagcggctggcttctgtagctgtgtaattagtagaggtttcagtagcccccccccccccccccccctatgatgatggccagccaactaattctttgcacttcatttgtgtcttgtcccctgccctcacacctacctgtataggcttccctgtaaattgtgtgctctatgttcctccatattctcccctatggttttatttttcatgggtgtagaatagcgtttaacaaggcgggtggtgttctatgtaggcgttgccatctctcggtgctgcctcgtgctagaataatgtagggtgtactggcgataccatgtggttgcgatatatggcttggttttagtgttttggtttgtgcgcacctgatccgatcctttgtccaacgaagattttttccccttatttttgggtaaaaaaggacgtcaatgttaccactctatggtatagtgcttttttgttcacatggttagatcatgtactgcgtggtccattttttctctttagtgtccgccactttgtggcgattgttcatagcaatttttctaactgttcataacaaactgggtgcag

SEQ ID NO: 21069 - DNA, 2910 bp, Zea Mays
tgctgttcccctcgaccctcgtccgtccgtccgtccgtcacctgacggctcccaaaccctaccccgcagatccctccccttcctctacccccgcctcgccgccggtcttcgtcacccgtcgccgtgcccgtcggcgcggtgttaagggtccgctacgctgcacctcgcggggagaaaggggtgggcctcggggacctccgccctccgcgcaaggtcattgaatgaccttctatacgaatatggatttgaatgcatcaccggtgcctgacgatgatgagcaacagccttatgatgattcagttgaggttgggtatgctcagacggaacatgttgaatctgctgttgcaacattgcgccgggagcgtgaagagagacgcaagagactaaagagagagcagcaggatgatgggtcaaggctacattcccagcagattaggaatgattatgctcctcaacccaaaagacatagtcgcattaaagaggcacctcagggctggctggactgccctgcatttggggaaccaatagataaaatcataccatctaaagttcctcttgacgaaacattcaatgagtcagtgcctcctgggaagcggtactcctcaaagcaactagttaacaaacaaagaaaagctggccgcgaaataggtctggtgattgatttgacaaataccacccgatattattcaccagcagaatggacgaagcaaggtactaagtatgcgaagattgcatgcaaggggagagatgctgtacctgacaatgaatctgttaataagtttgtctatgaggcaatgatgttccttgatcgacaaaaacaatcaaagaatcctaaatatattctggttcactgtacccatggtcataatcgtacaggtttcatgattattcattaccttatgcgcacacacgtctcttgtgttgctgaggcgattagtatatttgctcaaaggcggccacctggcatatacaagagggactatattgaagcattgtattcattttaccatgaggttcctgacaatatgatgatagcatgccctccaacaccagaatggaagagaccagatgatctcgatttaaatggcgaagctaagcaggatgacgatgatgacaatggtgatcctggaccactgcataatgaatcagaggataaagtcatcaccaatgacgatgtgttaggggatgaagtgccatatgaccagcaagaagctttgcgtgtcctatgttatcggttgcttgaaatgcctcttggaagggggcatgcacactttcctggatcacatccagtttctcttaacagtgaaaatctgcaactacttagacagcgatactactatgctacatggaaagctgacggaacacgttatatgatgcttataatgagacatggttgtttcttgattgatcggaattttagctttagaagggttcagatgcgctttccccataggagcctccaaggtctgcaagatatgaccttgattgatggagagatgattatagacacagtaccagattcaggcttgaagagacggtacttggcatatgatcttatggcgcttggctcagtgtccaaaactaggttgccattttctgaaaggtggaaaatgctggaagatgaaataatacagccgcgtaataatgagaaaggccttgagcgtggtgctaagagcaatccgttgtacaaatatgacatggaactattttcggttaggagaaaggctttttgggtgctattaacagtaaaaaaggttcttaaggtgtttattccatcgctatgccatgatgctgatggccttatatttcagggctgggatgatccatatgtaactcgtactcatgaaggtcttctaaagtggaaataccctgagatgaattctgttgactttctgtttgagcttacaaatgataatcgtcagctggttttcctatatgagagaggaaaaaagaaacttatggatggtgctcggatatcatttactgatgatgtagatccatcttctgtcgctgggaggattgtcgagtgctcttggaacaaggaagaacagtgttgggcatgtatgcgtattagatctgataaatcaactccaaacgacatcaacacataccggaaggatcatgctctctaagacgttcacttcagcaattctcagtgtgatgaggagtatcacagataacattaccgaggagaagcttctcgaagagactgatgagataacgctcctgccgatgtatgccgataggatgaatgttcgtgttcatacaaagatggcacaacacaggcgaagattgccaccacagtgctagtctcgttgctagagtgctgggtcgctctcctagccagcggctggcttctgtagctgtgtaattagtagaggtttcagtagcccccccccccccccccccctatgatgatggccagccaactaattctttgcacttcatttgtgtcttgtcccctgccctcacacctacctgtataggcttccctgtaaattgtgtgctctatgttcctccatattctcccctatggttttatttttcatgggtgtagaatagcgtttaacaaggcgggtggtgttctatgtaggcgttgccatctctcggtgctgcctcgtgctagaataatgtagggtgtactggcgataccatgtggttgcgatatatggcttggttttagtgttttggtttgtgcgcacctgatccgatcctttgtccaacgaagattttttccccttatttttgggtaaaaaaggacgtcaatgttaccactctatggtatagtgcttttttgttcacatggttagatcatgtactgcgtggtccattttttctctttagtgtccgccactttgtggcgattgttcatagcaatttttctaactgttcataacaaactgggtgcag

SEQ ID NO: 21070 - DNA, 2870 bp, Zea Mays
ctgttcccctcgaccctcgtccgtccgtccgtccgtcacctgacggctcccaaaccctaccccgcagatccctccccttcctctacccccgcctcgccgccggtcttcgtcacccgtcgccgtgcccgtcggcgcggtgttaagggtccgctacgctgcacctcgcggggagaaaggggtgggcctcggggacctccgccctccgcgcaaggtcattgaatgaccttctatacgaatatggatttgaatgcatcaccggtgcctgacgatgatgagcaacagccttatgatgattcagttgaggttgggtatgctcagacggaacatgttgaatctgctgttgcaacattgcgccgggagcgtgaagagagacgcaagagactaaagagagagcagcaggatgatgggtcaaggctacattcccagcagattaggaatgattatgctcctcaacccaaaagacatagtcgcattaaagaggcacctcagggctggctggactgccctgcatttggggaaccaatagataaaatcataccatctaaagttcctcttgacgaaacattcaatgagtcagtgcctcctgggaagcggtactcctcaaagcaactagttaacaaacaaagaaaagctggccgcgaaataggtctggtgattgatttgacaaataccacccgatattattcaccagcagaatggacgaagcaaggtactaagtatgcgaagagattgcatgcaaggggagagatgctgtacctgacaatgaatctgttaataagtttgtctatgaggcaatgatgttccttgatcgacaaaaacaatcaaagaatcctaaatatattctggttcactgtacccatggtcataatcgtacaggtttcatgattattcattaccttatgcgcacacacgtctcttgtgttgctgaggcgattagtatatttgctcaaaggcggccacctggcatatacaagagggactatattgaagcattgtattcattttaccatgaggttcctgacaatatgatgatagcatgccctccaacaccagaatggaagagaccagatgatctcgatttaaatggcgaagctaagcaggatgacgatgatgacaatggtgatcctggaccactgcataatgaatcagaggataaagtcatcaccaatgacgatgtgttaggggatgaagtgccatatgaccagcaagaagctttgcgtgtcctatgttatcggttgcttgaaatgcctcttggaagggggcatgcacactttcctggatcacatccagtttctcttaacagtgaaaatctgcaactacttagacagcgatactactatgctacatggaaagctgacggaacacgttatatgatgcttataatgagacatggttgtttcttgattgatcggaattttagctttagaagggttcagatgcgctttccccataggagcctccaaggtctgcaagatatgaccttgattgatggagagatgattatagacacagtaccagattcaggcttgaagagacggtacttggcatatgatcttatggcgcttggctcagtgtccaaaactaggttgccattttctgaaaggtggaaaatgctggaagatgaaataatacagccgcgtaataatgagaaaggccttgagcgtggtgctaagagcaatccgttgtacaaatatgacatggaactattttcggttaggagaaaggctttttgggtgctattaacagtaaaaaaggttcttaaggtgtttattccatcgctatgccatgatgctgatggccttatatttcagggctgggatgatccatatgtaactcgtactcatgaaggtcttctaaagtggaaataccctgagatgaattctgttgactttctgtttgagcttacaaatgataatcgtcagctggttttcctatatgagagaggaaaaaagaaacttatggatggtgctcggatatcatttactgatgatgtagatccatcttctgtcgctgggaggattgtcgagtgctcttggaacaaggaagaacagtgttgggcatgtatgcgtattagatctgataaatcaactccaaacgacatcaacacataccggaaggtgatgaggagtatcacagataacattaccgaggagaagcttctcgaagagactgatgagataacgctcctgccgatgtatgccgataggatgaatgttcgtgttcatacaaagatggcacaacacaggcgaagattgccaccacagtgctagtctcgttgctagagtgctgggtcgctctcctagccagcggctggcttctgtagctgtgtaattagtagaggtttcagtagcccccccccccccccccccctatgatgatggccagccaactaattctttgcacttcatttgtgtcttgtcccctgccctcacacctacctgtataggcttccctgtaaattgtgtgctctatgttcctccatattctcccctatggttttatttttcatgggtgtagaatagcgtttaacaaggcgggtggtgttctatgtaggcgttgccatctctcggtgctgcctcgtgctagaataatgtagggtgtactggcgataccatgtggttgcgatatatggcttggttttagtgttttggtttgtgcgcacctgatccgatcctttgtccaacgaagattttttccccttatttttgggtaaaaaaggacgtcaatgttaccactctatggtatagtgcttttttgttcacatggttagatcatgtactgcgtggtccattttttctctttagtgtccgccactttgtggcgattgttcatagcaatttttctaactgttcataacaaactgggtgcag

SEQ ID NO: 21071 - DNA, 2860 bp, Zea Mays
ctgttcccctcgaccctcgtccgtccgtccgtccgtcacctgacggctcccaaaccctaccccgcagatccctccccttcctctacccccgcctcgccgccggtcttcgtcacccgtcgccgtgcccgtcggcgcggtgttaagggtccgctacgctgcacctcgcggggagaaaggggtgggcctcggggacctccgccctccgcgcaaggtcattgaatgaccttctatacgaatatggatttgaatgcatcaccggtgcctgacgatgatgagcaacagccttatgatgattcagttgaggttgggtatgctcagacggaacatgttgaatctgctgttgcaacattgcgccgggagcgtgaagagagacgcaagagactaaagagagagcagcaggatgatgggtcaaggctacattcccagcagattaggaatgattatgctcctcaacccaaaagacatagtcgcattaaagaggcacctcagggctggctggactgccctgcatttggggaaccaatagataaaatcataccatctaaagttcctcttgacgaaacattcaatgagtcagtgcctcctgggaagcggtactcctcaaagcaactagttaacaaacaaagaaaagctggccgcgaaataggtctggtgattgatttgacaaataccacccgatattattcaccagcagaatggacgaagcaaggtactaagtatgcgaagattgcatgcaaggggagagatgctgtacctgacaatgaatctgttaataagtttgtctatgaggcaatgatgttccttgatcgacaaaaacaatcaaagaatcctaaatatattctggttcactgtacccatggtcataatcgtacaggtttcatgattattcattaccttatgcgcacacacgtctcttgtgttgctgagtatatttgctcaaaggcggccacctggcatatacaagagggactatattgaagcattgtattcattttaccatgaggttcctgacaatatgatgatagcatgccctccaacaccagaatggaagagaccagatgatctcgatttaaatggcgaagctaagcaggatgacgatgatgacaatggtgatcctggaccactgcataatgaatcagaggataaagtcatcaccaatgacgatgtgttaggggatgaagtgccatatgaccagcaagaagctttgcgtgtcctatgttatcggttgcttgaaatgcctcttggaagggggcatgcacactttcctggatcacatccagtttctcttaacagtgaaaatctgcaactacttagacagcgatactactatgctacatggaaagctgacggaacacgttatatgatgcttataatgagacatggttgtttcttgattgatcggaattttagctttagaagggttcagatgcgctttccccataggagcctccaaggtctgcaagatatgaccttgattgatggagagatgattatagacacagtaccagattcaggcttgaagagacggtacttggcatatgatcttatggcgcttggctcagtgtccaaaactaggttgccattttctgaaaggtggaaaatgctggaagatgaaataatacagccgcgtaataatgagaaaggccttgagcgtggtgctaagagcaatccgttgtacaaatatgacatggaactattttcggttaggagaaaggctttttgggtgctattaacagtaaaaaaggttcttaaggtgtttattccatcgctatgccatgatgctgatggccttatatttcagggctgggatgatccatatgtaactcgtactcatgaaggtcttctaaagtggaaataccctgagatgaattctgttgactttctgtttgagcttacaaatgataatcgtcagctggttttcctatatgagagaggaaaaaagaaacttatggatggtgctcggatatcatttactgatgatgtagatccatcttctgtcgctgggaggattgtcgagtgctcttggaacaaggaagaacagtgttgggcatgtatgcgtattagatctgataaatcaactccaaacgacatcaacacataccggaaggtgatgaggagtatcacagataacattaccgaggagaagcttctcgaagagactgatgagataacgctcctgccgatgtatgccgataggatgaatgttcgtgttcatacaaagatggcacaacacaggcgaagattgccaccacagtgctagtctcgttgctagagtgctgggtcgctctcctagccagcggctggcttctgtagctgtgtaattagtagaggtttcagtagcccccccccccccccccccctatgatgatggccagccaactaattctttgcacttcatttgtgtcttgtcccctgccctcacacctacctgtataggcttccctgtaaattgtgtgctctatgttcctccatattctcccctatggttttatttttcatgggtgtagaatagcgtttaacaaggcgggtggtgttctatgtaggcgttgccatctctcggtgctgcctcgtgctagaataatgtagggtgtactggcgataccatgtggttgcgatatatggcttggttttagtgttttggtttgtgcgcacctgatccgatcctttgtccaacgaagattttttccccttatttttgggtaaaaaaggacgtcaatgttaccactctatggtatagtgcttttttgttcacatggttagatcatgtactgcgtggtccattttttctctttagtgtccgccactttgtggcgattgttcatagcaatttttctaactgttcataacaaactgggtgcag

SEQ ID NO: 21072 - DNA, 2254 bp, Zea Mays
agcccctcctcctaactatcatgtgaagataggtctggtgattgatttgacaaataccacccgatattattcaccagcagaatggacgaagcaaggtactaagtatgcgaagattgcatgcaaggggagagatgctgtacctgacaatgaatctgttaataagtttgtctatgaggcaatgatgttccttgatcgacaaaaacaatcaaagaatcctaaatatattctggttcactgtacccatggtcataatcgtacaggtttcatgattattcattaccttatgcgcacacacgtctcttgtgttgctgaggcgattagtatatttgctcaaaggcggccacctggcatatacaagagggactatattgaagcattgtattcattttaccatgaggttcctgacaatatgatgatagcatgccctccaacaccagaatggaagagaccagatgatctcgatttaaatggcgaagctaagcaggatgacgatgatgacaatggtgatcctggaccactgcataatgaatcagaggataaagtcatcaccaatgacgatgtgttaggggatgaagtgccatatgaccagcaagaagctttgcgtgtcctatgttatcggttgcttgaaatgcctcttggaagggggcatgcacactttcctggatcacatccagtttctcttaacagtgaaaatctgcaactacttagacagcgatactactatgctacatggaaagctgacggaacacgttatatgatgcttataatgagacatggttgtttcttgattgatcggaattttagctttagaagggttcagatgcgctttccccataggagcctccaaggtctgcaagatatgaccttgattgatggagagatgattatagacacagtaccagattcaggcttgaagagacggtacttggcatatgatcttatggcgcttggctcagtgtccaaaactaggttgccattttctgaaaggtggaaaatgctggaagatgaaataatacagccgcgtaataatgagaaaggccttgagcgtggtgctaagagcaatccgttgtacaaatatgacatggaactattttcggttaggagaaaggctttttgggtgctattaacagtaaaaaaggttcttaaggtgtttattccatcgctatgccatgatgctgatggccttatatttcagggctgggatgatccatatgtaactcgtactcatgaaggtcttctaaagtggaaataccctgagatgaattctgttgactttctgtttgagcttacaaatgataatcgtcagctggttttcctatatgagagaggaaaaaagaaacttatggatggtgctcggatatcatttactgatgatgtagatccatcttctgtcgctgggaggattgtcgagtgctcttggaacaaggaagaacagtgttgggcatgtatgcgtattagatctgataaatcaactccaaacgacatcaacacataccggaaggtgatgaggagtatcacagataacattaccgaggagaagcttctcgaagagactgatgagataacgctcctgccgatgtatgccgataggatgaatgttcgtgttcatacaaagatggcacaacacaggcgaagattgccaccacagtgctagtctcgttgctagagtgctgggtcgctctcctagccagcggctggcttctgtagctgtgtaattagtagaggtttcagtagcccccccccccccccccccctatgatgatggccagccaactaattctttgcacttcatttgtgtcttgtcccctgccctcacacctacctgtataggcttccctgtaaattgtgtgctctatgttcctccatattctcccctatggttttatttttcatgggtgtagaatagcgtttaacaaggcgggtggtgttctatgtaggcgttgccatctctcggtgctgcctcgtgctagaataatgtagggtgtactggcgataccatgtggttgcgatatatggcttggttttagtgttttggtttgtgcgcacctgatccgatcctttgtccaacgaagattttttccccttatttttgggtaaaaaaggacgtcaatgttaccactctatggtatagtgcttttttgttcacatggttagatcatgtactgcgtggtccattttttctctttagtgtccgccactttgtggcgattgttcatagcaatttttctaactgttcataacaaactgggtgcag

SEQ ID NO: 21073 - DNA, 1756 bp, Zea Mays
ctacttatcttgtttatcgtttagaaatgaatcagaggataaagtcatcaccaatgacgatgtgttaggggatgaagtgccatatgaccagcaagaagctttgcgtgtcctatgttatcggttgcttgaaatgcctcttggaagggggcatgcacactttcctggatcacatccagtttctcttaacagtgaaaatctgcaactacttagacagcgatactactatgctacatggaaagctgacggaacacgttatatgatgcttataatgagacatggttgtttcttgattgatcggaattttagctttagaagggttcagatgcgctttccccataggagcctccaaggtctgcaagatatgaccttgattgatggagagatgattatagacacagtaccagattcaggcttgaagagacggtacttggcatatgatcttatggcgcttggctcagtgtccaaaactaggttgccattttctgaaaggtggaaaatgctggaagatgaaataatacagccgcgtaataatgagaaaggccttgagcgtggtgctaagagcaatccgttgtacaaatatgacatggaactattttcggttaggagaaaggctttttgggtgctattaacagtaaaaaaggttcttaaggtgtttattccatcgctatgccatgatgctgatggccttatatttcagggctgggatgatccatatgtaactcgtactcatgaaggtcttctaaagtggaaataccctgagatgaattctgttgactttctgtttgagcttacaaatgataatcgtcagctggttttcctatatgagagaggaaaaaagaaacttatggatggtgctcggatatcatttactgatgatgtagatccatcttctgtcgctgggaggattgtcgagtgctcttggaacaaggaagaacagtgttgggcatgtatgcgtattagatctgataaatcaactccaaacgacatcaacacataccggaaggtgatgaggagtatcacagataacattaccgaggagaagcttctcgaagagactgatgagataacgctcctgccgatgtatgccgataggatgaatgttcgtgttcatacaaagatggcacaacacaggcgaagattgccaccacagtgctagtctcgttgctagagtgctgggtcgctctcctagccagcggctggcttctgtagctgtgtaattagtagaggtttcagtagcccccccccccccccccccctatgatgatggccagccaactaattctttgcacttcatttgtgtcttgtcccctgccctcacacctacctgtataggcttccctgtaaattgtgtgctctatgttcctccatattctcccctatggttttatttttcatgggtgtagaatagcgtttaacaaggcgggtggtgttctatgtaggcgttgccatctctcggtgctgcctcgtgctagaataatgtagggtgtactggcgataccatgtggttgcgatatatggcttggttttagtgttttggtttgtgcgcacctgatccgatcctttgtccaacgaagattttttccccttatttttgggtaaaaaaggacgtcaatgttaccactctatggtatagtgcttttttgttcacatggttagatcatgtactgcgtggtccattttttctctttagtgtccgccactttgtggcgattgttcatagcaatttttctaactgttcataacaaactgggtgcag

SEQ ID NO: 21074 - DNA, 908 bp, Zea Mays
cttatttgtctattagttgctgaaatgatgtagatccatcttctgtcgctgggaggattgtcgagtgctcttggaacaaggaagaacagtgttgggcatgtatgcgtattagatctgataaatcaactccaaacgacatcaacacataccggaaggtgatgaggagtatcacagataacattaccgaggagaagcttctcgaagagactgatgagataacgctcctgccgatgtatgccgataggatgaatgttcgtgttcatacaaagatggcacaacacaggcgaagattgccaccacagtgctagtctcgttgctagagtgctgggtcgctctcctagccagcggctggcttctgtagctgtgtaattagtagaggtttcagtagcccccccccccccccccccctatgatgatggccagccaactaattctttgcacttcatttgtgtcttgtcccctgccctcacacctacctgtataggcttccctgtaaattgtgtgctctatgttcctccatattctcccctatggttttatttttcatgggtgtagaatagcgtttaacaaggcgggtggtgttctatgtaggcgttgccatctctcggtgctgcctcgtgctagaataatgtagggtgtactggcgataccatgtggttgcgatatatggcttggttttagtgttttggtttgtgcgcacctgatccgatcctttgtccaacgaagattttttccccttatttttgggtaaaaaaggacgtcaatgttaccactctatggtatagtgcttttttgttcacatggttagatcatgtactgcgtggtccattttttctctttagtgtccgccactttgtggcgattgttcatagcaatttttctaactgttcataacaaactgggtgcag

SEQ ID NO: 21075 - DNA, 1597 bp, Zea Mays
gtgaatgctgtagctcctcgttcttattctgcctggaatcttcccctggtgaggcacgcggattaagacccgcaagcggaacattgcagctcctttggaccctgcatcattctctgatgcaattgtccagatttatctggataatggtggagatctggaactcgtcgccaaaagtattgagtcttccgacctcaacttctcacgttacggtgacaccttttttgaggtggtttttgttggaggacgcactcagcctggcactgtaaaacctgaagaaggagaccgccacccttattctatgttagattgtgtggcacagcgtgaaacaattttgcctttcgtactctatatccagaaaacattgcgcaggaggcctttcttaataaaaaatcttgaaaatgttatgcgcaaattcctccaatccttggagttctttgaggaaaatgagaggaagaaactcgccatattcacagcccttgcattttctcaaaagctgtcagggcttcctccggagacagtgttccagccattgctcaaggataatctggttgccaaagggatagtactttcattcataactgagtttttcaaggagtacctgaaggaaaacaccttggatgatttgattgcgcttttgaagaaaggaaaaatggaggacaatctgttggacttttttccatcagctaagagatcctctgaggctttatctgagcatttcatcaaagaaggtctgactagccttgttgagtacaatgaaaagaagatgtttgaagttaaacttaaagagataaagtcaacactgaccactatgatcaatgatgaggctgcaatacctgaagtgattgagactgtcaaacagcaagttaaggatgctaaatttcctgatctagaggtcattcgcatgttgtgggatgtgctcatggaggctgttcagtggtctgggaagaaccagcaacagaattctaatgcagcacttcggcaggtgaaagcatgggctgagcttttgaatgctttttgcacgagtggcagactcgaactggaacttatatacaaagtacagacacagtgctatgaggatgctaagctgatgaagctgtttcctgaaatcataagaacactgtatgaccaagatgtcctagctgaagatactgtcctgctttggttccgtaaaggttcaaaccagaagggcaggcaatctttcgtgaaagctctggagccgtttgtcaaatggctcgaggaggctgaggaggaagaataagtttttgatttggagaacggccgaatgctggcctaagtgttactttatatttctgaagttagaagtttgtggaggaattattgctgctgcctcttactgccgagaactttatgttatgatgtttagccacatggatcccggctgcagagtgctataatatgttgctgttaaaactttgtgtcgagcatttgttgaaacttttgttatcattactgaaaggatttataatgggacgtcagtttactgtcggtattgtacaattactggattattcataagctgcagaatgctacaaatgtcatttctggcaaatggaatattgaaatgttacgaatgtaa

SEQ ID NO: 21076 - DNA, 548 bp, Zea Mays
atccacaacaccctgaattggaatcttgagcacaagagcattgctaggggagccaacagaaacaagcagctgctgaaccctgacgttcagtgctgacccagtgattaaatttactaaacacaaatccaaacattgattctgaatattcccagcatcaggtgacaattgcaatgtatactgtaaggaagcacttctagtactgcaggtgtaatgaattctgaacaaattgcctcgatcaaatgctaaccaaggaggctttggcaggatgtatccgactactaccagtgatttaacgggttgtggccatggtggactttgttgtaaagcaaccaggtccagaatgaaaaaataccataaaatgaagcgcaactcaatggtggctgtcatcaaagtgctatgttcccttggttgcatttcaccgagcaccacttgagcatcaatcaaagtagatgaaggtgtgcctgcaatagtcaccacggctaccagactgggcttaccaatgttgtgcagtgcctggctgggacaattggtcgaacacgcgaaggaag

SEQ ID NO: 21077 - DNA, 562 bp, Zea Mays
gagaatgtcatcaccgctcgggcaagcagtactactgttggggacgattcttgcatacgacgccatcgggccctcgcggtgaggtaaaggagacatgatggatcatgtcgtgtggggaagggacctcccggggcaggattgatgacgttgcagagccaaatgcctcgtcggagttcgaaacacatggccctgctacccctcgccgtgacttggccttacagcgccaccctctctagtgctctcagttggtatcggagcaggtctcttcctttgggtctaactgcctgaagagatgtacctcaaaatcaaggtgaaggtgtctgacgagaaggagaggatccccctcgatgaccagcccatggtagacaagatcgtcgagtcgagatcaggcaagaaggaggggaagaagaaaaagcacatcaagaagaacatctactacgagagcgacacttcttcctctttgcaaaaggactcctcctccaagaaaaatacaattaaaaaaaactacactaaaatgtattttaattattctgacatttcttacaatttcaatgcccatttt

SEQ ID NO: 21078 - DNA, 545 bp, Zea Mays
atttgcttgtgatttttctccctcttcctaattctctcaaattggcttgtgatattactcttaatatataatatatcttgaaatagcaatcaagtgaagaggacttgcttacttctctctactcgaacttggtttagttttcactaactctcacttttagaccaagtttgggttttttaattgttattattgcatgataacctattcaccccctttaggtgctctcagttggtatcggagcaggtctcttcctttgggtctaactgcctgaagagatgtacctcaaaatcaaggtgaaggtgtctgacgagaaggagaggatccccctcgatgaccagcccatggtagacaagatcgtcgagtcgagatcaggcaagaaggaggggaagaagaaaaagcacatcaagaagaacatctactacgagagcgacacttcttcctctttgcaaaaggactcctcctccaagaaaaatacaattaaaaaaaactacactaaaatgtattttaattattctgacatttcttacaatttcaatgcccatttt

SEQ ID NO: 21079 - DNA, 4386 bp, Zea Mays
gcattattcaattgcaccctggagccgttgtcctcatcctctcagccgctagctccgcctcctctcctcttcccgtcaagtgtacctgctgagctcatccatggccgccgtcgattctccatggacggtctcacgtgccctccccatgtcagctcgctcggtctccagcgcccggccccagctcggatctcatccttcagccatggatgtcggcgccgcgcccagctcctcatcatgccgctccctgggagtcgtctagccgcgcccctgttcttttggttggtgctcgcgtccagccatggacatcggcgagctcaccctgggttccaccggcactgaccctgctcttctctccctcatctctgcgactcggcgcctcctctgctcctccacctacagctcgccccatctccctggtgtcgagctcgtcctccaccttgcccatggcgcccgccctccccaggtccgcgctctagatctcccagtcgagctcccttcgtcgcgcccttccttgctcctgctctggtcgccgtcgccgagtccgaccccaagccgtcgaagcagcagccatggctttcagtgctcgttttggccacctcctctgcctccgatccgcggcgccgtcgtgggctcgccccagccctatagtcgccagtcgtcgtcgccctgcccctctgcacgccagcgtcctcttcctcagctcaccccgtcagccgtcgcgtcgtcgaggaagaccccaccagtccccgcgccatcctttgcctccttgtcgtgcgccatcaggcatcagccgtgcctcttcggctctctctggctgcccggtcgtcagttcttgtgccgtcgaggagccatcagcattgtcatcggtccaacaacgttgtcacgtcttgcgttcgcgctggaagatgaaagggaaaagctagagcaacactcatcaaatatcggtggtatgcgtgagccgtaggatttagcttaggtgagatatttcgctattcctgctaattaatttgattgatgagttgatttgatggtgattgatgatttccatgttttccatatagatgcactgtgtaatgcctcgtttcatacagagatgggattatgttcttgtttgcaaagtaaacatttcatggggcaaaacttaagtttgaaatgaagtttatgcgggaatgttttagtgggtggatgcatctagtgtgattaagttagtcctttaagtgttaagtatggggtatttgtatgtaaatgataggtttggtatttcaaatggttatccgataagttcggttatcgctaattaaatcaaatgaatctttttagtgaagttgaagaactgcttagtaattgttacaatctattatattgattgataaaatgtcctaggtgaataattatgatggtattaagtgtttattgaaaagcctcgttattatagttatgaaatggtgttcaaagtgttaagtagatgcatagcttaacaaggtttaggtttaagacgtggattaggcgcgaagtgccttggtggatatataggtctagtgtaattgaagtaatcccctttatgcgatacaattgcgtcccctttatacgatacaattgcattcacgtgtctgttataaacattgtgtgtatgtgatgaagtcggtaaattgctttattagtcatcatgttcaatgttagtggccgagtaagtgtcatggttggatattacttgatttttcaagtatttggaatcgaataacatcgataggtattttaagtgaaatatgaaaatttgcataataaaagatgggtataagcactttaggtctttcatttctaaagttgtagtcgagtagacttatataatgtttaatgatgctctacttactaaactaagtagcgtgatgttttaattagtggtggattacacaggttagtcgggaaaactagcttagatagttaattaaatatgcttccttactctgcattgttggtattcaaaaatagtgaatcaaagtttgacgagacatttgatattgggtgctagctgaagttgacataggacttgtgcttagtttattatcacttgttgtttggattatatgcggttaaactagaaaacgtgattattgtacttggttatatgtcgatacctagcatttgcttatgaaatgacgtaatgccttaccattaagtgtttgattctttactgtgtaacatcgcaatattatcttgcgatattcgtcttgatattcatacatgtgcatcgtgcatctcatgaggtacgctagttgatcacgtgatgtgaagaacaagaactggattaatctcaaggtgatgtggatgatgaacctgaagatggatgacctgaacaagtgttagaccaaaagtttttcgtcaagtggacgtcatctaaccaacactaacctagtgttattccaggcaagccccggtgcattatccctttccttgtgttttaaaatttttatcaccttatatgatgcattaggtgataggagttgtgtgctaaacaattgctgcatttccatccttggaaaattgattaccctttcttgatacccttttatgaaaaggatttttatgatgcttagccttgatctagaaaaacaaaatgttttgttttaaaacaaaaggtgatgcttcacactggatggggatttttacaaagaaaagacttgtgatggtgaatctatcagggccttgatgggttcagcatctgaaaagatgtacctctgtcaggtaccaaactttgggttgtaaattattaagacgagactaagcgggtgacttgcacgagaaggaagtctcgatgtagtgtctccgtctgagtcgcttaaggaccgaaccgatgtaggcttgctgatcgaggaccttttaactggccacatgcctcgtcatgggtaagctttgcctcagtctgaccactaccacaaaggccaccacacaatgggagtggagagatggcgagagtagcgtgtaccctccgtggcaagaggctaggcggtggtgtatctgtgctctcggttggcgtgaacccattctggtcttgagaaccccggtggcgagttgacatatgcaagggttaagtgctacatatgtcgtgtggttggagatccctagctgggtattaatcgattcggatcgtcgttacttctcgggacatgatgacttggtcactgccctacacgtaacattctagtggaactgaaggggatgataaaagacggctagtgtaggccaagtgtttgatctaggatagaaagaactctagatgcaggtaactttacttaaccggataagtaaaaggaattcttaaggatacactcatagtaagcttttctgcaaaagagtctttgaatcttgttaaactttaccttgattcccaaaagccagcatatccttgagagtccttttctttagtcgggtaagacttacaaaagtacactttgtactcagtgttttcgaacccatgttgttgcaggtactagatttgtgctgctgaggatggtgctaagcgccggtgggcatggccttctgataggtctaagtagctcttctatacttcttattgaggatggtcacttaagctagcatatattttaaacttataaataatttttaacatttcaaagtatattctttgaatcattttttgtaatcactccaataaatataatgtaaatttgttgtaacttttaactttttgtaataaagaaattccgctgcaaaatgttggtgtgtgacttgtgtttacttaatcttgcgatcctggttgtaagtggtttatccaggttccttgagacactcggacggatcttgttaagttatctggtgcacatgcatagtcgtctgaggtctttgagacaaggacaggtgcatgtggcccaataacttgggaggttctgccacaagcatcatgttcaaaatgtgtcactggtaatcattgtagtcttgggttgaacactaccatgtcctaggcctaggtccggacttgctagagctcggtatgccgccaccgacatggctagtgagtctataagttacctcagtctgattagctgagaggtataggtgtgttagtctcatggatcatgtctgggtgtttagctttgccggaggaggtcgccaccagcgaattagcgcggcggttggcctgcgctcgtcgggggtggatcggggaccggagtttgtgaatgaaagaaagcatgagggcctcggtgtgatgtcagagaaacacggaaattaggcctagggtctttacagattagttaactctgggaggggttttctgcaaatcataccgcacgggcgtgggtggctggcgcggggccggttttccctgtgttcatgggccaagccaggcctttcatcccagaactattc

SEQ ID NO: 21080 - DNA, 286 bp, Zea Mays
gtttggggcacagttttttggatcaagtggaggcaacacatgaaaccaacatggagaagaaaaatgaaatggcattccacataaagcttgtgaaaaagagttaaactcgtaatttattctagtgcagaagttcctaaccaagagatttgtattccatttctatattatattgtctatctatatgtgtgaataaaggtgaccttatatgatgtgatgatgtatgaattagcttcgatggatattatatggtattcaaattaaactttacatgaattatatgtggtgc

SEQ ID NO: 21081 - DNA, 1499 bp, Zea Mays
cctcaccaacactcactctctcactcccggccccggccgtgcagcacacacacctcactcctcttctccttgctagcactcttctcaggtctcagcaagctactagctcatccacatgctgaacctggcaccatttgagacgccgcctcttggaaggcaggaaacatcagctaataatcctaccgtcgccgccgtcaggggaaacgaagaaagctccagcaacacttgcttgcatggacatctggacctcagcctcggcatctccttgtctcatggcggctgcgcctgcgcctgcgacgcatccagctgtggaggaaacaagcaggagagctacggtggtcgagagggcagcagccgtgacgacaaggcggccgtcggtcgctgcatgaccagcggcaccaccaccactgcaagtgtaggacacgacgcccatgccggtgatttgacagcaggaggaggtggctggacagcaccgttcgtgctgagcccgaccgccgccttcttcatgcatccatggagcctcgccgcacggcagcagaaggctgctgccgagcaagaccggacgcctccgcctcctactacctacatgtcgagcgacggcgaccgtgcggtcacatcgccgtcggccgtcggctggccgccagtgcacacatcccggcgcaacatcatcgtcaccgccatgcacgtgagcaggactgctgctggcgccaccgccgtcgcggcacacgacggacccgacgacagcacgacgacgacgacgcacgccggccgcgagaaggatgcggtggcgccgccgcctccgacgggcagctcggtggttatagcggcacgccggcctccgccggcgaacatgttcgccaaggtacacatggacggctacgcgattggcaggaagatcaacctcagggcgcaaggcggctatgcctccctctccagggtgctcaccaacatgacaacaaacttctactcgcccgcagactgttctacaggcgcaacaggcacgggagaaaaagatcttccaaccaataatgacaagttcatatttctgtatgaagacttcgagggtgaccgaatgctggttggtgacgttccatgggaattattcctagcgtctgctaaaagattgtacattgtccgaaacccaacatcaagtgacaaaggtcagggtgaagatgacagaaaatatacaaccgaacaaccgaccgatgactgaaggcactcttcaagcaagtgatcagaaggacatctcttgatctggcatatacaacttcgagaagtagttttcttcttgtactaattaagtaatgtagctagtatttatgtgagttctatgttgtactattggtgtttcctaatcaatgtgcatataattttgatcgttttgtaaggagagacgtcctaggaaggaagaaacatgctgtcaaccttgctctaaagtctaaacagtgacaaaatgtaacacttcaaaaatcttatttttgatatttataaaagtttct

SEQ ID NO: 21082 - DNA, 3353 bp, Zea Mays
agttgatatagaattaatatatagagtaaatataactgtggtagattttgttatagagtatagaatcttgatgataaggataaaatatattttttagagtactaatttgcagtagtatgaatggtggagctagcctaagccgccactgtcagcagtccaaaaccgaattaaagttggcgtgcacacggaactaacgccaggtacagctgcccgagacagtaatctgacgccgatgaggctgcatcaactggtagtcggtagttttcgccggcagattggcatccacaggaagcaaccatgatcctcttggcacatgcgtcgccagtgcttgcctgacagcgcaatcttgtcctgcccagctgcaccttcacctcgaccccttcccttggcggatggagatggacgcaacgcaagtatgccggatgccgcggcagcgcagtgagcggagctgagagtagttgaggcgagtgctagagcagagcgcgcaggccggagcaggattagccaccaaatccaccacctgacgccgccacacccgctcacacttgtgccgcggctgccttaccatgtccccccgcctaccgctccccctccatctccccacacgctgccgcgcattcccatgccgccgccgcgccggctccacctcgacgccaccttcctcttcctgcccgtcttcctgttcgcgacatggcggcccgtggcggcggcggcgctctccaccttcgccatggccaaggcggacaccactaccatagtgtgcgcgctgctgccgtccgcggcgtccccgctgctggtcgacctcaactgcacggccgccggcggcgaccacgcgcgccaggtgacgtacccgtcctcgcaccccttcgccgcgctggccggaggggagaacttcctctgtgccgtgaggccctccggcgagcgcgcgggcgacatcgacatgcgctggtgggacctgtccggcgacggcagcagcagctccaagcgggtctacatgggcccgccgctccgggcgctgtcctcgggagagtaccgcgtctgcggggtgctcagcagcggggagctccactgctggcgttggcgcggcctcaacatctccagggacctccgcttcgccgccgccgccgtgggggacggcttcgtgtgcgggatcctcaaagggacgccggcgtccatccgttgcttcgggaacgacacggcggctgcggccgtcgccggcgcgccggcagacgggagcttcgacgtcgtggccgcgtgcggccaccgcgcgtgcgcgctgtccacgacgggggtgctcgcgtgctggggccacgacccgccgacggtcgcccccgacgacgcggccaccgggtacgcggcgctggcattgggggaggccggcgtctgcggcctgcgcaccaattccaccatccgctgcttcggcgacggcgtggcagtgccgccggccggactcgcgcgcgcccagttcctcgacttcaacgccaccaaccgcctcgtctttggccgcgtcttgccgggcccctgcctgcccatgtcctcgtgccaatgcggcgtcttgccgggctccgccaacctctgcgacgacggccgctgcgtctgcgtcgactgcgcgttcgagctcaacgtcgccaggcccaacgcgtcgctcgtccccgtgaagggcggcaggggcaggaagaccatgtggattgccatcgcggcggggaccaccgctttcttcgtcttcttcgtggcattgcagttcgcgctggtcctgcggtgtcgccggcgccggcgccgccgcaggaacgaacaggatacctccggtggtgcgcaacagtcgctgatgccgccgagggtcgggtccagcaggagcagggggcctggcagcgtggtggtggagaacttcatgctagacatgctccacgcctcgacggacgggttctccgacgacagccggatcgggaccggcagcttcgggtccgtgtaccgtggcaccctccccgacgggcgcgaggttgcgatcaagcgcgccgaggactcggcaaaggcatcaagctcggtggcgcggcaccgcgaccgcgagacggcgttcgactcggagctgaccgcgctggcgcgcgccaaccacaagaacatcgtgtgcctgctgggctgctgcgccgactccggcgagcgcgtgctggtgtacgagttcatggcgaacggcacgttgcacgatcagctccacagccgcagccccctggcggcggtcgtgtcgtcgtggcgcggccgtctgaccatcgccctgggcgcagcgcggggcatcgagtacatgcacgtgtacgccgtgccgcccatcatccaccgcgacgtcaagtccgcaaacatcctgctcgacgacgcgtggacggccaagatcgccgacttcgggctgtcctccgtcctggaccccggcgccggcacgccgcaggagccgctctacacggggggcacgcgctacgccgagagcgtgacgcccaagaacgtggttgagttcgcggtgccgcacatcctggccgacgacgtcgcgcgcgtgctcgacccgcgcctgcccgcgcccacgcccggcgaggctgaggcgctggcctacgtgggctacctcgccgccgactgcgtgggacccgtgggctgcgaacgcccgtccatgaccgaggtcgtggtcgccctggagcgcgccctcgtagcctgcggggcggcggcgccgctgtcccgcgcaagcaccggccgccggtccgtcctctcccgctccggcaccgaccagttcgacctcaccgacacggactagccgccgcgccgtcccgaactctaagctgctgacgagaagtagccatttgcattgcggcatcggccacttccgtggaccatggtggctgccaactgcaagccgccgcacgcgccgaatcgcctgtccctgggccatggttttcccgttgaaaaaggtgatgaagcaagagagagcgaggcggtcgacgccgacatctcggatgccgctgctgccgcgttatcaacggctagattaccttcgattgacttgcgaacaacccacacagggacagggcaccggatcaacagatggcccggcgaaacggttgacgagagaccagtagcacgacggaaaagatcattctttctttctttctttgctccccactttctccttccttgctgtattcgttgtatacttgtctttttcctcgttgggtggtttctccatattctttgaccaatgtgcatagatagatgagtaacaaaatttgagaagaaaagaatcacgatttacatttgcttccaattttctactgaggatcgttgtggttaagaccagcgcatccgtattatacactgattttttc

SEQ ID NO: 21083 - DNA, 6160 bp, Zea Mays
cccatctcgtcttcatagaccagcgccgagcgtcatggccgagagagaattaatagagtatcctgacccctgagatggtgatatcctggcccaagacttaatagaattaatagagtatccataccaacaaggtgcatcttctttttcggaagcctgtctcgaaagaacctccaagttaagcatgcttggcttggagcaatttgggatgggtgaccgaccggaagttttctcaggtgcgcatgaatgaggacaaagtgcgcacaaaagacttgtgttggtctgtggtgacgatatatgatcgcgcatgaatgaggacaaagcgcgcacaaaagacttgtgttggtctgtggtgacgatatatgatcctagagagctgccaggagtaagtactgctagtccagggattggacggggtgttacagaatggaacgtccttgaatgattaattaggaaagctagtggaggactaccttacccgaaaggggcaaccgtggtatgagctgccggtatagagaggttctcgggtcaatcatgttaagatggcttttcggatgagagattcctatatcgcccccttctcgcagaaaccgtagcgggttttctcaagctagtggaactttgtaaatgcctcatagtaggatcctgcctcgtctcctcagtagagatgaatggaaagttgtgatcccttgacaaatgggtaacacgacttgtgggtaaatatgcgcaacctctgcaaagtgtaaaactggtatatcagtcgtgctcacggtcaagagcggttcggaccctcacatgagtaatatggaatttttttcttaaacgcgcaggagagctgcgcatcattaaatttagagaagaaaacagtccaaaatggaccaaagtacaatgccaaaataggcaaaacacaaaaccaccaacttctgctgcgcacaaaactgcagcctccataaatgcgcctggaaacagcagcacgcaataggagaccgaacagcaaaaagtgccagcagaccacacatacctgctcttcactaatcacccaaaagaacccttgacctaaaaattccagcaccaggaaccaaagcctcaagatgcctagcaccggcaagcctccagaattcaacttcatccagaaaattgcctttatgccaataattgaaggactgacaccatcaaaaaccaccttattacgatgaagacataaacaccaagcccccaagatgatgatactgttaaagcctcttcttttagatttgtgcacttgcttacttactttcgcccaccagtcagcaaaactggactcattagagtcaggagaaagattagccatccccaacgaagaaagaatgtaataccaaaactgccgcgaaaaaacgcaagtgcaaaggaggtgttggatattttctggctcttgatcacacaacggacagacctcaagatgatctaaccctcttttctgcagtctatcagcagtccaacatttattccttattgccaaccaaataaaaaatttgcatttgggtggagcccaagacttccacagcctcttccacggttcaaaagtaatcgaacccaagaaaaaagccttataacatgatttagaagagaactgtccagaggaagaatgaatccacacatgtctatcagcctcctgagtcagcaccactcccctcaatgtgtcccaaaggttcagatattgctgcagcccagacaaattaagaggggtcacaatgtcgctgacccactgccagttctcaagagcatgggccactgtcctggaagaaagggccctttttccaacattagccaccacggcaggggcaaaatcctggatacgagacccatccacccaccgatctgtccagtaatatggaattaaatttaacctaatatggaattaaatttaacctgtcatacattacattgaattgtgggatttattcatcattgatcaattatttaattgggttgatatgcacttatacatagtaatagctaataaaattttgaccaacttatttaaaagcgatgctcagccttaaccattttccttagtaagtcttacactacacatgagcccccaccgtaagtgagcatacacattattccccacacttgttaaccgatgaccgtataggagctcacccttgctataatcacaccaagtcaagaacaggtaccgctggaggagcatgaaggatgatgcgatgagtttggagagatctaggccagtcaactatggttgcggaggatcgttgtcgtcatatatatatttacttagctattttgtacagaacttctattatataataaagatgtgacattgatttctatatcatgagtcatcatatgtgtgagacttgatcctagcacacatttgagacgcacccaggtttgcccttaaatccgagtgtgacaagagggatggccataggtcaagaggcaaggagccggcaaggaaaagacatcgtcgatgaagagcacatgacgggagatgatgacgaggtgggttaggagatcgaggcaccgatatcccttgtgctcagaggagtacccaaggaaaatacagcgagtgggctagggcgcaactttgtggggagcgtggtggaggtgttggggtagcaagcacacccaaattagaaaaatgctagtacacctacacctagtagctgacgagaagagaagcctggaagagaaggcaacacagcatattggtggtagtgcgaatcatgtgcacggcctggctgttctaaagggaggtgtagggacatgagagccgcaactaaataccatgagaaaggaataaggaacgggaggtggaatggtcgactcgcggccgttgtcgcattggagagcacggatagtgtggccgaactgggtggagacccaagcaaagaagtgtgagagcgtggtgaaagtaccagatttcaaacacaatgggaaagtccaaagaaaataagagaacattcagaatcaacaaataatatttataccttgagaggctaaaaacaagtcatgtccatagatcacagtgtgcaagatcaaaagcatggatagcccgggaggacgaaatggaggaagatgatcatggcggcctaactgataagcatgacacagactattaaaatggcccctactataagagatgacaactgctagagcttggacatgacatcggacctaatatgtccgagacaatgatgctagatgatgaacgaagtagttgcaaccaaggcatgcggaaaggacgtggcagtggagaaagcagatagccggagtgtgtacagcagccccgagctatcacatcgaacgagaagggtcctggtagccagatccttcacagataaacccaaagggaacaaactccatagaacgagttgtcgatggtgaaccgttgaacagaaagaggatttcaatgatgttgggagcaacaagaacgtgtttgaggtgaaacggccctggaagaaccgagtcactcaatgagataacgaggagggtggaactgttccccagaataataagggacgaaaaagatgggtgaaggggatgggagtgagatagcgtgtcgacatcaggtgtggtgtggcaagaggctccggagtccgccacccaatccgacagggtgggtggtggtgtcagcgccatggtgctaaacgagccagcgagtgacggccgatcctcgtcatcaccccacggggaccaagtgtggcgaggtgggggtccccatgagtggaaggagaggcggaggcgacgactggtgctgaaggggcacttaaggtggaggggcattgtagtgaagtgtggtcatcagagttggctatggaggatgcgttgaggaagcacccatgcctgggcccgaccacatggagatggtcccagtccatgggttgtagaaggacgactacacgggaccgccacgccaggagggccaccacccttgtggggttggcgaccgcctctagagctaggagcctgatgagaaactcaaaaaggagtggaggtatgagggcgcaaaggagtccccccggtgacaatggacaagggggggtggcaagcgcggtggacgcagcgtcaagggtgagctcctggggaagtagctcgttgtggacgtcgtggaatgacaggaagggcatagagcgctttaacgaaggccttcaagtggttgtagcgccgactgagaccacatagaaggttgaggacaagtgtgcgatcggagacaggctcgccaagaacccagagatagtcaatcatgctctacatcttgcgacagtactcgatgacagagaggtcaccctggatcttagaagaagagaataaaaggggagtcaaggtggagagcgtgagcctcccagttgctgaggaactaggtctcgagggcaacctaggcctagtgagtggtgccccccccccatttgtggacaacgtcctagagctcgacgacgagggtgccaaaaagccacaacagggccacgttgtccatttggtgccgagacgagagcaggtgggtagcgtcttcaacaagaatgtggtcgcgccagggggcgtagtgtggggatgtgaggtcgaggatgacgaaaacaagcgcggtggactacatgttctggacacccaccgcctaaacttggaggttagcaatgactacggcctcatactccgagggaaggggaaccacagaagaggggggcgccgaggccagtgtgatcgagcagctgacgcttcgcctcggcgagttgcctggcgagagtatcaaccgcagtgcactcgtgctcccatgtcagagcagcaagccacgatggccttggccatcaagatagccacaacaagggtggactgggccacagcaacctcagaagaggacacgataggcgacggagatatgaagcgggtgctctgggctttgaaggggtacgagcagaggccagtagttgcgccgaggctagccaatccactagcaagaacccaatggagatctccggtggcagtcgagctgggcgcggctgtgagaagtgaggcccgacagcaaggaggttagcgacggtggattgtgtgacaagggaagtcacgaccggaggagggaggccacccgccggtggaggcccgaagggcgacgctccctggagatctcgccggcgctaggggcgccaatagtgaaggcgacctcgggtccagtggtcggggtaggcagcgcatggggccatgctggggaggccacgtcgaggagggtaggcggcatagcgttgaggagggtggacggctctgcacacgcagtagctggggcggcgcctgcgcccgcaacgagaggatgggctacggcggctggggcgtcgcttgcgcccgcagcaagaggacgggcgggtgggtccaccacgacggcactccagtgacgagatagaggggagggagaggagtggagagggaaggggaaggtcgtcgccatccatggttgcagcagccggcgggtagggagagggaaacagcggctaggagaggaggaatagagaaaaggaaaactgactagataccatgttcgaaaccctaaccctaattaaggtaggcattagtatatgctacctccgttctcgaatatttgtcgcctgctagttcatttttgaactaaaccgcaacaaacaaaaaataatggagtataatgagagcaaaatagccttcagctgagttggttaggtggtctgagtagcactcctcgggtcctgggttcaactcccatgagagcaaattttaggctatggttacaaaaatcctctcgtttgtcacacgccaaagcataggtctaaggcccggttccggtcacggtcatcttctcacatgggctacggtaccgctatgtatgggtggggtagaggttcgagattttctcgacctgcttgagaaagtcttcttaatataatgcctagggggctatcttaccccccacaggtcgagtatatatattgaggtacatgggctgggtcaaagcctgctacagcagagacgcacattagtctaacactaaaatctacaaataatatggtttgaactgatcctaaaatggttttgggagcttgtccattaaccgaaattcattcttttgctggaacctgaatataatccaccaccatgaatatcattagaaaaataattgttgcgtcaaattgcatagttgaat

SEQ ID NO: 21084 - DNA, 2734 bp, Zea Mays
attgttataaattttatggttatttaaaattatattttgaaattagaaaggaattagaaaagaaataaaaaaactaacctaacctaaacccatgaaaccgggcatgcccccaacccccaaccctagccgccactaccctgctccctcccccaagccgccgccactccttctccctccccctttctctctcttctctctctaccgcccacctctctccacctcctctccccaagccgcgccaccaggagtgcagcagccgctagaagctgccatccgcccgccaggagttcagtcaatctcctgtctcctgagagccgccgcccgccgagtcccgctcgccgctcggtcgctcccgtgaggcgctcgatctcctcagcgccgcgcccacccagccacggtggagccacccttcgtcccgtcgtccggcggccggccctcaatccctcacgccctagcttctctgccatttccggtcagcccctcacgccctagctttcctatcaggcgctcggtcgctccctttgccacgcgctcctagcttctctggtcggctcttcctccgccatttccggttggatcctcctatgtgcagtgctcgacaaacggcaccagcgccgctgggtactgtcaccgcttcggtcgccggagcccggagatgtaaatgcgctggagttttcatgctgtcgctggaggaattgaggaagaaagtttgcctcgtggccaatgcaattgatgccctggaactgccgaagggatctgcaattgctattgacatgcctatggatgttacctaatttcaggatgctaaggtaataatgcttggactggtacccagcatcgttcgtacttggaagaatacggactgtacagctggactagactggtcctccatccgatgctttagctcctctagggaggcatccagtgtggattttgtgttaaaggataggttggaaaccacacgacagcaatatctgaatttcttatttgatgatgctcagatacataattttttgactgagccttgatattctcagaaggtgatgtcagtcttttcctaagagaagtaagtagtgttactccatccttactgctcggatgtcggatcattgactaccactgaggtcagcactggcattttttttaacgtagagctctgcagttcttacgctgacaccttataagtgaaagtgcaatatagaggccttgtgactatcttttcgtcagcaagagaacaacatcgatcttggtagttcttagttgcccctgtgtttcggaagtgttgtgtcagattattatatacccatttctagaaataaccaattgctcatattgcttacttagacaaataagcaatcttgaatctggaattttacagtgtacctgaactatcaactcccttcaacaaacttttttgtatggaacaggagcagcagcaccccccccccccccccgcctagtgaaaatattatgaacagaaaaagaacatcaaacagcaaagaaagaaaccaaaaagttcaacaaacattgcttatcatcaccagcaattattatccttattcctcctaatcagaaatcagctttaacgacctgtttggttgattgtctggtacttctctcaaaatatttatttgatttagctttaggagctatcttgtttccctatgcagggtcttcatttaaacttcctcaggattttatcagtatatattttacttttgcagtttaaacaatggaatgtagcatttatcggttccagctttcaatcttgcaaaatagaagcactgacagcgtgcttgttgcatgcattacctgtaataatgctccatttgtgttctttatttgtttagccactctaatcgacactgcccgtttatttacataggaacgtcaatcatatggatgcttcttcagtggaattatcatgtgaatccccatagtgcccaagctgtgaagcagtcatgattgatgcttgggctgttagctttatgtggtccagggggaggaaggataccttagaaactgtcagaaaagctcatttcatacttcatttttcatcatgttattttgttgcatgagacatttgtccaactgcgtagggaatgaaaattcaaattatttctgccactgattgggggatgtaattccaaacgttgtaaaaggcgactgtatctagtgattatttatggctgatgggaagagctgatgcagttgaagacccaagatttgaacgacactattgtcacaccgaaagtgtgttcgatgaaatgcctccaacatccggaggtttctatttgtgaaagtttgcaggctaagacaaatgatagctattcaaggagctagaggctgctcaacataaagcatcaacagcaacctctggaacagctgaaaatgctctactggaagctaagtcagtgactgatcttaaatctaaagatttggagaagaagaaaagtgagctttgttcactgatacaagaagttggagtgcttttgtgaaggcttttgcgaatcacttgaagtgttagtacttttgtgaatgattttgtaaagtgtttgcaaatatgtgcaaaacataataacatgtgtaggttttgtgaatgattttgttgtggtgcttgttgatggtttatgtgatgtggatctatcattgtgcaatactaattaaatttgtatatctatgtgattatctgtataaaaattggtgatttgtgatgcttttgtatatataacag

SEQ ID NO: 21085 - DNA, 2810 bp, Zea Mays
cccaacccccaaccctagccgccactaccctgctccctcccccaagccgccgccactccttctccctccccctttctctctcttctctctctaccgcccacctctctccacctcctctccccaagccgcgccaccaggagtgcagcagccgctagaagctgccatccgcccgccaggagttcagtcaatctcctgtctcctgagagccgccgcccgccgagtcccgctcgccgctcggtcgctcccgtgaggcgctcgatctcctcagcgccgcgcccacccagccacggtggagccacccttcgtcccgtcgtccggcggccggccctcaatccctcacgccctagcttctctgccatttccggtcagcccctcacgccctagctttcctatcaggcgctcggtcgctccctttgccacgcgctcctagcttctctggtcggctcttcctccgccatttccggttggatcctcctatgtgctcgacaaacggcaccagcgccgctgggtactgtcaccgcttcggtcgccggagcccggagatgtaaatgcgctggagttttcatgctgtcgctggaggaattgaggaagaaagtttgcctcgtggccaatgcaattgatgccctggaactgccgaagggatctgcaattgctattgacatgcctatggatgttacctaatttcaggatgctaaggtaataatgcttggactggtacccagcatcgttcgtacttggaagaatacggactgtacagctggactagactggtcctccatccggtaattttttaattgctcaactatccagaccttttgtcttaactttgcaagttacacatatagtatggtatgcagtttctattgaccatattcattatatacagatgctttagctcctctagggaggcatccagtgtggattttgtgttaaaggataggttggaaaccacacgacagcaatatctgaatttcttatttgatgatgctcagatacataattttttgactgagccttgatattctcagaaggtgatgtcagtcttttcctaagagaagtaagtagtgttactccatccttactgctcggatgtcggatcattgactaccactgaggtcagcactggcattttttttaacgtagagctctgcagttcttacgctgacaccttataagtgaaagtgcaatatagaggccttgtgactatcttttcgtcagcaagagaacaacatcgatcttggtagttcttagttgcccctgtgtttcggaagtgttgtgtcagattattatatacccatttctagaaataaccaattgctcatattgcttacttagacaaataagcaatcttgaatctggaattttacagtgtacctgaactatcaactcccttcaacaaacttttttgtatggaacaggagcagcagcaccccccccccccccccgcctagtgaaaatattatgaacagaaaaagaacatcaaacagcaaagaaagaaaccaaaaagttcaacaaacattgcttatcatcaccagcaattattatccttattcctcctaatcagaaatcagctttaacgacctgtttggttgattgtctggtacttctctcaaaatatttatttgatttagctttaggagctatcttgtttccctatgcagggtcttcatttaaacttcctcaggattttatcagtatatattttacttttgcagtttaaacaatggaatgtagcatttatcggttccagctttcaatcttgcaaaatagaagcactgacagcgtgcttgttgcatgcattacctgtaataatgctccatttgtgttctttatttgtttagccactctaatcgacactgcccgtttatttacataggaacgtcaatcatatggatgcttcttcagtggaattatcatgtgaatccccatagtgcccaagctgtgaagcagtcatgattgatgcttgggctgttagctttatgtggtccagggggaggaaggataccttagaaactgtcagaaaagctcatttcatacttcatttttcatcatgttattttgttgcatgagacatttgtccaactgcgtagggaatgaaaattcaaattatttctgccactgattgggggatgtaattccaaacgttgtaaaaggcgactgtatctagtgattatttatggctgatgggaagagctggttgtggtatagtgtcagcagcgtatgatcggttggttcatcaaatctgtccttcgttgattagtttttttgttttgttttgcagatgcagttgaagacccaagatttgaacgacactattgtcacaccgaaagtgtgttcgatgaaatgcctccaacatccggaggtttctatttgtgaaagtttgcaggctaagacaaatgatagctattcaaggagctagaggctgctcaacataaagcatcaacagcaacctctggaacagctgaaaatgctctactggaagctaagtcagtgactgatcttaaatctaaagatttggagaagaagaaaagtgagctttgttcactgatacaagaagttggagtgcttttgtgaaggcttttgcgaatcacttgaagtgttagtacttttgtgaatgattttgtaaagtgtttgcaaatatgtgcaaaacataataacatgtgtaggttttgtgaatgattttgttgtggtgcttgttgatggtttatgtgatgtggatctatcattgtgcaatactaattaaatttgtatatctatgtgattatctgtataaaaattggtgatttgtgatgcttttgtatatataacag

SEQ ID NO: 21086 - DNA, 2981 bp, Zea Mays
caacccccaaccctagccgccactaccctgctccctcccccaagccgccgccactccttctccctccccctttctctctcttctctctctaccgcccacctctctccacctcctctccccaagccgcgccaccaggagtgcagcagccgctagaagctgccatccgcccgccaggagttcagtcaatctcctgtctcctgagagccgccgcccgccgagtcccgctcgccgctcggtcgctcccgtgaggcgctcgatctcctcagcgccgcgcccacccagccacggtggagccacccttcgtcccgtcgtccggcggccggccctcaatccctcacgccctagcttctctgccatttccggtcagcccctcacgccctagctttcctatcaggcgctcggtcgctccctttgccacgcgctcctagcttctctggtcggctcttcctccgccatttccggttggatcctcctatgagctttaatatatagaaatatcaacgagtcgccgataaaaaaccaagcatgaatgtgcagtgcagtgctcgacaaacggcaccagcgccgctgggtactgtcaccgcttcggtcgccggagcccggagatgtaaatgcgctggagttttcatgctgtcgctggaggaattgaggaagaaagtttggtaaccgtatactgctctaagaagttttgccagttttgatcatagccaagcttttgattcatcataatctgatcctgtaaccaatttctctccctatgtctagagcagcctcgtggccaatgcaattgatgccctggaactgccgaagggatctgcaattgctattgacatgcctatggatgttacctaatttcaggatgctaaggtaataatgcttggactggtacccagcatcgttcgtacttggaagaatacggactgtacagctggactagactggtcctccatccggtaattttttaattgctcaactatccagaccttttgtcttaactttgcaagttacacatatagtatggtatgcagtttctattgaccatattcattatatacagatgctttagctcctctagggaggcatccagtgtggattttgtgttaaaggataggttggaaaccacacgacagcaatatctgaatttcttatttgatgatgctcagatacataattttttgactgagccttgatattctcagaaggtgatgtcagtcttttcctaagagaagtaagtagtgttactccatccttactgctcggatgtcggatcattgactaccactgaggtcagcactggcattttttttaacgtagagctctgcagttcttacgctgacaccttataagtgaaagtgcaatatagaggccttgtgactatcttttcgtcagcaagagaacaacatcgatcttggtagttcttagttgcccctgtgtttcggaagtgttgtgtcagattattatatacccatttctagaaataaccaattgctcatattgcttacttagacaaataagcaatcttgaatctggaattttacagtgtacctgaactatcaactcccttcaacaaacttttttgtatggaacaggagcagcagcaccccccccccccccccgcctagtgaaaatattatgaacagaaaaagaacatcaaacagcaaagaaagaaaccaaaaagttcaacaaacattgcttatcatcaccagcaattattatccttattcctcctaatcagaaatcagctttaacgacctgtttggttgattgtctggtacttctctcaaaatatttatttgatttagctttaggagctatcttgtttccctatgcagggtcttcatttaaacttcctcaggattttatcagtatatattttacttttgcagtttaaacaatggaatgtagcatttatcggttccagctttcaatcttgcaaaatagaagcactgacagcgtgcttgttgcatgcattacctgtaataatgctccatttgtgttctttatttgtttagccactctaatcgacactgcccgtttatttacataggaacgtcaatcatatggatgcttcttcagtggaattatcatgtgaatccccatagtgcccaagctgtgaagcagtcatgattgatgcttgggctgttagctttatgtggtccagggggaggaaggataccttagaaactgtcagaaaagctcatttcatacttcatttttcatcatgttattttgttgcatgagacatttgtccaactgcgtagggaatgaaaattcaaattatttctgccactgattgggggatgtaattccaaacgttgtaaaaggcgactgtatctagtgattatttatggctgatgggaagagctggttgtggtatagtgtcagcagcgtatgatcggttggttcatcaaatctgtccttcgttgattagtttttttgttttgttttgcagatgcagttgaagacccaagatttgaacgacactattgtcacaccgaaagtgtgttcgatgaaatgcctccaacatccggaggtttctatttgtgaaagtttgcaggctaagacaaatgatagctattcaaggagctagaggctgctcaacataaagcatcaacagcaacctctggaacagctgaaaatgctctactggaagctaagtcagtgactgatcttaaatctaaagatttggagaagaagaaaagtgagctttgttcactgatacaagaagttggagtgcttttgtgaaggcttttgcgaatcacttgaagtgttagtacttttgtgaatgattttgtaaagtgtttgcaaatatgtgcaaaacataataacatgtgtaggttttgtgaatgattttgttgtggtgcttgttgatggtttatgtgatgtggatctatcattgtgcaatactaattaaatttgtatatctatgtgattatctgtataaaaattggtgatttgtgatgcttttgtatatataacag

SEQ ID NO: 21087 - DNA, 1006 bp, Zea Mays
caacccccaaccctagccgccactaccctgctccctcccccaagccgccgccactccttctccctccccctttctctctcttctctctctaccgcccacctctctccacctcctctccccaagccgcgccaccaggagtgcagcagccgctagaagctgccatccgcccgccaggagttcagtcaatctcctgtctcctgagagccgccgcccgccgagtcccgctcgccgctcggtcgctcccgtgaggcgctcgatctcctcagcgccgcgcccacccagccacggtggagccacccttcgtcccgtcgtccggcggccggccctcaatccctcacgccctagcttctctgccatttccggtcagcccctcacgccctagctttcctatcaggcgctcggtcgctccctttgccacgcgctcctagcttctctggtcggctcttcctccgccatttccggttggatcctcctatgatgcagttgaagacccaagatttgaacgacactattgtcacaccgaaagtgtgttcgatgaaatgcctccaacatccggaggtttctatttgtgaaagtttgcaggctaagacaaatgatagctattcaaggagctagaggctgctcaacataaagcatcaacagcaacctctggaacagctgaaaatgctctactggaagctaagtcagtgactgatcttaaatctaaagatttggagaagaagaaaagtgagctttgttcactgatacaagaagttggagtgcttttgtgaaggcttttgcgaatcacttgaagtgttagtacttttgtgaatgattttgtaaagtgtttgcaaatatgtgcaaaacataataacatgtgtaggttttgtgaatgattttgttgtggtgcttgttgatggtttatgtgatgtggatctatcattgtgcaatactaattaaatttgtatatctatgtgattatctgtataaaaattggtgatttgtgatgcttttgtatatataacag

SEQ ID NO: 21088 - DNA, 2634 bp, Zea Mays
ctagccgccactaccctgctccctcccccaagccgccgccactccttctccctccccctttctctctcttctctctctaccgcccacctctctccacctcctctccccaagccgcgccaccaggagtgcagcagccgctagaagctgccatccgcccgccaggagttcagtcaatctcctgtctcctgagagccgccgcccgccgagtcccgctcgccgctcggtcgctcccgtgaggcgctcgatctcctcagcgccgcgcccacccagccacggtggagccacccttcgtcccgtcgtccggcggccggccctcaatccctcacgccctagcttctctgccatttccggtcagcccctcacgccctagctttcctatcaggcgctcggtcgctccctttgccacgcgctcctagcttctctggtcggctcttcctccgccatttccggttggatcctcctatgtgcagtgctcgacaaacggcaccagcgccgctgggtactgtcaccgcttcggtcgccggagcccggagatgtaaatgcgctggagttttcatgctgtcgctggaggaattgaggaagaaagtttggatgctaaggtaataatgcttggactggtacccagcatcgttcgtacttggaagaatacggactgtacagctggactagactggtcctccatccggtaattttttaattgctcaactatccagaccttttgtcttaactttgcaagttacacatatagtatggtatgcagtttctattgaccatattcattatatacagatgctttagctcctctagggaggcatccagtgtggattttgtgttaaaggataggttggaaaccacacgacagcaatatctgaatttcttatttgatgatgctcagatacataattttttgactgagccttgatattctcagaaggtgatgtcagtcttttcctaagagaagtaagtagtgttactccatccttactgctcggatgtcggatcattgactaccactgaggtcagcactggcattttttttaacgtagagctctgcagttcttacgctgacaccttataagtgaaagtgcaatatagaggccttgtgactatcttttcgtcagcaagagaacaacatcgatcttggtagttcttagttgcccctgtgtttcggaagtgttgtgtcagattattatatacccatttctagaaataaccaattgctcatattgcttacttagacaaataagcaatcttgaatctggaattttacagtgtacctgaactatcaactcccttcaacaaacttttttgtatggaacaggagcagcagcaccccccccccccccccgcctagtgaaaatattatgaacagaaaaagaacatcaaacagcaaagaaagaaaccaaaaagttcaacaaacattgcttatcatcaccagcaattattatccttattcctcctaatcagaaatcagctttaacgacctgtttggttgattgtctggtacttctctcaaaatatttatttgatttagctttaggagctatcttgtttccctatgcagggtcttcatttaaacttcctcaggattttatcagtatatattttacttttgcagtttaaacaatggaatgtagcatttatcggttccagctttcaatcttgcaaaatagaagcactgacagcgtgcttgttgcatgcattacctgtaataatgctccatttgtgttctttatttgtttagccactctaatcgacactgcccgtttatttacataggaacgtcaatcatatggatgcttcttcagtggaattatcatgtgaatccccatagtgcccaagctgtgaagcagtcatgattgatgcttgggctgttagctttatgtggtccagggggaggaaggataccttagaaactgtcagaaaagctcatttcatacttcatttttcatcatgttattttgttgcatgagacatttgtccaactgcgtagggaatgaaaattcaaattatttctgccactgattgggggatgtaattccaaacgttgtaaaaggcgactgtatctagtgattatttatggctgatgggaagagctggttgtgatgcagttgaagacccaagatttgaacgacactattgtcacaccgaaagtgtgttcgatgaaatgcctccaacatccggaggtttctatttgtgaaagtttgcaggctaagacaaatgatagctattcaaggagctagaggctgctcaacataaagcatcaacagcaacctctggaacagctgaaaatgctctactggaagctaagtcagtgactgatcttaaatctaaagatttggagaagaagaaaagtgagctttgttcactgatacaagaagttggagtgcttttgtgaaggcttttgcgaatcacttgaagtgttagtacttttgtgaatgattttgtaaagtgtttgcaaatatgtgcaaaacataataacatgtgtaggttttgtgaatgattttgttgtggtgcttgttgatggtttatgtgatgtggatctatcattgtgcaatactaattaaatttgtatatctatgtgattatctgtataaaaattggtgatttgtgatgcttttgtatatataacag

SEQ ID NO: 21089 - DNA, 1703 bp, Zea Mays
ccgccactaccctgctccctcccccaagccgccgccactccttctccctccccctttctctctcttctctctctaccgcccacctctctccacctcctctccccaagccgcgccaccaggagtgcagcagccgctagaagctgccatccgcccgccaggagttcagtcaatctcctgtctcctgagagccgccgcccgccgagtcccgctcgccgctcggtcgctcccgtgaggcgctcgatctcctcagcgccgcgcccacccagccacggtggagccacccttcgtcccgtcgtccggcggccggccctcaatccctcacgccctagcttctctgccatttccggtcagcccctcacgccctagctttcctatcaggcgctcggtcgctccctttgccacgcgctcctagcttctctggtcggctcttcctccgccatttccggttggatcctcctatgtgcagtgctcgacaaacggcaccagcgccgctgggtactgtcaccgcttcggtcgccggagcccggagatgtaaatgcgctggagttttcatgctgtcgctggaggaattgaggaagaaagtttgcctcgtggccaatgcaattgatgccctggaactgccgaagggatctgcaattgctattgacatgcctatggatgttacctaatttcaggatgctaaggtaataatgcttggactggtacccagcatcgttcgtacttggaagaatacggactgtacagctggactagactggtcctccatccggaacgtcaatcatatggatgcttcttcagtggaattatcatgtgaatccccatagtgcccaagctgtgaagcagtcatgattgatgcttgggctgttagctttatgtggtccagggggaggaaggataccttagaaactgtcagaaaagctcatttcatacttcatttttcatcatgttattttgttgcatgagacatttgtccaactgcgtagggaatgaaaattcaaattatttctgccactgattgggggatgtaattccaaacgttgtaaaaggcgactgtatctagtgattatttatggctgatgggaagagctggttgtggtatagtgtcagcagcgtatgatcggttggttcatcaaatctgtccttcgttgattagtttttttgttttgttttgcagatgcagttgaagacccaagatttgaacgacactattgtcacaccgaaagtgtgttcgatgaaatgcctccaacatccggaggtttctatttgtgaaagtttgcaggctaagacaaatgatagctattcaaggagctagaggctgctcaacataaagcatcaacagcaacctctggaacagctgaaaatgctctactggaagctaagtcagtgactgatcttaaatctaaagatttggagaagaagaaaagtgagctttgttcactgatacaagaagttggagtgcttttgtgaaggcttttgcgaatcacttgaagtgttagtacttttgtgaatgattttgtaaagtgtttgcaaatatgtgcaaaacataataacatgtgtaggttttgtgaatgattttgttgtggtgcttgttgatggtttatgtgatgtggatctatcattgtgcaatactaattaaatttgtatatctatgtgattatctgtataaaaattggtgatttgtgatgcttttgtatatataacag

SEQ ID NO: 21090 - DNA, 3863 bp, Zea Mays
ccgccactaccctgctccctcccccaagccgccgccactccttctccctccccctttctctctcttctctctctaccgcccacctctctccacctcctctccccaagccgcgccaccaggagtgcagcagccgctagaagctgccatccgcccgccaggagttcagtcaatctcctgtctcctgagagccgccgcccgccgagtcccgctcgccgctcggtcgctcccgtgaggcgctcgatctcctcagcgccgcgcccacccagccacggtggagccacccttcgtcccgtcgtccggcggccggccctcaatccctcacgccctagcttctctgccatttccggtcagcccctcacgccctagctttcctatcaggcgctcggtcgctccctttgccacgcgctcctagcttctctggtcggctcttcctccgccatttccggttggatcctcctatggtatgtgcatcataatccgtcacttttactgtgtatgcaatctcgatctgcctagttcggataagaagaacctatccgaagagcgcccgttaatgtctactagtggccaacgcgcgcctacgcgcggtgtttttacccttttctttcaaaaatatatgagaattgagtctctcgcaaggaagcatcaggccaatgggatttagtggccaaaacacgatactacctgtagaggcagagaagacccaaaattaaggtgctgctaatgatacgatgaatttagagaaaatgaaaaatgcaacgaaagcccctccaaaaaaattctaccattttcttttgattggccgagactgatgtgcatttgcctaaaagtctcacaaattcattcctcattcttcatgccgacattttaattgggaggacgttttgaattttggcgaatgggacttctccatccttgaaatccacccacacgccacaaaaccaaaacagaagtaagcaaaataaaaatttcgaagctagcatgccaaaaaagacgacgaagaaggacctgaatgatgccgtaggggtcaggccacgaacgatggttgcccgcgctccattgtggcaagcttctgttgctggcttggcgggtcgctggagcacgacctggagctcctcctcgacgatgtactccgtgatgcgggtacgtgcggtcgacgactgctgtagcgtcggagactccgagttggagcggctgctgctaatgctgccgagctccacacgaaagaagtgcttgagcggccagtggggcaacgcgatggaggcacgacacagcgggcatgatggctcgctgctcagcgcccgcggggaggagctaggatgctcgggtcggcgggcggcggcgcctcgacctaagcgagcgcggggccatgggcaggtctggtcaccattcagaacagggggctcggaggcgaaggcgagaggagagaagcgtatttgtttttttaaccctaccagccggtcgtctaaaaccaaaagtgctagccgcttcaagaaagtgcgaggggtaggaagcatagaaattaccagctaaacatgtgcgacggcggtgaagcgtccaaagtagatcgaacggctcctataaaaaggacgacgtggccacgctcattgggcgtcttgatgcagagctttaatatatagaaatatcaacgagtcgccgataaaaaaccaagcatgaatgtgcagtgcagtgctcgacaaacggcaccagcgccgctgggtactgtcaccgcttcggtcgccggagcccggagatgtaaatgcgctggagttttcatgctgtcgctggaggaattgaggaagaaagtttggtaaccgtatactgctctaagaagttttgccagttttgatcatagccaagcttttgattcatcataatctgatcctgtaaccaatttctctccctatgtctagagcagcctcgtggccaatgcaattgatgccctggaactgccgaagggatctgcaattgctattgacatgcctatggatgttacctaatttcaggatgctaaggtaataatgcttggactggtacccagcatcgttcgtacttggaagaatacggactgtacagctggactagactggtcctccatccggtaattttttaattgctcaactatccagaccttttgtcttaactttgcaagttacacatatagtatggtatgcagtttctattgaccatattcattatatacagatgctttagctcctctagggaggcatccagtgtggattttgtgttaaaggataggttggaaaccacacgacagcaatatctgaatttcttatttgatgatgctcagatacataattttttgactgagccttgatattctcagaaggtgatgtcagtcttttcctaagagaagtaagtagtgttactccatccttactgctcggatgtcggatcattgactaccactgaggtcagcactggcattttttttaacgtagagctctgcagttcttacgctgacaccttataagtgaaagtgcaatatagaggccttgtgactatcttttcgtcagcaagagaacaacatcgatcttggtagttcttagttgcccctgtgtttcggaagtgttgtgtcagattattatatacccatttctagaaataaccaattgctcatattgcttacttagacaaataagcaatcttgaatctggaattttacagtgtacctgaactatcaactcccttcaacaaacttttttgtatggaacaggagcagcagcaccccccccccccccccgcctagtgaaaatattatgaacagaaaaagaacatcaaacagcaaagaaagaaaccaaaaagttcaacaaacattgcttatcatcaccagcaattattatccttattcctcctaatcagaaatcagctttaacgacctgtttggttgattgtctggtacttctctcaaaatatttatttgatttagctttaggagctatcttgtttccctatgcagggtcttcatttaaacttcctcaggattttatcagtatatattttacttttgcagtttaaacaatggaatgtagcatttatcggttccagctttcaatcttgcaaaatagaagcactgacagcgtgcttgttgcatgcattacctgtaataatgctccatttgtgttctttatttgtttagccactctaatcgacactgcccgtttatttacataggaacgtcaatcatatggatgcttcttcagtggaattatcatgtgaatccccatagtgcccaagctgtgaagcagtcatgattgatgcttgggctgttagctttatgtggtccagggggaggaaggataccttagaaactatgcagttgaagacccaagatttgaacgacactattgtcacaccgaaagtgtgttcgatgaaatgcctccaacatccggaggtttctatttgtgaaagtttgcaggctaagacaaatgatagctattcaaggagctagaggctgctcaacataaagcatcaacagcaacctctggaacagctgaaaatgctctactggaagctaagtcagtgactgatcttaaatctaaagatttggagaagaagaaaagtgagctttgttcactgatacaagaagttggagtgcttttgtgaaggcttttgcgaatcacttgaagtgttagtacttttgtgaatgattttgtaaagtgtttgcaaatatgtgcaaaacataataacatgtgtaggttttgtgaatgattttgttgtggtgcttgttgatggtttatgtgatgtggatctatcattgtgcaatactaattaaatttgtatatctatgtgattatctgtataaaaattggtgatttgtgatgcttttgtatatataacag

SEQ ID NO: 21091 - DNA, 3838 bp, Zea Mays
ccgccactaccctgctccctcccccaagccgccgccactccttctccctccccctttctctctcttctctctctaccgcccacctctctccacctcctctccccaagccgcgccaccaggagtgcagcagccgctagaagctgccatccgcccgccaggagttcagtcaatctcctgtctcctgagagccgccgcccgccgagtcccgctcgccgctcggtcgctcccgtgaggcgctcgatctcctcagcgccgcgcccacccagccacggtggagccacccttcgtcccgtcgtccggcggccggccctcaatccctcacgccctagcttctctgccatttccggtcagcccctcacgccctagctttcctatcaggcgctcggtcgctccctttgccacgcgctcctagcttctctggtcggctcttcctccgccatttccggttggatcctcctatggtatgtgcatcataatccgtcacttttactgtgtatgcaatctcgatctgcctagttcggataagaagaacctatccgaagagcgcccgttaatgtctactagtggccaacgcgcgcctacgcgcggtgtttttacccttttctttcaaaaatatatgagaattgagtctctcgcaaggaagcatcaggccaatgggatttagtggccaaaacacgatactacctgtagaggcagagaagacccaaaattaaggtgctgctaatgatacgatgaatttagagaaaatgaaaaatgcaacgaaagcccctccaaaaaaattctaccattttcttttgattggccgagactgatgtgcatttgcctaaaagtctcacaaattcattcctcattcttcatgccgacattttaattgggaggacgttttgaattttggcgaatgggacttctccatccttgaaatccacccacacgccacaaaaccaaaacagaagtaagcaaaataaaaatttcgaagctagcatgccaaaaaagacgacgaagaaggacctgaatgatgccgtaggggtcaggccacgaacgatggttgcccgcgctccattgtggcaagcttctgttgctggcttggcgggtcgctggagcacgacctggagctcctcctcgacgatgtactccgtgatgcgggtacgtgcggtcgacgactgctgtagcgtcggagactccgagttggagcggctgctgctaatgctgccgagctccacacgaaagaagtgcttgagcggccagtggggcaacgcgatggaggcacgacacagcgggcatgatggctcgctgctcagcgcccgcggggaggagctaggatgctcgggtcggcgggcggcggcgcctcgacctaagcgagcgcggggccatgggcaggtctggtcaccattcagaacagggggctcggaggcgaaggcgagaggagagaagcgtatttgtttttttaaccctaccagccggtcgtctaaaaccaaaagtgctagccgcttcaagaaagtgcgaggggtaggaagcatagaaattaccagctaaacatgtgcgacggcggtgaagcgtccaaagtagatcgaacggctcctataaaaaggacgacgtggccacgctcattgggcgtcttgatgcagagctttaatatatagaaatatcaacgagtcgccgataaaaaaccaagcatgaatgtgcagtgcagtgctcgacaaacggcaccagcgccgctgggtactgtcaccgcttcggtcgccggagcccggagatgtaaatgcgctggagttttcatgctgtcgctggaggaattgaggaagaaagtttgcctcgtggccaatgcaattgatgccctggaactgccgaagggatctgcaattgctattgacatgcctatggatgttacctaatttcaggatgctaaggtaataatgcttggactggtacccagcatcgttcgtacttggaagaatacggactgtacagctggactagactggtcctccatccgatgctttagctcctctagggaggcatccagtgtggattttgtgttaaaggataggttggaaaccacacgacagcaatatctgaatttcttatttgatgatgctcagatacataattttttgactgagccttgatattctcagaaggtgatgtcagtcttttcctaagagaagtaagtagtgttactccatccttactgctcggatgtcggatcattgactaccactgaggtcagcactggcattttttttaacgtagagctctgcagttcttacgctgacaccttataagtgaaagtgcaatatagaggccttgtgactatcttttcgtcagcaagagaacaacatcgatcttggtagttcttagttgcccctgtgtttcggaagtgttgtgtcagattattatatacccatttctagaaataaccaattgctcatattgcttacttagacaaataagcaatcttgaatctggaattttacagtgtacctgaactatcaactcccttcaacaaacttttttgtatggaacaggagcagcagcaccccccccccccccccgcctagtgaaaatattatgaacagaaaaagaacatcaaacagcaaagaaagaaaccaaaaagttcaacaaacattgcttatcatcaccagcaattattatccttattcctcctaatcagaaatcagctttaacgacctgtttggttgattgtctggtacttctctcaaaatatttatttgatttagctttaggagctatcttgtttccctatgcagggtcttcatttaaacttcctcaggattttatcagtatatattttacttttgcagtttaaacaatggaatgtagcatttatcggttccagctttcaatcttgcaaaatagaagcactgacagcgtgcttgttgcatgcattacctgtaataatgctccatttgtgttctttatttgtttagccactctaatcgacactgcccgtttatttacataggaacgtcaatcatatggatgcttcttcagtggaattatcatgtgaatccccatagtgcccaagctgtgaagcagtcatgattgatgcttgggctgttagctttatgtggtccagggggaggaaggataccttagaaactgtcagaaaagctcatttcatacttcatttttcatcatgttattttgttgcatgagacatttgtccaactgcgtagggaatgaaaattcaaattatttctgccactgattgggggatgtaattccaaacgttgtaaaaggcgactgtatctagtgattatttatggctgatgggaagagctggttgtgatgcagttgaagacccaagatttgaacgacactattgtcacaccgaaagtgtgttcgatgaaatgcctccaacatccggaggtttctatttgtgaaagtttgcaggctaagacaaatgatagctattcaaggagctagaggctgctcaacataaagcatcaacagcaacctctggaacagctgaaaatgctctactggaagctaagtcagtgactgatcttaaatctaaagatttggagaagaagaaaagtgagctttgttcactgatacaagaagttggagtgcttttgtgaaggcttttgcgaatcacttgaagtgttagtacttttgtgaatgattttgtaaagtgtttgcaaatatgtgcaaaacataataacatgtgtaggttttgtgaatgattttgttgtggtgcttgttgatggtttatgtgatgtggatctatcattgtgcaatactaattaaatttgtatatctatgtgattatctgtataaaaattggtgatttgtgatgcttttgtatatataacag

SEQ ID NO: 21092 - DNA, 2718 bp, Zea Mays
ccgccactaccctgctccctcccccaagccgccgccactccttctccctccccctttctctctcttctctctctaccgcccacctctctccacctcctctccccaagccgcgccaccaggagtgcagcagccgctagaagctgccatccgcccgccaggagttcagtcaatctcctgtctcctgagagccgccgcccgccgagtcccgctcgccgctcggtcgctcccgtgaggcgctcgatctcctcagcgccgcgcccacccagccacggtggagccacccttcgtcccgtcgtccggcggccggccctcaatccctcacgccctagcttctctgccatttccggtcagcccctcacgccctagctttcctatcaggcgctcggtcgctccctttgccacgcgctcctagcttctctggtcggctcttcctccgccatttccggttggatcctcctatgtgcagtgctcgacaaacggcaccagcgccgctgggtactgtcaccgcttcggtcgccggagcccggagatgtaaatgcgctggagttttcatgctgtcgctggaggaattgaggaagaaagtttgcctcgtggccaatgcaattgatgccctggaactgccgaagggatctgcaattgctattgacatgcctatggatgttacctaatttcaggatgctaaggtaataatgcttggactggtacccagcatcgttcgtacttggaagaatacggactgtacagctggactagactggtcctccatccggtaattttttaattgctcaactatccagaccttttgtcttaactttgcaagttacacatatagtatggtatgcagtttctattgaccatattcattatatacagatgctttagctcctctagggaggcatccagtgtggattttgtgttaaaggataggttggaaaccacacgacagcaatatctgaatttcttatttgatgatgctcagatacataattttttgactgagccttgatattctcagaaggtgatgtcagtcttttcctaagagaagtaagtagtgttactccatccttactgctcggatgtcggatcattgactaccactgaggtcagcactggcattttttttaacgtagagctctgcagttcttacgctgacaccttataagtgaaagtgcaatatagaggccttgtgactatcttttcgtcagcaagagaacaacatcgatcttggtagttcttagttgcccctgtgtttcggaagtgttgtgtcagattattatatacccatttctagaaataaccaattgctcatattgcttacttagacaaataagcaatcttgaatctggaattttacagtgtacctgaactatcaactcccttcaacaaacttttttgtatggaacaggagcagcagcaccccccccccccccccgcctagtgaaaatattatgaacagaaaaagaacatcaaacagcaaagaaagaaaccaaaaagttcaacaaacattgcttatcatcaccagcaattattatccttattcctcctaatcagaaatcagctttaacgacctgtttggttgattgtctggtacttctctcaaaatatttatttgatttagctttaggagctatcttgtttccctatgcagggtcttcatttaaacttcctcaggattttatcagtatatattttacttttgcagtttaaacaatggaatgtagcatttatcggttccagctttcaatcttgcaaaatagaagcactgacagcgtgcttgttgcatgcattacctgtaataatgctccatttgtgttctttatttgtttagccactctaatcgacactgcccgtttatttacataggaacgtcaatcatatggatgcttcttcagtggaattatcatgtgaatccccatagtgcccaagctgtgaagcagtcatgattgatgcttgggctgttagctttatgtggtccagggggaggaaggataccttagaaactgtcagaaaagctcatttcatacttcatttttcatcatgttattttgttgcatgagacatttgtccaactgcgtagggaatgaaaattcaaattatttctgccactgattgggggatgtaattccaaacgttgtaaaaggcgactgtatctagtgattatttatggctgatgggaagagctggttgtgatgcagttgaagacccaagatttgaacgacactattgtcacaccgaaagtgtgttcgatgaaatgcctccaacatccggaggtttctatttgtgaaagtttgcaggctaagacaaatgatagctattcaaggagctagaggctgctcaacataaagcatcaacagcaacctctggaacagctgaaaatgctctactggaagctaagtcagtgactgatcttaaatctaaagatttggagaagaagaaaagtgagctttgttcactgatacaagaagttggagtgcttttgtgaaggcttttgcgaatcacttgaagtgttagtacttttgtgaatgattttgtaaagtgtttgcaaatatgtgcaaaacataataacatgtgtaggttttgtgaatgattttgttgtggtgcttgttgatggtttatgtgatgtggatctatcattgtgcaatactaattaaatttgtatatctatgtgattatctgtataaaaattggtgatttgtgatgcttttgtatatataacag

SEQ ID NO: 21093 - DNA, 2584 bp, Zea Mays
ccgccactaccctgctccctcccccaagccgccgccactccttctccctccccctttctctctcttctctctctaccgcccacctctctccacctcctctccccaagccgcgccaccaggagtgcagcagccgctagaagctgccatccgcccgccaggagttcagtcaatctcctgtctcctgagagccgccgcccgccgagtcccgctcgccgctcggtcgctcccgtgaggcgctcgatctcctcagcgccgcgcccacccagccacggtggagccacccttcgtcccgtcgtccggcggccggccctcaatccctcacgccctagcttctctgccatttccggtcagcccctcacgccctagctttcctatcaggcgctcggtcgctccctttgccacgcgctcctagcttctctggtcggctcttcctccgccatttccggttggatcctcctatggatgctaaggtaataatgcttggactggtacccagcatcgttcgtacttggaagaatacggactgtacagctggactagactggtcctccatccggtaattttttaattgctcaactatccagaccttttgtcttaactttgcaagttacacatatagtatggtatgcagtttctattgaccatattcattatatacagatgctttagctcctctagggaggcatccagtgtggattttgtgttaaaggataggttggaaaccacacgacagcaatatctgaatttcttatttgatgatgctcagatacataattttttgactgagccttgatattctcagaaggtgatgtcagtcttttcctaagagaagtaagtagtgttactccatccttactgctcggatgtcggatcattgactaccactgaggtcagcactggcattttttttaacgtagagctctgcagttcttacgctgacaccttataagtgaaagtgcaatatagaggccttgtgactatcttttcgtcagcaagagaacaacatcgatcttggtagttcttagttgcccctgtgtttcggaagtgttgtgtcagattattatatacccatttctagaaataaccaattgctcatattgcttacttagacaaataagcaatcttgaatctggaattttacagtgtacctgaactatcaactcccttcaacaaacttttttgtatggaacaggagcagcagcaccccccccccccccccgcctagtgaaaatattatgaacagaaaaagaacatcaaacagcaaagaaagaaaccaaaaagttcaacaaacattgcttatcatcaccagcaattattatccttattcctcctaatcagaaatcagctttaacgacctgtttggttgattgtctggtacttctctcaaaatatttatttgatttagctttaggagctatcttgtttccctatgcagggtcttcatttaaacttcctcaggattttatcagtatatattttacttttgcagtttaaacaatggaatgtagcatttatcggttccagctttcaatcttgcaaaatagaagcactgacagcgtgcttgttgcatgcattacctgtaataatgctccatttgtgttctttatttgtttagccactctaatcgacactgcccgtttatttacataggaacgtcaatcatatggatgcttcttcagtggaattatcatgtgaatccccatagtgcccaagctgtgaagcagtcatgattgatgcttgggctgttagctttatgtggtccagggggaggaaggataccttagaaactgtcagaaaagctcatttcatacttcatttttcatcatgttattttgttgcatgagacatttgtccaactgcgtagggaatgaaaattcaaattatttctgccactgattgggggatgtaattccaaacgttgtaaaaggcgactgtatctagtgattatttatggctgatgggaagagctggttgtggtatagtgtcagcagcgtatgatcggttggttcatcaaatctgtccttcgttgattagtttttttgttttgttttgcagatgcagttgaagacccaagatttgaacgacactattgtcacaccgaaagtgtgttcgatgaaatgcctccaacatccggaggtttctatttgtgaaagtttgcaggctaagacaaatgatagctattcaaggagctagaggctgctcaacataaagcatcaacagcaacctctggaacagctgaaaatgctctactggaagctaagtcagtgactgatcttaaatctaaagatttggagaagaagaaaagtgagctttgttcactgatacaagaagttggagtgcttttgtgaaggcttttgcgaatcacttgaagtgttagtacttttgtgaatgattttgtaaagtgtttgcaaatatgtgcaaaacataataacatgtgtaggttttgtgaatgattttgttgtggtgcttgttgatggtttatgtgatgtggatctatcattgtgcaatactaattaaatttgtatatctatgtgattatctgtataaaaattggtgatttgtgatgcttttgtatatataacag

SEQ ID NO: 21094 - DNA, 2639 bp, Zea Mays
ccgccactaccctgctccctcccccaagccgccgccactccttctccctccccctttctctctcttctctctctaccgcccacctctctccacctcctctccccaagccgcgccaccaggagtgcagcagccgctagaagctgccatccgcccgccaggagttcagtcaatctcctgtctcctgagagccgccgcccgccgagtcccgctcgccgctcggtcgctcccgtgaggcgctcgatctcctcagcgccgcgcccacccagccacggtggagccacccttcgtcccgtcgtccggcggccggccctcaatccctcacgccctagcttctctgccatttccggtcagcccctcacgccctagctttcctatcaggcgctcggtcgctccctttgccacgcgctcctagcttctctggtcggctcttcctccgccatttccggttggatcctcctatgtgcagtgctcgacaaacggcaccagcgccgctgggtactgtcaccgcttcggtcgccggagcccggagatgtaaatgcgctggagttttcatgctgtcgctggaggaattgaggaagaaagtttggtaaccgtatactgctctaagaagttttgccagttttgatcatagccaagcttttgattcatcataatctgatcctgtaaccaatttctctccctatgtctagagcagcctcgtggccaatgcaattgatgccctggaactgccgaagggatctgcaattgctattgacatgcctatggatgttacctaatttcaggatgctaaggtaataatgcttggactggtacccagcatcgttcgtacttggaagaatacggactgtacagctggactagactggtcctccatccggtaattttttaattgctcaactatccagaccttttgtcttaactttgcaagttacacatatagtatggtatgcagtttctattgaccatattcattatatacagatgctttagctcctctagggaggcatccagtgtggattttgtgttaaaggataggttggaaaccacacgacagcaatatctgaatttcttatttgatgatgctcagatacataattttttgactgagccttgatattctcagaaggtgatgtcagtcttttcctaagagaagtaagtagtgttactccatccttactgctcggatgtcggatcattgactaccactgaggtcagcactggcattttttttaacgtagagctctgcagttcttacgctgacaccttataagtgaaagtgcaatatagaggccttgtgactatcttttcgtcagcaagagaacaacatcgatcttggtagttcttagttgcccctgtgtttcggaagtgttgtgtcagattattatatacccatttctagaaataaccaattgctcatattgcttacttagacaaataagcaatcttgaatctggaattttacagtgtacctgaactatcaactcccttcaacaaacttttttgtatggaacaggagcagcagcaccccccccccccccccgcctagtgaaaatattatgaacagaaaaagaacatcaaacagcaaagaaagaaaccaaaaagttcaacaaacattgcttatcatcaccagcaattattatccttattcctcctaatcagaaatcagctttaacgacctgtttggttgattgtctggtacttctctcaaaatatttatttgatttagctttaggagctatcttgtttccctatgcagggtcttcatttaaacttcctcaggattttatcagtatatattttacttttgcagtttaaacaatggaatgtagcatttatcggttccagctttcaatcttgcaaaatagaagcactgacagcgtgcttgttgcatgcattacctgtaataatgctccatttgtgttctttatttgtttagccactctaatcgacactgcccgtttatttacataggaacgtcaatcatatggatgcttcttcagtggaattatcatgtgaatccccatagtgcccaagctgtgaagcagtcatgattgatgcttgggctgttagctttatgtggtccagggggaggaaggataccttagaaactatgcagttgaagacccaagatttgaacgacactattgtcacaccgaaagtgtgttcgatgaaatgcctccaacatccggaggtttctatttgtgaaagtttgcaggctaagacaaatgatagctattcaaggagctagaggctgctcaacataaagcatcaacagcaacctctggaacagctgaaaatgctctactggaagctaagtcagtgactgatcttaaatctaaagatttggagaagaagaaaagtgagctttgttcactgatacaagaagttggagtgcttttgtgaaggcttttgcgaatcacttgaagtgttagtacttttgtgaatgattttgtaaagtgtttgcaaatatgtgcaaaacataataacatgtgtaggttttgtgaatgattttgttgtggtgcttgttgatggtttatgtgatgtggatctatcattgtgcaatactaattaaatttgtatatctatgtgattatctgtataaaaattggtgatttgtgatgcttttgtatatataacag

SEQ ID NO: 21095 - DNA, 2522 bp, Zea Mays
ccgccactaccctgctccctcccccaagccgccgccactccttctccctccccctttctctctcttctctctctaccgcccacctctctccacctcctctccccaagccgcgccaccaggagtgcagcagccgctagaagctgccatccgcccgccaggagttcagtcaatctcctgtctcctgagagccgccgcccgccgagtcccgctcgccgctcggtcgctcccgtgaggcgctcgatctcctcagcgccgcgcccacccagccacggtggagccacccttcgtcccgtcgtccggcggccggccctcaatccctcacgccctagcttctctgccatttccggtcagcccctcacgccctagctttcctatcaggcgctcggtcgctccctttgccacgcgctcctagcttctctggtcggctcttcctccgccatttccggttggatcctcctatggtatgtgcatcataatccgtcacttttactgtgtatgcaatctcgatctgcctagttcggataagaagaacctatccgaagagcgcccgttaatgtctactagtggccaacgcgcgcctacgcgcggtgtttttacccttttctttcaaaaatatatgagaattgagtctctcgcaaggaagcatcaggccaatgggatttagtggccaaaacacgatactacctgtagaggcagagaagacccaaaattaaggtgctgctaatgatacgatgaatttagagaaaatgaaaaatgcaacgaaagcccctccaaaaaaattctaccattttcttttgattggccgagactgatgtgcatttgcctaaaagtctcacaaattcattcctcattcttcatgccgacattttaattgggaggacgttttgaattttggcgaatgggacttctccatccttgaaatccacccacacgccacaaaaccaaaacagaagtaagcaaaataaaaatttcgaagctagcatgccaaaaaagacgacgaagaaggacctgaatgatgccgtaggggtcaggccacgaacgatggttgcccgcgctccattgtggcaagcttctgttgctggcttggcgggtcgctggagcacgacctggagctcctcctcgacgatgtactccgtgatgcgggtacgtgcggtcgacgactgctgtagcgtcggagactccgagttggagcggctgctgctaatgctgccgagctccacacgaaagaagtgcttgagcggccagtggggcaacgcgatggaggcacgacacagcgggcatgatggctcgctgctcagcgcccgcggggaggagctaggatgctcgggtcggcgggcggcggcgcctcgacctaagcgagcgcggggccatgggcaggtctggtcaccattcagaacagggggctcggaggcgaaggcgagaggagagaagcgtatttgtttttttaaccctaccagccggtcgtctaaaaccaaaagtgctagccgcttcaagaaagtgcgaggggtaggaagcatagaaattaccagctaaacatgtgcgacggcggtgaagcgtccaaagtagatcgaacggctcctataaaaaggacgacgtggccacgctcattgggcgtcttgatgcagagctttaatatatagaaatatcaacgagtcgccgataaaaaaccaagcatgaatgtgcagtgcagtgctcgacaaacggcaccagcgccgctgggtactgtcaccgcttcggtcgccggagcccggagatgtaaatgcgctggagttttcatgctgtcgctggaggaattgaggaagaaagtttgcctcgtggccaatgcaattgatgccctggaactgccgaagggatctgcaattgctattgacatgcctatggatgttacctaatttcaggatgctaaggtaataatgcttggactggtacccagcatcgttcgtacttggaagaatacggactgtacagctggactagactggtcctccatccgatgcagttgaagacccaagatttgaacgacactattgtcacaccgaaagtgtgttcgatgaaatgcctccaacatccggaggtttctatttgtgaaagtttgcaggctaagacaaatgatagctattcaaggagctagaggctgctcaacataaagcatcaacagcaacctctggaacagctgaaaatgctctactggaagctaagtcagtgactgatcttaaatctaaagatttggagaagaagaaaagtgagctttgttcactgatacaagaagttggagtgcttttgtgaaggcttttgcgaatcacttgaagtgttagtacttttgtgaatgattttgtaaagtgtttgcaaatatgtgcaaaacataataacatgtgtaggttttgtgaatgattttgttgtggtgcttgttgatggtttatgtgatgtggatctatcattgtgcaatactaattaaatttgtatatctatgtgattatctgtataaaaattggtgatttgtgatgcttttgtatatataacag

SEQ ID NO: 21096 - DNA, 2587 bp, Zea Mays
ccgccactaccctgctccctcccccaagccgccgccactccttctccctccccctttctctctcttctctctctaccgcccacctctctccacctcctctccccaagccgcgccaccaggagtgcagcagccgctagaagctgccatccgcccgccaggagttcagtcaatctcctgtctcctgagagccgccgcccgccgagtcccgctcgccgctcggtcgctcccgtgaggcgctcgatctcctcagcgccgcgcccacccagccacggtggagccacccttcgtcccgtcgtccggcggccggccctcaatccctcacgccctagcttctctgccatttccggtcagcccctcacgccctagctttcctatcaggcgctcggtcgctccctttgccacgcgctcctagcttctctggtcggctcttcctccgccatttccggttggatcctcctatgtgcagtgctcgacaaacggcaccagcgccgctgggtactgtcaccgcttcggtcgccggagcccggagatgtaaatgcgctggagttttcatgctgtcgctggaggaattgaggaagaaagtttgcctcgtggccaatgcaattgatgccctggaactgccgaagggatctgcaattgctattgacatgcctatggatgttacctaatttcaggatgctaaggtaataatgcttggactggtacccagcatcgttcgtacttggaagaatacggactgtacagctggactagactggtcctccatccgatacataattttttgactgagccttgatattctcagaaggtgatgtcagtcttttcctaagagaagtaagtagtgttactccatccttactgctcggatgtcggatcattgactaccactgaggtcagcactggcattttttttaacgtagagctctgcagttcttacgctgacaccttataagtgaaagtgcaatatagaggccttgtgactatcttttcgtcagcaagagaacaacatcgatcttggtagttcttagttgcccctgtgtttcggaagtgttgtgtcagattattatatacccatttctagaaataaccaattgctcatattgcttacttagacaaataagcaatcttgaatctggaattttacagtgtacctgaactatcaactcccttcaacaaacttttttgtatggaacaggagcagcagcaccccccccccccccccgcctagtgaaaatattatgaacagaaaaagaacatcaaacagcaaagaaagaaaccaaaaagttcaacaaacattgcttatcatcaccagcaattattatccttattcctcctaatcagaaatcagctttaacgacctgtttggttgattgtctggtacttctctcaaaatatttatttgatttagctttaggagctatcttgtttccctatgcagggtcttcatttaaacttcctcaggattttatcagtatatattttacttttgcagtttaaacaatggaatgtagcatttatcggttccagctttcaatcttgcaaaatagaagcactgacagcgtgcttgttgcatgcattacctgtaataatgctccatttgtgttctttatttgtttagccactctaatcgacactgcccgtttatttacataggaacgtcaatcatatggatgcttcttcagtggaattatcatgtgaatccccatagtgcccaagctgtgaagcagtcatgattgatgcttgggctgttagctttatgtggtccagggggaggaaggataccttagaaactgtcagaaaagctcatttcatacttcatttttcatcatgttattttgttgcatgagacatttgtccaactgcgtagggaatgaaaattcaaattatttctgccactgattgggggatgtaattccaaacgttgtaaaaggcgactgtatctagtgattatttatggctgatgggaagagctggttgtggtatagtgtcagcagcgtatgatcggttggttcatcaaatctgtccttcgttgattagtttttttgttttgttttgcagatgcagttgaagacccaagatttgaacgacactattgtcacaccgaaagtgtgttcgatgaaatgcctccaacatccggaggtttctatttgtgaaagtttgcaggctaagacaaatgatagctattcaaggagctagaggctgctcaacataaagcatcaacagcaacctctggaacagctgaaaatgctctactggaagctaagtcagtgactgatcttaaatctaaagatttggagaagaagaaaagtgagctttgttcactgatacaagaagttggagtgcttttgtgaaggcttttgcgaatcacttgaagtgttagtacttttgtgaatgattttgtaaagtgtttgcaaatatgtgcaaaacataataacatgtgtaggttttgtgaatgattttgttgtggtgcttgttgatggtttatgtgatgtggatctatcattgtgcaatactaattaaatttgtatatctatgtgattatctgtataaaaattggtgatttgtgatgcttttgtatatataacag

SEQ ID NO: 21097 - DNA, 1401 bp, Zea Mays
ccgccactaccctgctccctcccccaagccgccgccactccttctccctccccctttctctctcttctctctctaccgcccacctctctccacctcctctccccaagccgcgccaccaggagtgcagcagccgctagaagctgccatccgcccgccaggagttcagtcaatctcctgtctcctgagagccgccgcccgccgagtcccgctcgccgctcggtcgctcccgtgaggcgctcgatctcctcagcgccgcgcccacccagccacggtggagccacccttcgtcccgtcgtccggcggccggccctcaatccctcacgccctagcttctctgccatttccggtcagcccctcacgccctagctttcctatcaggcgctcggtcgctccctttgccacgcgctcctagcttctctggtcggctcttcctccgccatttccggttggatcctcctatgtgctcgacaaacggcaccagcgccgctgggtactgtcaccgcttcggtcgccggagcccggagatgtaaatgcgctggagttttcatgctgtcgctggaggaattgaggaagaaagtttggtaaccgtatactgctctaagaagttttgccagttttgatcatagccaagcttttgattcatcataatctgatcctgtaaccaatttctctccctatgtctagagcagcctcgtggccaatgcaattgatgccctggaactgccgaagggatctgcaattgctattgacatgcctatggatgttacctaatttcaggatgctaaggtaataatgcttggactggtacccagcatcgttcgtacttggaagaatacggactgtacagctggactagactggtcctccatccgatgcagttgaagacccaagatttgaacgacactattgtcacaccgaaagtgtgttcgatgaaatgcctccaacatccggaggtttctatttgtgaaagtttgcaggctaagacaaatgatagctattcaaggagctagaggctgctcaacataaagcatcaacagcaacctctggaacagctgaaaatgctctactggaagctaagtcagtgactgatcttaaatctaaagatttggagaagaagaaaagtgagctttgttcactgatacaagaagttggagtgcttttgtgaaggcttttgcgaatcacttgaagtgttagtacttttgtgaatgattttgtaaagtgtttgcaaatatgtgcaaaacataataacatgtgtaggttttgtgaatgattttgttgtggtgcttgttgatggtttatgtgatgtggatctatcattgtgcaatactaattaaatttgtatatctatgtgattatctgtataaaaattggtgatttgtgatgcttttgtatatataacag

SEQ ID NO: 21098 - DNA, 2190 bp, Zea Mays
ggggtttctccggtatttatacacaagcgatatctggctcttggacgcagcgatggagctaccgatgcagtcagtctccagcttgctgctcgccggtccttcgcctagctcgccggaagccgcggagacgacgccgccaccgatgcagccgctacaatgtcaacatgagcgattggtgggcaacatgtgcccttctctctatctcgccgtctacagagggcggatagcggacgtcacggcgctgcttctggaacaacccgccgttgcaatagattgtcaagccactaccacgccgggcactgctattatgcacggacagtgcgacatacttgagttgacagcggagaggaacaccgctctacatgtggctgcggagcaagggcaccacgagctgatccgggagctctacttcaggttctcagaccagggcctcctcaatcgcctgaactcggcgctggacacgccgctgcattccgcggcgagggcagggcacgtcagggcagtcgctgttctcttcgagctggcgagggatcgtggcgtgaacattctgggatgcaaaaatgaggcaggggacacggccctgcacctggcggcgaggcacgggcacggtgcagcggtggaggtcctgatctcggcggcggcagaaccggcggccgagctgaacaacgccggcgtgtcgcctctgtacctggcagtaatcagcggctcggtgcaagcagtcagagcgattaccacgtgcaaggacgcatcatcgctggggccaggcgcacagaatgctctgcacgctgccgtcttccagagctcagaaatggttcacctgctattggaatggaggccagctctggccgaccaagtcgacagcggcggcagcagcccgctccatttcgcttcgtccgacggcgaccgcacaatcgtgaaggcgatcctgcgtgcctcaccaccaagcacagtttacaagaaggactcggacggcctgtcggcccttcacgtcgcggcgcggatgggacatcgccgcgtcgtgaaggacatgctacggagctatcccgacgccgccgagctccgcgacggtaacggcggtaccttcgtccacgcagcagccagggagaggcgctcctcggtggtgtcgctcgctatcagcaactccatgctgcgcggcgtcctggacgcgcaggacagggacgggaacacgccgctccacctcgcggtggcggtgggatcgaccggcgacgtggaggccctgctacgggagggcaaggtgcgtgccgacgttctgaacaacgacggtcacacggcgttggatctcgccgccagatcgaacgccggtttcttcgccacgatcaacctggtggtggcgttagtcgccttcggggcacggctccggccgcagaggcaggaccgcctggagcagtggggcggccgcgacatggtgcggaaggggatacagaacacgtccgacagcctcgcggtggtggccggcctcattgtcgctgcagcgttcgccgccgggttcaacttgcccggtgggtacggagacgacggcaaggcgaacctcaagcacgagattgtcttcaagaccttcctgttcttgaacaccggggccgtggcgacgtccatgctggcggtggcgctgctcgtctatgggaaggcgtcttcgcactccgacggctcgtggaagaccttcgcggcggcgctgcacctgctgtgggtgtcgctcgtctgcatgatgctggcctttcaggcggctctgttttccgtggcgacaacaagggcactaacttacgggttcctagttgtatacatgtgcatctttatcttgcaggtgcgtatcgcgaagtggctggggcctgacacgaggttgcgcacgatttggaggtttcactggaaagggaggcatgtcgacatcaaacggcagtatccgttcgccaacgctttcgtagtcaatgtatatctgtttacagctctaagtttgctagtgcctattggttttgaagtcatgtttctattaggtgggagatccatcgatacttcctcttaggctgtaatcggatcgaaaacaaaacagacggatattttttgaatcatatttatttttatatttttttctctttagattcggatcggatatatattatcgagttatgtcggataagattagaataaatatcgacattttaaaaatccaactttgag

SEQ ID NO: 21099 - DNA, 1751 bp, Zea Mays
aaaacactgtcctgtctggtcaggtctcgaaccggcccgagagcgcaatgcaccagcaatggaggcgagcggcagtcggggtccggagggggagcccggtccccaagcgccgcagaggcgtcggcgtggctactggcttcgggtttacggcgcagtcgctgaacgacgacatcctccggtccgtcttctcccggctggacgaccacttcgacctcgcccgctgctccgccgtctgcggctcatggaataggataattgaaacagctcatctcatgagggatatgtattacaaaaggaacccaccagcaagaggttcaagctctaatatttcagtaaaaagttactttgagatgcttgccatggatgagcatgcatctgctttctctagaggacctgctgaagcttttcagtggattgggcacccaatgagggctaccttgtgccgtatgaagagtggtttaattttaactggagttggagataagattgtaggtttgaccagctcccagatttgcatatggagacgcagtgaaccaagaagcatatttcaatctggtggagcctcattcaatcatgggttatgcatgagttttgctgatccggaggttgtaattggttgtgaggatggtcgagcctttgtatatgatatgtacagcaggagttgctcacgtatttatcggcttcactcctctcctgtgacatgtttgatgataacggatgaccagctgattgttggtggatcaacttttggaaatgtagctattgcagatcaaacctcagggcagaagttaggtgttctaaaatcagatcatggaccattggcaataagatccttatcttcctgcacaaattcacacatgatatttgctggttcgtcagctggttatgcacattgctgggacttaaggactttgaggcctctctgggaaaaaagagtcagcccaaatgtcatctacagcacacgtcatttgcccggtgacacggcaacgctggcagttggaggcattgacggcgtgctccgcgttatatgccaaaggactggtgacatcattcgcagtcttgtcgttgacgcagatctcccagcagaagccacatctagatcccggcagcaaatagagaagaaacgtgttcgaaggattgaccctgatgcacagttggacggtatcccgaggcgtttgcgccctcagattaccagcctatcggttgggatgaagaagattgtgaccacgcatggtgaaaactacattagggtttggaagtttcgcatgaaaagttcgtaaaaagggcgagatgatggtaatctagttatctggtgtaacctgtactgtagtctactgaataagatggcgtggtaccgtggtgtgtcacctgcgcttgtaataatagcctgaaacatagttcatttgtacacttgtagtcctctttaggatactattagcaattaaaaaaatgtttgtgctcggttcttttttttttacaatagatcgctatatgaaaaaaagtctgtactcagcttacggtagagatgcctggtaagctaatgcgtggatgaaagctgaacttaaccttatcaacacattcaaaccgttgtagtttgaacctgaatgtatccaaacattgtcggcaacaggattgcttcaaaagaaagaagtgataaaactatgaagtcgtagactcatcaattaaatttttttgtatagattgtaattgtatttgagcttatatataaatgtaaaagttgtgattttttt

SEQ ID NO: 21100 - DNA, 1843 bp, Zea Mays
aaaacactgtcctgtctggtcaggtctcgaaccggcccgagagcgcaatgcaccagcaatggaggcgagcggcagtcggggtccggagggggagcccggtccccaagcgccgcagaggcgtcggcgtggctactggcttcgggtttacggcgcagtcgctgaacgacgacatcctccggtccgtcttctcccggctggacgaccacttcgacctcgcccgctgctccgccgtctgcggctcatggaataggataattgaaacagctcatctcatgagggatatgtattacaaaaggaacccaccagcaagaggttcaagctctaatatttcagtaaaaagttactttgagatgcttgccatggatgagcatgcatctgctttctctagaggacctgctgaagcttttcagtggattgggcacccaatgagggctaccttgtgccgtatgaagagtggtttaattttaactggagttggagataagattctctgcctttggtctgctgaaagctgcaaattcatgaatgagtacaatgtgccaaattctaaaacattagtcgactttgattttgatgaaaataaggtttgaccagctcccagatttgcatatggagacgcagtgaaccaagaagcatatttcaatctggtggagcctcattcaatcatgggttatgcatgagttttgctgatccggaggttgtaattggttgtgaggatggtcgagcctttgtatatgatatgtacagcaggagttgctcacgtatttatcggcttcactcctctcctgtgacatgtttgatgataacggatgaccagctgattgttggtggatcaacttttggaaatgtagctattgcagatcaaacctcagggcagaagttaggtgttctaaaatcagatcatggaccattggcaataagatccttatcttcctgcacaaattcacacatgatatttgctggttcgtcagctggttatgcacattgctgggacttaaggactttgaggcctctctgggaaaaaagagtcagcccaaatgtcatctacagcacacgtcatttgcccggtgacacggcaacgctggcagttggaggcattgacggcgtgctccgcgttatatgccaaaggactggtgacatcattcgcagtcttgtcgttgacgcagatctcccagcagaagccacatctagatcccggcagcaaatagagaagaaacgtgttcgaaggattgaccctgatgcacagttggacggtatcccgaggcgtttgcgccctcagattaccagcctatcggttgggatgaagaagattgtgaccacgcatggtgaaaactacattagggtttggaagtttcgcatgaaaagttcgtaaaaagggcgagatgatggtaatctagttatctggtgtaacctgtactgtagtctactgaataagatggcgtggtaccgtggtgtgtcacctgcgcttgtaataatagcctgaaacatagttcatttgtacacttgtagtcctctttaggatactattagcaattaaaaaaatgtttgtgctcggttcttttttttttacaatagatcgctatatgaaaaaaagtctgtactcagcttacggtagagatgcctggtaagctaatgcgtggatgaaagctgaacttaaccttatcaacacattcaaaccgttgtagtttgaacctgaatgtatccaaacattgtcggcaacaggattgcttcaaaagaaagaagtgataaaactatgaagtcgtagactcatcaattaaatttttttgtatagattgtaattgtatttgagcttatatataaatgtaaaagttgtgattttttt

SEQ ID NO: 21101 - DNA, 1416 bp, Zea Mays
gttcttaatatgtttcatcaacatgaatataaaatttgatttggagttatgattctctgcctttggtctgctgaaagctgcaaattcatgaatgagtacaatgtgccaaattctaaaacattagtcgactttgattttgatgaaaataagattgtaggtttgaccagctcccagatttgcatatggagacgcagtgaaccaagaagcatatttcaatctggtggagcctcattcaatcatgggttatgcatgagttttgctgatccggaggttgtaattggttgtgaggatggtcgagcctttgtatatgatatgtacagcaggagttgctcacgtatttatcggcttcactcctctcctgtgacatgtttgatgataacggatgaccagctgattgttggtggatcaacttttggaaatgtagctattgcagatcaaacctcagggcagaagttaggtgttctaaaatcagatcatggaccattggcaataagatccttatcttcctgcacaaattcacacatgatatttgctggttcgtcagctggttatgcacattgctgggacttaaggactttgaggcctctctgggaaaaaagagtcagcccaaatgtcatctacagcacacgtcatttgcccggtgacacggcaacgctggcagttggaggcattgacggcgtgctccgcgttatatgccaaaggactggtgacatcattcgcagtcttgtcgttgacgcagatctcccagcagaagccacatctagatcccggcagcaaatagagaagaaacgtgttcgaaggattgaccctgatgcacagttggacggtatcccgaggcgtttgcgccctcagattaccagcctatcggttgggatgaagaagattgtgaccacgcatggtgaaaactacattagggtttggaagtttcgcatgaaaagttcgtaaaaagggcgagatgatggtaatctagttatctggtgtaacctgtactgtagtctactgaataagatggcgtggtaccgtggtgtgtcacctgcgcttgtaataatagcctgaaacatagttcatttgtacacttgtagtcctctttaggatactattagcaattaaaaaaatgtttgtgctcggttcttttttttttacaatagatcgctatatgaaaaaaagtctgtactcagcttacggtagagatgcctggtaagctaatgcgtggatgaaagctgaacttaaccttatcaacacattcaaaccgttgtagtttgaacctgaatgtatccaaacattgtcggcaacaggattgcttcaaaagaaagaagtgataaaactatgaagtcgtagactcatcaattaaatttttttgtatagattgtaattgtatttgagcttatatataaatgtaaaagttgtgattttttt

SEQ ID NO: 21102 - DNA, 1398 bp, Zea Mays
gtttcatcaacatgaatataaaatttgatttggagttatgattctctgcctttggtctgctgaaagctgcaaattcatgaatgagtacaatgtgccaaattctaaaacattagtcgactttgattttgatgaaaataaggtttgaccagctcccagatttgcatatggagacgcagtgaaccaagaagcatatttcaatctggtggagcctcattcaatcatgggttatgcatgagttttgctgatccggaggttgtaattggttgtgaggatggtcgagcctttgtatatgatatgtacagcaggagttgctcacgtatttatcggcttcactcctctcctgtgacatgtttgatgataacggatgaccagctgattgttggtggatcaacttttggaaatgtagctattgcagatcaaacctcagggcagaagttaggtgttctaaaatcagatcatggaccattggcaataagatccttatcttcctgcacaaattcacacatgatatttgctggttcgtcagctggttatgcacattgctgggacttaaggactttgaggcctctctgggaaaaaagagtcagcccaaatgtcatctacagcacacgtcatttgcccggtgacacggcaacgctggcagttggaggcattgacggcgtgctccgcgttatatgccaaaggactggtgacatcattcgcagtcttgtcgttgacgcagatctcccagcagaagccacatctagatcccggcagcaaatagagaagaaacgtgttcgaaggattgaccctgatgcacagttggacggtatcccgaggcgtttgcgccctcagattaccagcctatcggttgggatgaagaagattgtgaccacgcatggtgaaaactacattagggtttggaagtttcgcatgaaaagttcgtaaaaagggcgagatgatggtaatctagttatctggtgtaacctgtactgtagtctactgaataagatggcgtggtaccgtggtgtgtcacctgcgcttgtaataatagcctgaaacatagttcatttgtacacttgtagtcctctttaggatactattagcaattaaaaaaatgtttgtgctcggttcttttttttttacaatagatcgctatatgaaaaaaagtctgtactcagcttacggtagagatgcctggtaagctaatgcgtggatgaaagctgaacttaaccttatcaacacattcaaaccgttgtagtttgaacctgaatgtatccaaacattgtcggcaacaggattgcttcaaaagaaagaagtgataaaactatgaagtcgtagactcatcaattaaatttttttgtatagattgtaattgtatttgagcttatatataaatgtaaaagttgtgattttttt

SEQ ID NO: 21103 - DNA, 1672 bp, Zea Mays
gttcactgtctctagtatgggacacggggatatttgtgtgttgggcttgtgtgtgtgacctgctatttgtgttgggcatccacgtgtattagctatgcagtgctggcaccttgagagttatctccaccatgtgctgaacaaattcagtgaaccactgccctgtcttcttgtctattttttagggcacaatccagtgaggggatctctgctctcaagcttttgctggtcccttggtacctctgcagtttctgttgcggtttgagttcctctctcaatccccaggtcgatttgcccttgttcttcacagccaacgcccaacctggtgatcatacccaccgaaaccaacaccctgctgtggccaaagcgttccagtgagttgcatgcccgtgtagtcttcgttccgtggtcttcaaagaggcaggctgcattagaggagaggacaaaaaggtactttatgcaaaggctgacttgggaaaacaagtacagggagcgtgtacaatctgcaatacagaagtgtaatgctagtgagaagagacgattggggctgcttgaatctgagaaaagacgggtacagagtaggctcttgcagattcaacttgctgtgaagactgcctctaaccagagaaaatctgagaggagcaagttaaatgagcaattagaagaaaagcttcagaagcatttggcgaggctatgcttcacaccattggttatatttatgtccagcaagcagcaagagaactcggaaaaagtagagtttacataggtgtaccatttatagctgaatgagttagagacaaaggacaccacattaaatcacaggttaatgctgcttcagcatttggcgaggctatgcttcacaccattggttatatttatgtttggcaagcagcaagagaactcgggaaaagtagagtttacatctgggggtagagaggtcagggagacacaacaaaatctctatacaaagatttaacttatggtggtgtggtgaatcaacataaggtggacgtataagactgcatagctcttacactggtgaatatctttcagtggatggcattccattgtaggatccaatcagcagtcagaattaacaaaacaaagtagactgtaatgacttttattcttcctggctttagatatagaaagacaacggttggtgattctcttttgctgtgaaggttccaacaacttgataaaggagccaaggtggtagtggtcttattcaagctggtggccttgctgcagaactggacggtgatggtatcacagaaggataaagaaagagtggcagagcttatcaggaacatggaaacatatatgtgaaattcagagaaaccttcagttcagagccatacaattggtacatacctgaagaaatctctccacagcagctcaaacattaaccaatttgtcccagcatcaggaattgctctgagaagaagatacttgtacctacacaccacagattgtacatgttctccgcgctttagaattgaagaatgcactcagctacgtgttacctgcatccatagcaggtagttgaacttgaatagagccatataggaaacaaaaagaaaaggtaatcaattgagcttaaattttaaacaacataatccattaaatgttctataagagaaatagagttaaaaaatgtaaatatcaattcttt

SEQ ID NO: 21104 - DNA, 1616 bp, Zea Mays
attagctatgcagtgctggcaccttgagagttatctccaccatgtgctgaacaaattcagtgaaccactgccctgtcttcttgtctattttttagggcacaatccagtgaggggatctctgctctcaagcttttgctggtcccttggtacctctgcagtttctgttgcggtttgagttcctctctcaatccccaggtcgatttgcccttgttcttcacagccaacgcccaacctggtgatcatacccaccgaaaccaacaccctgctgtggccaaagcgttccagtgagttgcatgcccgtgtagtcttcgttccgtggtcttcaaagaggcaggctgcattagaggagaggacaaaaaggtactttatgcaaaggctgacttgggaaaacaagtacagggagcgtgtacaatctgcaatacagaagtgtaatgctagtgagaagagacgattggggctgcttgaatctgagaaaagacgggtacagagtaggctcttgcagattcaacttgctgtgaagactgcctctaaccagagaaaatctgagaggagcaagttaaatgagcaattagaagaaaagcttcagaagctctttaacttgtctcaaacaaaaatttcagcatttggcgaggctatgcttcacaccattggttatatttatgtccagcaagcagcaagagaactcggaaaaagtagagtttacataggtgtaccatttatagctgaatgagttagagacaaaggacaccacattaaatcacaggttaatgctgcttcagcatttggcgaggctatgcttcacaccattggttatatttatgtttggcaagcagcaagagaactcgggaaaagtagagtttacatctgggggtagagaggtcagggagacacaacaaaatctctatacaaagatttaacttatggtggtgtggtgaatcaacataaggtggacgtataagactgcatagctcttacactggtgaatatctttcagtggatggcattccattgtaggatccaatcagcagtcagaattaacaaaacaaagtagactgtaatgacttttattcttcctggctttagatatagaaagacaacggttggtgattctcttttgctgtgaaggttccaacaacttgataaaggagccaaggtggtagtggtcttattcaagctggtggccttgctgcagaactggacggtgatggtatcacagaaggataaagaaagagtggcagagcttatcaggaacatggaaacatatatgtgaaattcagagaaaccttcagttcagagccatacaattggtacatacctgaagaaatctctccacagcagctcaaacattaaccaatttgtcccagcatcaggaattgctctgagaagaagatacttgtacctacacaccacagattgtacatgttctccgcgctttagaattgaagaatgcactcagctacgtgttacctgcatccatagcaggtagttgaacttgaatagagccatataggaaacaaaaagaaaaggtaatcaattgagcttaaattttaaacaacataatccattaaatgttctataagagaaatagagttaaaaaatgtaaatatcaattcttt

SEQ ID NO: 21105 - DNA, 1192 bp, Zea Mays
attagctatgcagtgctggcaccttgagagttatctccaccatgtgctgaacaaattcagtgaaccactgccctgtcttcttgtctattttttagggcacaatccagtgaggggatctctgctctcaagcttttgctggtcccttggtacctctgcagtttctgttgcggtttgagttcctctctcaatccccaggtcgatttgcccttgttcttcacagccaacgcccaacctggtgatcatacccaccgaaaccaacaccctgctgtggccaaagcgttccagtgagttgcatgcccgtgtagtcttcgttccgtggtcttcaaagaggcaggctgcattagaggagaggacaaaaaggtactttatgcaaaggctgacttgggaaaacaagtacagggagcgtgtacaatctgcaatacagaagtgtaatgctagtgagaagagacgattggggctgcttgaatctgagaaaagacgggtacagagtaggctcttgcagattcaacttgctgtgaagactgcctctaaccagagaaaatctgagaggagcaagttaaatgagcaattagaagaaaagcttcagaagcaagcagcaagagaactcggaaaaagtagagtttacataggtgtaccatttatagctgaatgagttagagacaaaggacaccacattaaatcacaggttaatgctgcttcaggttccaacaacttgataaaggagccaaggtggtagtggtcttattcaagctggtggccttgctgcagaactggacggtgatggtatcacagaaggataaagaaagagtggcagagcttatcaggaacatggaaacatatatgtgaaattcagagaaaccttcagttcagagccatacaattggtacatacctgaagaaatctctccacagcagctcaaacattaaccaatttgtcccagcatcaggaattgctctgagaagaagatacttgtacctacacaccacagattgtacatgttctccgcgctttagaattgaagaatgcactcagctacgtgttacctgcatccatagcaggtagttgaacttgaatagagccatataggaaacaaaaagaaaaggtaatcaattgagcttaaattttaaacaacataatccattaaatgttctataagagaaatagagttaaaaaatgtaaatatcaattcttt

SEQ ID NO: 21106 - DNA, 3385 bp, Zea Mays
cttgagagttatctccaccatgtgctgaacaaattcagtgaaccactgccctgtcttcttgtctattttttagggcacaatccagtgaggggatctctgctctcaagcttttgctggtcccttggtacctctgcagtttctgttgcggtttgagttcctctctcaatccccaggtcgatttgcccttgttcttcacagccaacgcccaacctggtgatcatacccaccgaaaccaacaccctgctgtggccaaagcgttccagtgagttgcatgcccgtgtagtcttcgttccgtggtcttcaaaggtcagtgaagcattggtattgctgctgtgtaaaaaaattggattaaacgtctcaaaactttcactgacaggtatatggtttcagtcagctgaaacagaattttatgtgttctcaacacatttttggagcactataactctagatccatgaatctttgacctaaggttgctgtagcaaacttgtacagatatgtttggtaaacaaattttattagtcaaggttggcctattattgtttggaattgtgaggagtaatggagttaaaggtgggggtttattttggtgtagagttcagtttcagaatctaaaacgtaattcagtttgctgaatttttagaaaccgtgaattcctctcagttttagacccttctaagtctcaattcttgaagttttggtggatgatcattgaattaaacttgaagatctaatattgtggagcaatttcttttaagaaggatctccttatccttgctttgaattgagataaaaggttattccaagttgctatgttaggtagagggtgctgaatttagtttagttagttgaattgtgtagttgggcagagttccaactttgaagctctctaacctgaagtctgttgagttttagctagtatcctttaaagtaaagttggagagtgatcatagaagagcaactcctagtaagaaagtgtatcaagccagcatagggaaatgagagaaaatctgattggaagttctaggtttaggcttggtacagtgatttgagcacagtttaaaattcagattgggagcggaacgatcctcacgcctctgttgtgttccaatgtgtcaatccaagctgaggctgaggtttgatattggaaaaacaggtagcgattggagactggaccggtttcagattgggcagagggggccggcatgctcaggaagtcgaccgaagcctgtttgctacttcaagtttgactagtcaagtgcccgtgcgttgcgacggcatgcaaattattcatgcacaatgattacataaaaataagtaacatatattatggatcacaatcttataaattatacaaatcaatttacaatcaaacgtgaatatacattaaaattcataccaaaaggacggaaataacaagtcagagcaaaaattctgaatctttgtttcttatcctaaactcgagtatttgcaaataaaatcacatatatctaaagccaactaaacactgatgcgcttaataatcttttgtattttttctgaaatattgtcattacattcattctcctggtacttcatcaactctaccaagaatttggtcctctgtacattcggtataagacaacattaaattcagtaaagacaattagttatagaaaaatgatattgaccaagaattagaactacacagttactcacagtggaaatgcagggtaaccttttaccattccacgagtgcataaagttgataacaattagttctagataccaatatgaactatctaaaccatgcaagcactaccaacttcaaatcaacgtgtaggtttatcccaagctaatatgtttctgatagaaatggtatgctttttctgtgcgaactaatacttatggataaaataaaataacgatgaaacaaagttcatgtttgagtgcataagggttcaaaaggctgagaacaatcgtatgcaactaatgcatgatcgtttgcagaggcaggctgcattagaggagaggacaaaaaggtactttatgcaaaggctgacttgggaaaacaagtacagggagcgtgtacaatctgcaatacagaagtgtaatgctagtgagaagagacgattggggctgcttgaatctgagaaaagacgggtacagagtaggctcttgcagattcaacttgctgtgaagactgcctctaaccagagaaaatctgagaggagcaagttaaatgagcaattagaagaaaagcttcagaagcatttggcgaggctatgcttcacaccattggttatatttatgtccagcaagcagcaagagaactcggaaaaagtagagtttacataggtgtaccatttatagctgaatgagttagagacaaaggacaccacattaaatcacaggttaatgctgcttcagcatttggcgaggctatgcttcacaccattggttatatttatgtttggcaagcagcaagagaactcgggaaaagtagagtttacatctgggggtagagaggtcagggagacacaacaaaatctctatacaaagatttaacttatggtggtgtggtgaatcaacataaggtggacgtataagactgcatagctcttacactggtgaatatctttcagtggatggcattccattgtaggatccaatcagcagtcagaattaacaaaacaaagttccaacaacttgataaaggagccaaggtggtagtggtcttattcaagctggtggccttgctgcagaactggacggtgatggtatcacagaaggataaagaaagagtggcagagcttatcaggaacatggtaaacaacattgaacaaaattagagtgttgttttctctattgtggttgaattttggctaggtagcaggagcctggtgttgttttgcatgaactgctgaaggtaaatgcagctgtggttgtatatttgtcgcatttttttgctggtaggtttttagatgagtttgcatagtggttgtttagattctggtgagtattaagttagtttgtgttttttaggtgttagagatcttcctacagtaagctgtaccaatgatctttggtctaaaaagggaaactggaagggggcactggagaagaaaattataaacaattaaacattgtcgaaattatcaacaagctagagagatatcaggcaatatatctgaactgaaacaatcgaccttgaatatgatcagccaacaaaacaaagacatctttatgcctcaataaagatactatttagttgcgtatgtgatctcatcaataccactttcgaaagctgcaccatcactttttcctccccccaccccaacacacacacacacacaaaaagagttcgagggtcataaactaatatgtttatgtgacaccttatttccg

SEQ ID NO: 21107 - DNA, 1375 bp, Zea Mays
ccaccatgtgctgaacaaattcagtgaaccactgccctgtcttcttgtctattttttagggcacaatccagtgaggggatctctgctctcaagcttttgctggtcccttggtacctctgcagtttctgttgcggtttgagttcctctctcaatccccaggtcgatttgcccttgttcttcacagccaacgcccaacctggtgatcatacccaccgaaaccaacaccctgctgtggccaaagcgttccagtgagttgcatgcccgtgtagtcttcgttccgtggtcttcaaagaggcaggctgcattagaggagaggacaaaaaggtactttatgcaaaggctgacttgggaaaacaagtacagggagcgtgtacaatctgcaatacagaagtgtaatgctagtgagaagagacgattggggctgcttgaatctgagaaaagacgggtacagagtaggctcttgcagattcaacttgctgtgaagactgcctctaaccagagaaaatctgagaggagcaagttaaatgagcaattagaagaaaagcttcagaagcaagcagcaagagaactcggaaaaagtagagtttacataggtgtaccatttatagctgaatgagttagagacaaaggacaccacattaaatcacaggttaatgctgcttcaggttccaacaacttgataaaggagccaaggtggtagtggtcttattcaagctggtggccttgctgcagaactggacggtgatggtatcacagaaggataaagaaagagtggcagagcttatcaggaacatggtaaacaacattgaacaaaattagagtgttgttttctctattgtggttgaattttggctaggtagcaggagcctggtgttgttttgcatgaactgctgaaggtaaatgcagctgtggttgtatatttgtcgcatttttttgctggtaggtttttagatgagtttgcatagtggttgtttagattctggtgagtattaagttagtttgtgttttttaggtgttagagatcttcctacagtaagctgtaccaatgatctttggtctaaaaagggaaactggaagggggcactggagaagaaaattataaacaattaaacattgtcgaaattatcaacaagctagagagatatcaggcaatatatctgaactgaaacaatcgaccttgaatatgatcagccaacaaaacaaagacatctttatgcctcaataaagatactatttagttgcgtatgtgatctcatcaataccactttcgaaagctgcaccatcactttttcctccccccaccccaacacacacacacacacaaaaagagttcgagggtcataaactaatatgtttatgtgacaccttatttccg

SEQ ID NO: 21108 - DNA, 3103 bp, Zea Mays
ccaccatgtgctgaacaaattcagtgaaccactgccctgtcttcttgtctattttttagggcacaatccagtgaggggatctctgctctcaagcttttgctggtcccttggtacctctgcagtttctgttgcggtttgagttcctctctcaatccccaggtcgatttgcccttgttcttcacagccaacgcccaacctggtgatcatacccaccgaaaccaacaccctgctgtggccaaagcgttccagtgagttgcatgcccgtgtagtcttcgttccgtggtcttcaaaggtcagtgaagcattggtattgctgctgtgtaaaaaaattggattaaacgtctcaaaactttcactgacaggtatatggtttcagtcagctgaaacagaattttatgtgttctcaacacatttttggagcactataactctagatccatgaatctttgacctaaggttgctgtagcaaacttgtacagatatgtttggtaaacaaattttattagtcaaggttggcctattattgtttggaattgtgaggagtaatggagttaaaggtgggggtttattttggtgtagagttcagtttcagaatctaaaacgtaattcagtttgctgaatttttagaaaccgtgaattcctctcagttttagacccttctaagtctcaattcttgaagttttggtggatgatcattgaattaaacttgaagatctaatattgtggagcaatttcttttaagaaggatctccttatccttgctttgaattgagataaaaggttattccaagttgctatgttaggtagagggtgctgaatttagtttagttagttgaattgtgtagttgggcagagttccaactttgaagctctctaacctgaagtctgttgagttttagctagtatcctttaaagtaaagttggagagtgatcatagaagagcaactcctagtaagaaagtgtatcaagccagcatagggaaatgagagaaaatctgattggaagttctaggtttaggcttggtacagtgatttgagcacagtttaaaattcagattgggagcggaacgatcctcacgcctctgttgtgttccaatgtgtcaatccaagctgaggctgaggtttgatattggaaaaacaggtagcgattggagactggaccggtttcagattgggcagagggggccggcatgctcaggaagtcgaccgaagcctgtttgctacttcaagtttgactagtcaagtgcccgtgcgttgcgacggcatgcaaattattcatgcacaatgattacataaaaataagtaacatatattatggatcacaatcttataaattatacaaatcaatttacaatcaaacgtgaatatacattaaaattcataccaaaaggacggaaataacaagtcagagcaaaaattctgaatctttgtttcttatcctaaactcgagtatttgcaaataaaatcacatatatctaaagccaactaaacactgatgcgcttaataatcttttgtattttttctgaaatattgtcattacattcattctcctggtacttcatcaactctaccaagaatttggtcctctgtacattcggtataagacaacattaaattcagtaaagacaattagttatagaaaaatgatattgaccaagaattagaactacacagttactcacagtggaaatgcagggtaaccttttaccattccacgagtgcataaagttgataacaattagttctagataccaatatgaactatctaaaccatgcaagcactaccaacttcaaatcaacgtgtaggtttatcccaagctaatatgtttctgatagaaatggtatgctttttctgtgcgaactaatacttatggataaaataaaataacgatgaaacaaagttcatgtttgagtgcataagggttcaaaaggctgagaacaatcgtatgcaactaatgcatgatcgtttgcagaggcaggctgcattagaggagaggacaaaaaggtactttatgcaaaggctgacttgggaaaacaagtacagggagcgtgtacaatctgcaatacagaagtgtaatgctagtgagaagagacgattggggctgcttgaatctgagaaaagacgggtacagagtaggctcttgcagattcaacttgctgtgaagactgcctctaaccagagaaaatctgagaggagcaagttaaatgagcaattagaagaaaagcttcagaagcatttggcgaggctatgcttcacaccattggttatatttatgtccagcaagcagcaagagaactcggaaaaagtagagtttacataggtgtaccatttatagctgaatgagttagagacaaaggacaccacattaaatcacaggttaatgctgcttcaggttccaacaacttgataaaggagccaaggtggtagtggtcttattcaagctggtggccttgctgcagaactggacggtgatggtatcacagaaggataaagaaagagtggcagagcttatcaggaacatggtaaacaacattgaacaaaattagagtgttgttttctctattgtggttgaattttggctaggtagcaggagcctggtgttgttttgcatgaactgctgaaggtaaatgcagctgtggttgtatatttgtcgcatttttttgctggtaggtttttagatgagtttgcatagtggttgtttagattctggtgagtattaagttagtttgtgttttttaggtgttagagatcttcctacagtaagctgtaccaatgatctttggtctaaaaagggaaactggaagggggcactggagaagaaaattataaacaattaaacattgtcgaaattatcaacaagctagagagatatcaggcaatatatctgaactgaaacaatcgaccttgaatatgatcagccaacaaaacaaagacatctttatgcctcaataaagatactatttagttgcgtatgtgatctcatcaataccactttcgaaagctgcaccatcactttttcctccccccaccccaacacacacacacacacaaaaagagttcgagggtcataaactaatatgtttatgtgacaccttatttccg

SEQ ID NO: 21109 - DNA, 3270 bp, Zea Mays
ccaccatgtgctgaacaaattcagtgaaccactgccctgtcttcttgtctattttttagggcacaatccagtgaggggatctctgctctcaagcttttgctggtcccttggtacctctgcagtttctgttgcggtttgagttcctctctcaatccccaggtcgatttgcccttgttcttcacagccaacgcccaacctggtgatcatacccaccgaaaccaacaccctgctgtggccaaagcgttccagtgagttgcatgcccgtgtagtcttcgttccgtggtcttcaaaggtcagtgaagcattggtattgctgctgtgtaaaaaaattggattaaacgtctcaaaactttcactgacaggtatatggtttcagtcagctgaaacagaattttatgtgttctcaacacatttttggagcactataactctagatccatgaatctttgacctaaggttgctgtagcaaacttgtacagatatgtttggtaaacaaattttattagtcaaggttggcctattattgtttggaattgtgaggagtaatggagttaaaggtgggggtttattttggtgtagagttcagtttcagaatctaaaacgtaattcagtttgctgaatttttagaaaccgtgaattcctctcagttttagacccttctaagtctcaattcttgaagttttggtggatgatcattgaattaaacttgaagatctaatattgtggagcaatttcttttaagaaggatctccttatccttgctttgaattgagataaaaggttattccaagttgctatgttaggtagagggtgctgaatttagtttagttagttgaattgtgtagttgggcagagttccaactttgaagctctctaacctgaagtctgttgagttttagctagtatcctttaaagtaaagttggagagtgatcatagaagagcaactcctagtaagaaagtgtatcaagccagcatagggaaatgagagaaaatctgattggaagttctaggtttaggcttggtacagtgatttgagcacagtttaaaattcagattgggagcggaacgatcctcacgcctctgttgtgttccaatgtgtcaatccaagctgaggctgaggtttgatattggaaaaacaggtagcgattggagactggaccggtttcagattgggcagagggggccggcatgctcaggaagtcgaccgaagcctgtttgctacttcaagtttgactagtcaagtgcccgtgcgttgcgacggcatgcaaattattcatgcacaatgattacataaaaataagtaacatatattatggatcacaatcttataaattatacaaatcaatttacaatcaaacgtgaatatacattaaaattcataccaaaaggacggaaataacaagtcagagcaaaaattctgaatctttgtttcttatcctaaactcgagtatttgcaaataaaatcacatatatctaaagccaactaaacactgatgcgcttaataatcttttgtattttttctgaaatattgtcattacattcattctcctggtacttcatcaactctaccaagaatttggtcctctgtacattcggtataagacaacattaaattcagtaaagacaattagttatagaaaaatgatattgaccaagaattagaactacacagttactcacagtggaaatgcagggtaaccttttaccattccacgagtgcataaagttgataacaattagttctagataccaatatgaactatctaaaccatgcaagcactaccaacttcaaatcaacgtgtaggtttatcccaagctaatatgtttctgatagaaatgaggcaggctgcattagaggagaggacaaaaaggtactttatgcaaaggctgacttgggaaaacaagtacagggagcgtgtacaatctgcaatacagaagtgtaatgctagtgagaagagacgattggggctgcttgaatctgagaaaagacgggtacagagtaggctcttgcagattcaacttgctgtgaagactgcctctaaccagagaaaatctgagaggagcaagttaaatgagcaattagaagaaaagcttcagaagctctttaacttgtctcaaacaaaaatttcagcatttggcgaggctatgcttcacaccattggttatatttatgtccagcaagcagcaagagaactcggaaaaagtagagtttacataggtgtaccatttatagctgaatgagttagagacaaaggacaccacattaaatcacaggttaatgctgcttcagcatttggcgaggctatgcttcacaccattggttatatttatgtttggcaagcagcaagagaactcgggaaaagtagagtttacatctgggggtagagaggtcagggagacacaacaaaatctctatacaaagatttaacttatggtggtgtggtgaatcaacataaggtggacgtataagactgcatagctcttacactggtgaatatctttcagtggatggcattccattgtaggatccaatcagcagtcagaattaacaaaacaaagttccaacaacttgataaaggagccaaggtggtagtggtcttattcaagctggtggccttgctgcagaactggacggtgatggtatcacagaaggataaagaaagagtggcagagcttatcaggaacatggtaaacaacattgaacaaaattagagtgttgttttctctattgtggttgaattttggctaggtagcaggagcctggtgttgttttgcatgaactgctgaaggtaaatgcagctgtggttgtatatttgtcgcatttttttgctggtaggtttttagatgagtttgcatagtggttgtttagattctggtgagtattaagttagtttgtgttttttaggtgttagagatcttcctacagtaagctgtaccaatgatctttggtctaaaaagggaaactggaagggggcactggagaagaaaattataaacaattaaacattgtcgaaattatcaacaagctagagagatatcaggcaatatatctgaactgaaacaatcgaccttgaatatgatcagccaacaaaacaaagacatctttatgcctcaataaagatactatttagttgcgtatgtgatctcatcaataccactttcgaaagctgcaccatcactttttcctccccccaccccaacacacacacacacacaaaaagagttcgagggtcataaactaatatgtttatgtgacaccttatttccg

SEQ ID NO: 21110 - DNA, 1219 bp, Zea Mays
atgacattgatggtaggcctgggcccaccactgctggcggtttcgaatccagtgagcggctttacttttccgttgcgtgtatcctctcggctctcgcctcgccgagtcgccgtcgagtccgccattccattcaccccggttcccctcccgtgcaaccgcgagcagaagccaccatttcaaaacgaggacgagcccgctgctggtgctgtcccttcccgcgcgccgccggcgcctggccacctgctccgcgtcggatctagagcgagcgagcgtcacccgcggctctcgtcgccgtcagcgtcacccacccgtcgtcttcttgcctccgaagtcaaatcttccaccccatatcaccacagagaattccaacccatccacttccgcggcctgctgccgtccgctttatttaaaccgtccgccacggcgaccccgacgactccccccgcggcctctcccgccagctccccctcacccccgaccatccacgcctccaagcgccgccgccgcgagaccgaagccacggggaacacgccgctgaggggtggcaggggccccgcccctcgccgccgctcgtcgactccgcctcctctttctctgccggcggcggagtttgacccgctcgacccggacgctgacccgccccccaagctgctcacggccgacgaggtgaggctctgcaagcaggcgctgaaggcgctcgacaagaaggtcgggaagcccgccacgcttaccaaggagtttcgtagcctcccggatataagaacagagcttcagtcagtgcaaaaatttagtgttgctcggaaacaagaaaataggggaagaaaccgctatactgatgtgttgccatttgatcaaagcagggtacagttagagtcttcaacaggcaatgattacatcaatgccagccatatagagattgctggcagaaatctaacgaagttcatttctactcaaggaccacttgccaatacaattgaggatttttggcagatggtatatgagaaccactgtcctgtgattgttatgctcaccaaatttgatggtcttaagtgtgatgagtatctaccattgagcaagggacaggctgtttttggaaaatttaccattaagatcacaaagttcaggaaagatggtcagttattgttgcgtggtgtggagattcgacaggatgaggtgaatatatataagtcagatgaagtgcgatctcttctccacattg

SEQ ID NO: 21111 - DNA, 1200 bp, Zea Mays
atgacattgatggtaggcctgggcccaccactgctggcggtttcgaatccagtgagcggctttacttttccgttgcgtgtatcctctcggctctcgcctcgccgagtcgccgtcgagtccgccattccattcaccccggttcccctcccgtgcaaccgcgagcagaagccaccatttcaaaacgaggacgagcccgctgctggtgctgtcccttcccgcgcgccgccggcgcctggccacctgctccgcgtcggatctagagcgagcgagcgtcacccgcggctctcgtcgccgtcagcgtcacccacccgtcgtcttcttgcctccgaagtcaaatcttccaccccatatcaccacagagaattccaacccatccacttccgcggcctgctgccgtccgctttatttaaaccgtccgccacggcgaccccgacgactccccccgcggcctctcccgccagctccccctcacccccgaccatccacgcctccaagcgccgccgccgcgagaccgaagccacggggaacacgccgctgaggggtggcaggggccccgcccctcgccgccgctcgtcgactccgcctcctctttctctgccggcggcggagtttgacccgctcgacccggacgctgacccgccccccaagctgctcacggccgacgaggtgaggctctgcaagcaggcgctgaaggcgctcgacaagaaggtcgggaagcccgccacgcttaccaaggagtttcgtagcctcccggatataagaacagagcttcagtcagtgcaaaaatttagtgttgctcggaaacaagaaaataggggaagaaaccgctatactgatgtgttgccatttgatcaaagcagggtacagttagagtcttcaacaggcaatgattacatcaatgccagccatatagagattgctggcagaaatctaacgaagttcatttctactcaaggaccacttgccaatacaattgaggatttttggcagatggtatatgagaaccactgtcctgtgattgttatgctcaccaaatttgatggtcttaagtgtgatgagtatctaccattgagcaagggacaggctgtttttggaaaatttaccattaagatcacaaagttcaggaaagatggtcagttattgttgcgtggtgtggagattcgacaggatgagatgaagtgcgatctcttctccacattg

SEQ ID NO: 21112 - DNA, 1204 bp, Zea Mays
atgacattgatggtaggcctgggcccaccactgctggcggtttcgaatccagtgagcggctttacttttccgttgcgtgtatcctctcggctctcgcctcgccgagtcgccgtcgagtccgccattccattcaccccggttcccctcccgtgcaaccgcgagcagaagccaccatttcaaaacgaggacgagcccgctgctggtgctgtcccttcccgcgcgccgccggcgcctggccacctgctccgcgtcggatctagagcgagcgagcgtcacccgcggctctcgtcgccgtcagcgtcacccacccgtcgtcttcttgcctccgaagtcaaatcttccaccccatatcaccacagagaattccaacccatccacttccgcggcctgctgccgtccgctttatttaaaccgtccgccacggcgaccccgacgactccccccgcggcctctcccgccagctccccctcacccccgaccatccacgcctccaagcgccgccgccgcgagaccgaagccacggggaacacgccgctgaggggtggcaggggccccgcccctcgccgccgctcgtcgactccgcctcctctttctctgccggcggcggagtttgacccgctcgacccggacgctgacccgccccccaagctgctcacggccgacgaggtgaggctctgcaagcaggcgctgaaggcgctcgacaagaaggtcgggaagcccgccacgcttaccaaggagtttcgtagcctcccggatataagaacagagcttcagtcagtgcaaaaatttagtgttgctcggaaacaagaaaataggggaagaaaccgctatactgatgtgttgccatttgatcaaagcagggtacagttagagtcttcaacaggcaatgattacatcaatgccagccatatagagattgctggcagaaatctaacgaagttcatttctactcaaggaccacttgccaatacaattgaggatttttggcagatggtatatgagaaccactgtcctgtgattgttatgctcaccaaatttgatggtcttaagtgtgatgagtatctaccattgagcaagggacaggctgtttttggaaaatttaccattaagatcacaaagttcaggaaagatggtcagttattgttgcgtggtgtggagattcgacaggatgagtcagatgaagtgcgatctcttctccacattg

SEQ ID NO: 21113 - DNA, 461 bp, Zea Mays
aatcagaggagcaatacaaatgttgccaccatgcaatcagagatgaactggaagatcttgtatcgagttcaaaaattgagccgctttcgaggaacgggtaacgctagcagtgatgttctactgacctatctgacagcgtgatacctctttacttgctccattcttcaagcttcggcgatagccgttatgaacatcatgacttctgaaatgttgcgttttatctggagttttaaagcctttacaacattcttcaaccttctatgatctaacattcattgtggtgtatgcatgaaattagaatttagattgatgatatattattgattgtgcccgcccccacacccccacagattgtatttttggttaatggtgtatgcatgaaatatgatgcacaggaaagatttgatattggtgtgttgttgttcgtgcacgtgcgcgcacacaatcgtttccaggaaaga

SEQ ID NO: 21114 - DNA, 3198 bp, Zea Mays
ctactaccactcactagtcgccacaatttggtgtggccttccttccccagcaaaggcaaacccccatcccggtgtagcaatatagcaaacgtgtcccggttgtctgccgccgttgcacagcactgggactgggatgaccggtgtccaagagccgctcagttccgttccgtgctccgcgggtgggcccgccgctccactcgccgcgccctcccgacctcccgccacgtgcccccctcgccgtgacgtgggtggtggacctcaccaccacccgccgcgcgcctggccgcctccatatataccgcgccccgcctctcgccttccgcctcatcactctgctagctgccccggtctcctcctcacactccctctatcgccaggcaacagcagcgcatgccagcagcagcgctcccgattcggcgccacctcgatccccagtccccgtccacaccacccaatcctgctgtgttcttgctgcagccgttggtctcctgctttgttcgggtgctagctgccacgcgcgatgcctcctaacgcccaagacgtgcacgggagcagcggcgggctcgccatgacagccccggcggcgtccaagatggactgcttcttaaccgccgtctgcacgccgctcaacctccagttcatcgacgtgtcgtaccgtgtgaagcagacggagcggtcctcgaaggcggcgccgggcgggcggatatcgcactccggttccggcgccgcggcgccggaggagcggacgatcctgaaggggatcaccggcgaggcgcggcccggggaggtgctggcggtgctgggcccgtcggggagcggcaagtcgacgctgctgtccatactggggggccgcctggcggggcaccacggcgggacggtgctggcgggcgggcggcccccgtgccgcgccgtgcagcggcgcacggggttcgtggcgcaggacgacgtgctgcacccgcacctgacggtgcgcgagacgctggcgttctgcgccatgctgcggctgccgcggtcggcgcccgccgccgccaaggccgcggcggccgaggccgtgatcggcgagctgggcctgggcgcgtgcgccgacaccatcgtcgggaacgccttcgtgcgcggcgtgtccgggggcgagcgcaagcgcgtcagcatcgggcacgagctgctggtgaacccgagcctgctggtcctcgacgagcccacgtcggggctggactccaccgccgcggcgcgcctcgtggcgacgctgtcggcgctggcgcggaaggggcgctccgtcgtcctgtccgtgcaccagccgtcctcccgcgtctaccgcatgttcgactccgtgctgctgctcgccgagggcagctgcctctacttcggcgccgggcgtgacgccatggactacttcgcgtccgtcggcttcgcgccgggattccacgtcaacccggccgacttcatgctcgacctcgcaaatggtttcgcccaggcagactacaatgccgtcacaacacaacagcaaggcggcagcagcgtgaagcagtcgctcatctcgtcctacaacaaggtgctggccccgagggtgaaggcctccgtcgtggccgcggagccgccaccgccgccgcacgtgcagagcggcggcgaggcggcggagagctgcagcacgagctggtgcaaccagttcacggtgctgctccggcgcagcctcaaggagcggcggcacgaggcgttcgcgtcgctgcgcgtgttccagatcatggcgccggcgctggtggcgggcgccatgtggtggcgctcgtcgccgctggcggtgcaggaccgcctgggcctgctcttcttcgcctccatcttctggggcgtcttcgcctccttcaacgccgtgttcgcgttcccgcaggagcgcccggtgctggcccgcgagcgcgcctcggggatgtacgcgctctcgtcctacttcctggcccgcaccgcgggggacctgcccatggagctcgccctgcccaccgccttcaccgtcgtcgtctacctcatggcggcgctcaacccgtcccccgtcgcgttcgcgctcacgctcgccgtcgtcctggcctacgtcctcgtcgccggcggcctcggcctcgccgtcggcgcactcatgatggacgccaagcgcgcgtccacgctggtcaccgtcatcatgctcgcatacctcctcaccggcggcttctacgtgcacagcgtgccgcggttcatggtctggaccaagtacacctccttcacctactactgctaccgcctgctcatcgccgtgcagtacagcggacacctcaagcgcctgctcccaccggaggccgtccacggcgaggttggccccggggcctgcgtcgccgcgctcgtcgccatgttcttcggctaccgcctgctggcgtacgtcgcgctgcgccgcgtcaggaaatgatccatctgatgatctcaacgcgccgtcggcagtcgctgtagctagctagggaagtgtccattaactattgcatgcgtgcgccttggcccagccggtaaggccaccaaaattctcaattcgtggagagcatactgaattgctccggcttccattccatcagagtgcgaaagctgaaagccattgttcgttctaccatgtgtccaagttctaacttctaggcaagtttctgtgtcacaatgctatcagcgcactgctctgattgggccgagcaaaggtctttgggctggactacaggccaaatatcgaccatggataaacaagggaagcaatataaaaagaggagaacagtagctgagagggcatcgaggaacatctggacgacgaaccgggaaactggcggcgagatcacgctcgaggctagattactccttctcctcatgtatctagagaactaattcctcttctatattcgagttggtggtaaactatattgggtctgttacattctggtgccgcatattttttttttcaatgtccctggatccatagaaccatgtcccaaccaaaattcatgcaaggtacttgtcacatacgaatcaaattggctactggctaaaccatgtgttccaaacaagcagtgcgactccagttgagagcgtgaaatcaaactcccacctccgtatcctggagcaagggaaagaggtcaccagggcccgagttgcggccttggaggaggagctcggcggtcgaactaaggagaaactcctggcctctctgcg

SEQ ID NO: 21115 - DNA, 1226 bp, Zea Mays
ctcagctttattatttaaatccaaagtttggtacctggcagaggtacatcttttccgatgttaaacccatcaaggcctttgacggattcaccatcataagtattttctttttgaaaacattcccacccactgaagcatcacttttgttttataacaaaacattttttatttttctagagcaaggctaagcatcataaaaattctttttcaaaaagggtatcaaggaagggtaatcaatttttcaaggaaggaaatacaacaattatttagcacacaacttctatcacctaatgcatcatataaggtgataaagatttgaaaatagcaaggaggtagcaaatgcaccggggcttgccttgataacactaggttggtgttgttaggtgacatccacttgacgactatcttttgtcctggcacttgatcaggttatccatcttcaggttcgtccatcagtatcactttgcgaagaagcccacgcttaacagcatcttggggtcgactcagctcatctttcgcatcacgtgatgaattatcgtacctatatggtatgcataatgcacatgtatgaacataaaaacaacttgtacgttactaaataatgttacacagtagaggattaaatattgactagcaagacattagaaccaatcacaagtaaacgctagctttcgtcataagactaactataataattacgcttcttatttaatcggatctaattcaaacattaagcactcgtaaaccatgcttaagcactaaatctccttaaccttaccacaacttaaacttattaacctggggcatctacaacttagaagaaaacaaaacttgaagtgcgtaaatacatttcctcactataaagttctcggatttgcatagaaacaaatttatctatgttactcacttctaaataccaagaggagcaagcaacatctatctatgatgtttaaacaaccattaaacctcaagtataatgacgactaaaacacgacatcacgttcttttaattcatttaactatttattacacgtataatatgatgacaattaaagcaaagcatcacttatcatacaagcaaaattaacaccatagcattgacggagcctgtcgactactcattcgagatactaaacctatcactagctttacaaatcccaccatactcccgctgcgcataatttgcatcttaatctaagctttgtcgcacactgcgtctactccac

SEQ ID NO: 21116 - DNA, 665 bp, Zea Mays
taaatttacttaatccaattatcgaaccagtagcaaaaataacgaattagcttaccacatcacaatttgatttgatgtttgcacgaacgacaacaacctgtagttgaagtccttgatcggacatccagcgagcgtgaccgacgagctaaggctgatggcgcacgcagatgcaggtccggcgtttgttgggaaaggagctcgacacccggtcccgtgacgagctgctggtgaaagacgaggacctaggccgaggcgacccgcgcgtcaacaaacgtcgaggacggtgactcaagtgcctgctggcacgaccaaaggtgaagggcgggtccgttgagggagattgatggagaaacagacatgaccgcgaatcgacgactagagcgcggcgcgatagactgggacgccgtgatggccagcgagcacagaggagacaatgctgtcagcgcgcacaggaggcgagaatgagatctgtgaccatgggcgacgacgaggtctgcagggagggaactccgacacaaagcacggcccgacgaatgcgctgaacagctggagaacgacgacagaccaagcaaaggagtgcagatgcaatcacgaaatcaggccaagaggcgaccaccaaatagcagcatcgacgaggttgtccgaccatggggagaagagtgaag

SEQ ID NO: 21117 - DNA, 393 bp, Zea Mays
atgggaagtcgaggggaaggagctcggactggagaagcaaggggagcaagcagcgggtgcggcatccatggaagcaggggcgcgcgccatggctggagcaggagcacgccggcgaggagaagacgcgagagggagggagaagcagggagggagcgccgtggggaagagccgctcggctggggaggtgtagcagccatggagcttggggaaagggaaccggcgagcagcggagaggaacaagcggccgatctatcaaacgcctgggagggagaagatccaggcgcgctcggccatgggaagaagacagagggagcgccgtgcgttggagaggaggaagaagcctgcgcgtgggagaatatcaagcgcgcggcgagggataaggctgacggctga

SEQ ID NO: 21118 - DNA, 1991 bp, Zea Mays
accccagtaccccaccccacccacaacggctggggcgtggcttcacttcacgttgagcatcctctctttccttttttccccaaactccaaaatccaatccaagcaactcctccccatgctcctcccgctcctcctcgccgccttcctccatggcttggcggaggcgcagggcggcctcccgtcgctgccgatcggggtgaactacggcgcgaacgcagacaacctaccctcgcccgccgccgtggcggcgttcctgaccaagagcacgaccatcgaccgcgtgaagctgttcgacgcgaacccggccttcctcgacgcgttcgccgccaacgcgccctccatcgccctcgccgtctccatccccaactccgccctcccgtccttcgccgacagatccacgggcctggacgcggcgcgcgggtgggtccgcgacaacctgtccccgcacgtgtccgcgggcgccaacatcaccctcctcatggcggggaacgaggtgctgggccccaccgtggtgcccgacctcgtcgtggcgctgctcccggccatgcgccgcctgtaccaggcgctgcagctggagggcctgcccaaggtccgcgtcaccacgccgcactacctcggcatcctggcgccctcggacgggatcccctccaacgcgagcttccgcccggggctggacgccaaggtgctggcgcccatgctcaggttccacaacgacaccggctcccccttcatggtgaacgcctacccctacttcagctacaacgccgccacgctggactacgcggtgttccgccccaacgccggcgtgtacgacccggcgacgcggctcaactacaccagcatgttcgacgcgcagatggacgccatccacacggcgatgaagaagctcgggtacggcggcgtgcagatcgcggtgggcgaggccgggtggcccaccaaggcggaggccgggcaggtcggcgtaggccccgaggaggccagggatttcaacgccggcatgatccgggtgtgcagcggcgggaagggcacgccgctgatgcctgggaggacgttcgagacgtacgtcttctcgctgttcgacgagaaccagaagcccgggccggtcgcggagcggaacttcggcatcttcaacacggatctcacacccaaatacgacctggggctgctccgccaaggaccgcagtctggatctccaaccccatctccggagccctcgccgtcggtcggcggaggcaagtggtgcgtggccaagtccggcgcgagcgcaaccgacctgcagaacaacattaactacgcctgtgcctacgtcgactgtaggccgatccagagcggcggcgcgtgcttggaccccaacaacatccactcacatgcctcgtacgtcatgaacgcgtactaccaggccaatggcatgcacgactatgactgcgacttcaagggcaccggcgtggtcacctccagtgaccccagttacgggagctgcaaatacaacgcctcctcctgacggcgcgcagcaagtccagctggcactactgcaccagcctccagtccacatcgtcctccagctccaggctccagccatggccacgctggggacgggaggagacgtctgctgctgctgccgtatagcgtggaagcctgctgctgcagtaggagagaaggaactccagatttggcgtttcagttgccctactcgaagatagcgtaacatatcgagttgccgctgcagcccatttcgcaactggaaccgtatagcgtatgccttagcgttctcgactgcggctagcctgaaagctaccaaacacccgagtactcatcatgcttcttgatgtgacactgaagttctccatatcatatggaccatatgtatatacctcatagctggcccaccatcattaatgtggtttgcataaataggatgcatttagctccaacaggccacgcaaatggccagcccaagccaatttgcttctccatgttatactacacgtttc

SEQ ID NO: 21119 - DNA, 3232 bp, Zea Mays
gttttctctatctaatccagaaaatatcaaaaatacccctcccacccgcagccctaacaaaccggtccccttcgacctcctcctccgccgccggcgtcgaccgcgaccgccacctctcctcgtacgctacagtaggggcaggggcggcgattggtggctcttcctcctcctatgctgtgactcgaggagtatggcggatggggctattgtggtagccatttgccagtacggcggagagttcacttctggccccagtggtaatctgatatacagaggtggagaagcacatgccgttgatgttactcatgattcatcgctggagagcttcaaggatgagctgtccaaggtgttccatgttgatgtcactgacatgtcactcaagtactttcttcccaataatatgaaaacactcatcacaatatcatgtgaccgggatttgcaaaggatggttggttttactgcaaatgctgcgcatgtggatgtttttctgataagtagacaggagaacaggagtactataacacattctggagctacatctggctctgttgctagtggcgacaaaaggaaaagaccaacacccaaaaacaaggtaatcagaagcagcaaaccagctaccagtgctgcttgcaatgcacttcaagctatcacagataatgtgagacaaccaatttcagttattactgaaaatgaagacaacagggtttttcagttggaatttgggaatgacatcacatttaccaccacagctggaggtgcttccttcacatcagatattctcgatcagcaaaagcttgttcttgttgataatatccccaaggaagcagttagtttgtttgatgatgcattcaatccatatgttagttctgagatcatgcatgagccgcctcaggaacctaacaatcctattgtgttgtgggatgacattatcaaaggagttggtcaagaatttgataacgtgaaagatttccgtgctcagttgtgcaagtatgctattgggaaaggatttgtgtaccggttcataaaaaatgaaactactcgtgtcactgtaaaatgtggtgcagaaggaggctgcacctggcggttgcatgcatctgaatcatctcgtaacaagaaatttattatcaagagattgacagatgaacatacttgtggtggaggaagtggagagggtcagcgtcgagcaacacgacagtggttgactactatcattaaggagaagctgcatgataacccaaagttcaagccaaaggaacttgtaaaggaattatttgaagaatacggagttacactaacatattcacaggtctggcgaggcaaagaagtagcagagaaagagctgtatcatgctgtcagagagactcgcgatcagttaccttggtattgtcagaggctcgaggagacgaacccaggaagtataagtgtgctgtctccagtgttggatatgaaaacccgtcgtttttttgttgcattgcatgcttgtttgcatggctttataaatgggtgcaggcccctcttatttttggacaaggtcccactaaaagcaacgaatgagtacaagttgcttgtggccgctgctgttgatgcagatgatggtgtctttccgttggcatttaatgtggttgaagatgaaaattatgatagctggggttggttcttaatgcatctgaaaatagctctccaaactcacaactacccttgcaatggcatgacattcttgtccaacggacaaatgggtctggatgctgctgtttctcacgtgtttgaggatggcgaacatgccttctgtttgcatcatatcattgaggaattcaaaggagagctgaggaagggaccatggtcacaacaaattagggaggggatggttgaagatttcactcgtgcagcccaagcatgcagcatcgaggattttaatgcatccatcgagagcataaggaatatatccagtgaagctgctgactggatcatagcgagcaagccagagcattggtcagatgccattttccgaggcttccggtatgatcatttctccttgaacattgttgatgctttcgataactggataccagccaagaaggagagttccatagtgctgatggtagactcgctgagaattaagattaaggaagtaatagaatcaaggcttgaagcttgcaaggtgtggcaagggcctttaacacctaccatggaatacaaagtgcaggatgagatgctgaaggctggtaaaatgactgtgctgtgttcctccgatactgtatttgaagtgaggggcaacgcagttttcgtggttaatattggaaactgggaatgcacgtgccggcggtggcagctctccggcctcccctgcatgcatgccattgctgtgttcaacaggcttgggcgctgtttctatgactactgcccgaagttctttagaatagaaagctaccatctgacatactcgggaataatcttcccaatacctgacttggatagcgttgatttcagtgctggggcaaatctactcccactgcctcccaagcggcgcacgtcagataaaccgaggaggaagcggtctaaccccaacaagataagcactctcacacgactctgtagcaggtgcaaacaaacaggacacaacaaggcaacatgtgaagttcagttctagtggaaggcaacctcagaattaattcagcgtcaaaggtctcaagtttaggtatattgcagagaacatggtttcttttctcagagaacaagatctcaagttttttttaggctagtcagtttgactttttgatccatgcatcacacgaagatacgactaatgaattaaggatagttagaaggtttattcactcctgatgaatgctgtacttgtccataggatcttggtgaccactggtagaagccacggtacaaaccaccgtaagcagctgccacaactcttgtgtcaatttaactagtgtgggtgctcccttggataaagaccctaacgtggagttggcaatctgacaaaattaaaaagcacaggcaacttgctttgctttgttcagaacaccaaatattcattttcaaggtttaggattttgaaatttattttttcatttttaaaatgacttctgatgttatggtctaaactaaagttattaaatatgatctataactttgcagttgtcacattttatgtttgatcttttggaacttaaatacacaatttatttgagaccaggacaaaatattcattctaagttcc

SEQ ID NO: 21120 - DNA, 2778 bp, Zea Mays
cccacccgcagccctaacaaaccggtccccttcgacctcctcctccgccgccggcgtcgaccgcgaccgccacctctcctcgtacgctacagtaggggcaggggcggcgattggtggctcttcctcctcctatgctgtgactcgaggagtatggcggatggggctattgtggtagccatttgccagtacggcggagagttcacttctggccccagtggtaatctgatatacagaggtggagaagcacatgccgttgatgttactcatgattcatcgctggagagcttcaaggatgagctgtccaaggtgttccatgttgatgtcactgacatgtcactcaagtactttcttcccaataatatgaaaacactcatcacaatatcatgtgaccgggatttgcaaaggatggttggttttactgcaaatgctgcgcatgtggatgtttttctgataagtagacaggagaacaggagtactataacacattctggagctacatctggctctgttgctagtggcgacaaaaggaaaagaccaacacccaaaaacaaggtaatcagaagcagcaaaccagctaccagtgctgcttgcaatgcacttcaagctatcacagataatgtgagacaaccaatttcagttattactgaaaatgaagacaacagggtttttcagttggaatttgggaatgacatcacatttaccaccacagctggaggtgcttccttcacatcagatattctcgatcagcaaaagcttgttcttgttgataatatccccaaggaagcagttagtttgtttgatgatgcattcaatccatatgttagttctgagatcatgcatgagccgcctcaggaacctaacaatcctattgtgttgtgggatgacattatcaaaggagttggtcaagaatttgataacgtgaaagatttccgtgctcagttgtgcaagtatgctattgggaaaggatttgtgtaccggttcataaaaaatgaaactactcgtgtcactgtaaaatgtggtgcagaaggaggctgcacctggcggttgcatgcatctgaatcatctcgtaacaagaaatttattatcaagagattgacagatgaacatacttgtggtggaggaagtggagagggtcagcgtcgagcaacacgacagtggttgactactatcattaaggagaagctgcatgataacccaaagttcaagccaaaggaacttgtaaaggaattatttgaagaatacggagttacactaacatattcacaggtctggcgaggcaaagaagtagcagagaaagagctgtatcatgctgtcagagagactcgcgatcagttaccttggtattgtcagaggctcgaggagacgaacccaggaagtataagtgtgctgtctccagtgttggatatgaaaacccgtcgtttttttgttgcattgcatgcttgtttgcatggctttataaatgggtgcaggcccctcttatttttggacaaggtcccactaaaagcaacgaatgagtacaagttgcttgtggccgctgctgttgatgcagatgatggtgtctttccgttggcatttaatgtggttgaagatgaaaattatgatagctggggttggttcttaatgcatctgaaaatagctctccaaactcacaactacccttgcaatggcatgacattcttgtccaacggacaaatgggtctggatgctgctgtttctcacgtgtttgaggatggcgaacatgccttctgtttgcatcatatcattgaggaattcaaaggagagctgaggaagggaccatggtcacaacaaattagggaggggatggttgaagatttcactcgtgcagcccaagcatgcagcatcgaggattttaatgcatccatcgagagcataaggaatatatccagtgaagctgctgactggatcatagcgagcaagccagagcattggtcagatgccattttccgaggcttccggtatgatcatttctccttgaacattgttgatgctttcgataactggataccagccaagaaggagagttccatagtgctgatggtagactcgctgagaattaagattaaggaagtaatagaatcaaggcttgaagcttgcaaggtgtggcaagggcctttaacacctaccatggaatacaaagtgcaggatgagatgctgaaggctggtaaaatgactgtgctgtgttcctccgatactgtatttgaagtgaggggcaacgcagttttcgtggttaatattggaaactgggaatgcacgtgccggcggtggcagctctccggcctcccctgcatgcatgccattgctgtgttcaacaggcttgggcgctgtttctatgactactgcccgaagttctttagaatagaaagctaccatctgacatactcgggaataatcttcccaatacctgacttggatagcgttgatttcagtgctggggcaaatctactcccactgcctcccaagcggcgcacgtcagataaaccgaggaggaagcggtctaaccccaacaagataagcactctcacacgactctgtagcaggtgcaaacaaacaggacacaacaaggcaacatgtgaagttcagttctagtggaaggcaacctcagaattaattcagcgtcaaaggtctcaagtttaggatcttggtgaccactggtagaagccacggtacaaaccaccttgtcacattttatgtttgatcttttggaacttaaatacacaatttatttgagaccaggacaaaatattcattctaagttcc

SEQ ID NO: 21121 - DNA, 2938 bp, Zea Mays
gccctaacaaaccggtccccttcgacctcctcctccgccgccggcgtcgaccgcgaccgccacctctcctcgtacgctacagtaggggcaggggcggcgattggtggctcttcctcctcctatgctgtgactcgaggagtatggcggatggggctattgtggtagccatttgccagtacggcggagagttcacttctggccccagtggtaatctgatatacagaggtggagaagcacatgccgttgatgttactcatgattcatcgctggagagcttcaaggatgagctgtccaaggtgttccatgttgatgtcactgacatgtcactcaagtactttcttcccaataatatgaaaacactcatcacaatatcatgtgaccgggatttgcaaaggatggttggttttactgcaaatgctgcgcatgtggatgtttttctgataagtagacaggagaacaggagtactataacacattctggagctacatctggctctgttgctagtggcgacaaaaggaaaagaccaacacccaaaaacaaggtaatcagaagcagcaaaccagctaccagtgctgcttgcaatgcacttcaagctatcacagataatgtgagacaaccaatttcagttattactgaaaatgaagacaacagggtttttcagttggaatttgggaatgacatcacatttaccaccacagctggaggtgcttccttcacatcagatattctcgatcagcaaaagcttgttcttgttgataatatccccaaggaagcagttagtttgtttgatgatgcattcaatccatatgttagttctgagatcatgcatgagccgcctcaggaacctaacaatcctattgtgttgtgggatgacattatcaaaggagttggtcaagaatttgataacgtgaaagatttccgtgctcagttgtgcaagtatgctattgggaaaggatttgtgtaccggttcataaaaaatgaaactactcgtgtcactgtaaaatgtggtgcagaaggaggctgcacctggcggttgcatgcatctgaatcatctcgtaacaagaaatttattatcaagagattgacagatgaacatacttgtggtggaggaagtggagagggtcagcgtcgagcaacacgacagtggttgactactatcattaaggagaagctgcatgataacccaaagttcaagccaaaggaacttgtaaaggaattatttgaagaatacggagttacactaacatattcacaggtctggcgaggcaaagaagtagcagagaaagagctgtatcatgctgtcagagagactcgcgatcagttaccttggtattgtcagaggctcgaggagacgaacccaggaagtataagtgtgctgtctccagtgttggatatgaaaacccgtcgtttttttgttgcattgcatgcttgtttgcatggctttataaatgggtgcaggcccctcttatttttggacaaggtcccactaaaagcaacgaatgagtacaagttgcttgtggccgctgctgttgatgcagatgatggtgtctttccgttggcatttaatgtggttgaagatgaaaattatgatagctggggttggttcttaatgcatctgaaaatagctctccaaactcacaactacccttgcaatggcatgacattcttgtccaacggacaaatgggtctggatgctgctgtttctcacgtgtttgaggatggcgaacatgccttctgtttgcatcatatcattgaggaattcaaaggagagctgaggaagggaccatggtcacaacaaattagggaggggatggttgaagatttcactcgtgcagcccaagcatgcagcatcgaggattttaatgcatccatcgagagcataaggaatatatccagtgaagctgctgactggatcatagcgagcaagccagagcattggtcagatgccattttccgaggcttccggtatgatcatttctccttgaacattgttgatgctttcgataactggataccagccaagaaggagagttccatagtgctgatggtagactcgctgagaattaagattaaggaagtaatagaatcaaggcttgaagcttgcaaggtgtggcaagggcctttaacacctaccatggaatacaaagtgcaggatgagatgctgaaggctggtaaaatgactgtgctgtgttcctccgatactgtatttgaagtgaggggcaacgcagttttcgtggttaatattggaaactgggaatgcacgtgccggcggtggcagctctccggcctcccctgcatgcatgccattgctgtgttcaacaggcttgggcgctgtttctatgactactgcccgaagttctttagaatagaaagctaccatctgacatactcgggaataatcttcccaatacctgacttggatagcgttgatttcagtgctggggcaaatctactcccactgcctcccaagcggcgcacgtcagataaaccgaggaggaagcggtctaaccccaacaagataagcactctcacacgactctgtagcagcgtcaaaggtctcaagtttaggatcttggtgaccactggtagaagccacggtacaaaccaccgtaagcagctgccacaactcttgtgtcaatttaactagtgtgggtgctcccttggataaagaccctaacgtggagttggcaatctgacaaaattaaaaagcacaggcaacttgctttgctttgttcagaacaccaaatattcattttcaaggtttaggattttgaaatttattttttcatttttaaaatgacttctgatgttatggtctaaactaaagttattaaatatgatctataactttgcagttgtcacattttatgtttgatcttttggaacttaaatacacaatttatttgagaccaggacaaaatattcattctaagttcc

SEQ ID NO: 21122 - DNA, 2380 bp, Zea Mays
aaccggtccccttcgacctcctcctccgccgccggcgtcgaccgcgaccgccacctctcctcgtacgctacagtaggggcaggggcggcgattggtggctcttcctcctcctatgctgtgactcgaggagtatggcggatggggctattgtggtagccatttgccagtacggcggagagttcacttctggccccagtggtaatctgatatacagaggtggagaagcacatgccgttgatgttactcatgattcatcgctggagagcttcaaggatgagctgtccaaggtgttccatgttgatgtcactgacatgtcactcaagtactttcttcccaataatatgaaaacactcatcacaatatcatgtgaccgggatttgcaaaggatggttggttttactgcaaatgctgcgcatgtggatgtttttctgataagtagacaggagaacaggagtactataacacattctggagctacatctggctctgttgctagtggcgacaaaaggaaaagaccaacacccaaaaacaaggtaatcagaagcagcaaaccagctaccagtgctgcttgcaatgcacttcaagctatcacagataatgtgagacaaccaatttcagttattactgaaaatgaagacaacagggtttttcagttggaatttgggaatgacatcacatttaccaccacagctggaggtgcttccttcacatcagatattctcgatcagcaaaagcttgttcttgttgataatatccccaaggaagcagttagtttgtttgatgatgcattcaatccatatgttagttctgagatcatgcatgagccgcctcaggaacctaacaatcctattgtgttgtgggatgacattatcaaaggagttggtcaagaatttgataacgtgaaagatttccgtgctcagttgtgcaagtatgctattgggaaaggatttgtgtaccggttcataaaaaatgaaactactcgtgtcactgtaaaatgtggtgcagaaggaggctgcacctggcggttgcatgcatctgaatcatctcgtaacaagaaatttattatcaagagattgacagatgaacatacttgtggtggaggaagtggagagggtcagcgtcgagcaacacgacagtggttgactactatcattaaggagaagctgcatgataacccaaagttcaagccaaaggaacttgtaaaggaattatttgaagaatacggagttacactaacatattcacaggtctggcgaggcaaagaagtagcagagaaagagctgtatcatgctgtcagagagactcgcgatcagttaccttggtattgtcagaggctcgaggagacgaacccaggaagtataagtgtgctgtctccagtgttggatatgaaaacccgtcgtttttttgttgcattgcatgcttgtttgcatggctttataaatgggtgcaggcccctcttatttttggacaaggtcccactaaaagcaacgaatgagtacaagttgcttgtggccgctgctgttgatgcagatgatggtgtctttccgttggcatttaatgtggttgaagatgaaaattatgatagctggggttggttcttaatgcatctgaaaatagctctccaaactcacaactacccttgcaatggcatgacattcttgtccaacggacaaatgggtctggatgctgctgtttctcacgtgtttgaggatggcgaacatgccttctgtttgcatcatatcattgaggaattcaaaggagagctgaggaagggaccatggtcacaacaaattagggaggggatggttgaagatttcactcgtgcagcccaagcatgcagcatcgaggattttaatgcatccatcgagagcataaggaatatatccagtgaagctgctgactggatcatagcgagcaagccagagcattggtcagatgccattttccgaggcttccgtgctggggcaaatctactcccactgcctcccaagcggcgcacgtcagataaaccgaggaggaagcggtctaaccccaacaagataagcactctcacacgactctgtagcagcgtcaaaggtctcaagtttaggtatattgcagagaacatggtttcttttctcagagaacaagatctcaagttttttttaggctagtcagtttgactttttgatccatgcatcacacgaagatacgactaatgaattaaggatagttagaaggtttattcactcctgatgaatgctgtacttgtccataggatcttggtgaccactggtagaagccacggtacaaaccaccttgtcacattttatgtttgatcttttggaacttaaatacacaatttatttgagaccaggacaaaatattcattctaagttcc

SEQ ID NO: 21123 - DNA, 2488 bp, Zea Mays
tccccttcgacctcctcctccgccgccggcgtcgaccgcgaccgccacctctcctcgtacgctacagtaggggcaggggcggcgattggtggctcttcctcctcctatgctgtgactcgaggagtatggcggatggggctattgtggtagccatttgccagtacggcggagagttcacttctggccccagtggtaatctgatatacagaggtggagaagcacatgccgttgatgttactcatgattcatcgctggagagcttcaaggatgagctgtccaaggtgttccatgttgatgtcactgacatgtcactcaagtactttcttcccaataatatgaaaacactcatcacaatatcatgtgaccgggatttgcaaaggatggttggttttactgcaaatgctgcgcatgtggatgtttttctgataagtagacaggagaacaggagtactataacacattctggagctacatctggctctgttgctagtggcgacaaaaggaaaagaccaacacccaaaaacaaggtaatcagaagcagcaaaccagctaccagtgctgcttgcaatgcacttcaagctatcacagataatgtgagacaaccaatttcagttattactgaaaatgaagacaacagggtttttcagttggaatttgggaatgacatcacatttaccaccacagctggaggtgcttccttcacatcagatattctcgatcagcaaaagcttgttcttgttgataatatccccaaggaagcagttagtttgtttgatgatgcattcaatccatatgttagttctgagatcatgcatgagccgcctcaggaacctaacaatcctattgtgttgtgggatgacattatcaaaggagttggtcaagaatttgataacgtgaaagatttccgtgctcagttgtgcaagtatgctattgggaaaggatttgtgtaccggttcataaaaaatgaaactactcgtgtcactgtaaaatgtggtgcagaaggaggctgcacctggcggttgcatgcatctgaatcatctcgtaacaagaaatttattatcaagagattgacagatgaacatacttgtggtggaggaagtggagagggtcagcgtcgagcaacacgacagtggttgactactatcattaaggagaagctgcatgataacccaaagttcaagccaaaggaacttgtaaaggaattatttgaagaatacggagttacactaacatattcacaggtctggcgaggcaaagaagtagcagagaaagagctgtatcatgctgtcagagagactcgcgatcagttaccttggtattgtcagaggctcgaggagacgaacccaggaagtataagtgtgctgtctccagtgttggatatgaaaacccgtcgtttttttgttgcattgcatgcttgtttgcatggctttataaatgggtgcaggcccctcttatttttggacaaggtcccactaaaagcaacgaatgagtacaagttgcttgtggccgctgctgttgatgcagatgatggtgtctttccgttggcatttaatgtggttgaagatgaaaattatgatagctggggttggttcttaatgcatctgaaaatagctctccaaactcacaactacccttgcaatggcatgacattcttgtccaacggacaaatgggtctggatgctgctgtttctcacgtgtttgaggatggcgaacatgccttctgtttgcatcatatcattgaggaattcaaaggagagctgaggaagggaccatggtcacaacaaattagggaggggatggttgaagatttcactcgtgcagcccaagcatgcagcatcgaggattttaatgcatccatcgagagcataaggaatatatccagtgaagctgctgactggatcatagcgagcaagccagagcattggtcagatgccattttccgaggcttccggtatgatcatttctccttgaacattgttgatgctttcgataactggataccagccaagaaggagagttccatagtgctgatggtagactcgctgagaattaagattaaggaagtaatagaatcaaggcttgaagcttgcaaggtgtggcaagggcctttaacacctaccatggaatacaaagtgcaggatgagatgctgaaggctgtgctggggcaaatctactcccactgcctcccaagcggcgcacgtcagataaaccgaggaggaagcggtctaaccccaacaagataagcactctcacacgactctgtagcaggtgcaaacaaacaggacacaacaaggcaacatgtgaagttcagttctagtggaaggcaacctcagaattaattcagcgtcaaaggtctcaagtttaggatcttggtgaccactggtagaagccacggtacaaaccaccttgtcacattttatgtttgatcttttggaacttaaatacacaatttatttgagaccaggacaaaatattcattctaagttcc

SEQ ID NO: 21124 - DNA, 2758 bp, Zea Mays
tcgaggagtatggcggatggggctattgtggtagccatttgccagtacggcggagagttcacttctggccccagtggtaatctgatatacagaggtggagaagcacatgccgttgatgttactcatgattcatcgctggagagcttcaaggatgagctgtccaaggtgttccatgttgatgtcactgacatgtcactcaagtactttcttcccaataatatgaaaacactcatcacaatatcatgtgaccgggatttgcaaaggatggttggttttactgcaaatgctgcgcatgtggatgtttttctgataagtagacaggagaacaggagtactataacacattctggagctacatctggctctgttgctagtggcgacaaaaggaaaagaccaacacccaaaaacaaggtaatcagaagcagcaaaccagctaccagtgctgcttgcaatgcacttcaagctatcacagataatgtgagacaaccaatttcagttattactgaaaatgaagacaacagctggaggtgcttccttcacatcagatattctcgatcagcaaaagcttgttcttgttgataatatccccaaggaagcagttagtttgtttgatgatgcattcaatccatatgttagttctgagatcatgcatgagccgcctcaggaacctaacaatcctattgtgttgtgggatgacattatcaaaggagttggtcaagaatttgataacgtgaaagatttccgtgctcagttgtgcaagtatgctattgggaaaggatttgtgtaccggttcataaaaaatgaaactactcgtgtcactgtaaaatgtggtgcagaaggaggctgcacctggcggttgcatgcatctgaatcatctcgtaacaagaaatttattatcaagagattgacagatgaacatacttgtggtggaggaagtggagagggtcagcgtcgagcaacacgacagtggttgactactatcattaaggagaagctgcatgataacccaaagttcaagccaaaggaacttgtaaaggaattatttgaagaatacggagttacactaacatattcacaggtctggcgaggcaaagaagtagcagagaaagagctgtatcatgctgtcagagagactcgcgatcagttaccttggtattgtcagaggctcgaggagacgaacccaggaagtataagtgtgctgtctccagtgttggatatgaaaacccgtcgtttttttgttgcattgcatgcttgtttgcatggctttataaatgggtgcaggcccctcttatttttggacaaggtcccactaaaagcaacgaatgagtacaagttgcttgtggccgctgctgttgatgcagatgatggtgtctttccgttggcatttaatgtggttgaagatgaaaattatgatagctggggttggttcttaatgcatctgaaaatagctctccaaactcacaactacccttgcaatggcatgacattcttgtccaacggacaaatgggtctggatgctgctgtttctcacgtgtttgaggatggcgaacatgccttctgtttgcatcatatcattgaggaattcaaaggagagctgaggaagggaccatggtcacaacaaattagggaggggatggttgaagatttcactcgtgcagcccaagcatgcagcatcgaggattttaatgcatccatcgagagcataaggaatatatccagtgaagctgctgactggatcatagcgagcaagccagagcattggtcagatgccattttccgaggcttccggtatgatcatttctccttgaacattgttgatgctttcgataactggataccagccaagaaggagagttccatagtgctgatggtagactcgctgagaattaagattaaggaagtaatagaatcaaggcttgaagcttgcaaggtgtggcaagggcctttaacacctaccatggaatacaaagtgcaggatgagatgctgaaggctggtaaaatgactgtgctgtgttcctccgatactgtatttgaagtgaggggcaacgcagttttcgtggttaatattggaaactgggaatgcacgtgccggcggtggcagctctccggcctcccctgcatgcatgccattgctgtgttcaacaggcttgggcgctgtttctatgactactgcccgaagttctttagaatagaaagctaccatctgacatactcgggaataatcttcccaatacctgacttggatagcgttgatttcagtgctggggcaaatctactcccactgcctcccaagcggcgcacgtcagataaaccgaggaggaagcggtctaaccccaacaagataagcactctcacacgactctgtagcaggtgcaaacaaacaggacacaacaaggcaacatgtgaagttcagttctagtggaaggcaacctcagaattaattcagcgtcaaaggtctcaagtttaggtatattgcagagaacatggtttcttttctcagagaacaagatctcaagttttttttaggctagtcagtttgactttttgatccatgcatcacacgaagatacgactaatgaattaaggatagttagaaggtttattcactcctgatgaatgctgtacttgtccataggatcttggtgaccactggtagaagccacggtacaaaccaccttgtcacattttatgtttgatcttttggaacttaaatacacaatttatttgagaccaggacaaaatattcattctaagttcc

SEQ ID NO: 21125 - DNA, 2788 bp, Zea Mays
atggcggatggggctattgtggtagccatttgccagtacggcggagagttcacttctggccccagtggtaatctgatatacagaggtggagaagcacatgccgttgatgttactcatgattcatcgctggagagcttcaaggatgagctgtccaaggtgttccatgttgatgtcactgacatgtcactcaagtactttcttcccaataatatgaaaacactcatcacaatatcatgtgaccgggatttgcaaaggatggttggttttactgcaaatgctgcgcatgtggatgtttttctgataagtagacaggagaacaggagtactataacacattctggagctacatctggctctgttgctagtggcgacaaaaggaaaagaccaacacccaaaaacaaggtaatcagaagcagcaaaccagctaccagtgctgcttgcaatgcacttcaagctatcacagataatgtgagacaaccaatttcagttattactgaaaatgaagacaacagggtttttcagttggaatttgggaatgacatcacatttaccaccacagctggaggtgcttccttcacatcagatattctcgatcagcaaaagcttgttcttgttgataatatccccaattagtttgtttgatgatgcattcaatccatatgttagttctgagatcatgcatgagccgcctcaggaacctaacaatcctattgtgttgtgggatgacattatcaaaggagttggtcaagaatttgataacgtgaaagatttccgtgctcagttgtgcaagtatgctattgggaaaggatttgtgtaccggttcataaaaaatgaaactactcgtgtcactgtaaaatgtggtgcagaaggaggctgcacctggcggttgcatgcatctgaatcatctcgtaacaagaaatttattatcaagagattgacagatgaacatacttgtggtggaggaagtggagagggtcagcgtcgagcaacacgacagtggttgactactatcattaaggagaagctgcatgataacccaaagttcaagccaaaggaacttgtaaaggaattatttgaagaatacggagttacactaacatattcacaggtctggcgaggcaaagaagtagcagagaaagagctgtatcatgctgtcagagagactcgcgatcagttaccttggtattgtcagaggctcgaggagacgaacccaggaagtataagtgtgctgtctccagtgttggatatgaaaacccgtcgtttttttgttgcattgcatgcttgtttgcatggctttataaatgggtgcaggcccctcttatttttggacaaggtcccactaaaagcaacgaatgagtacaagttgcttgtggccgctgctgttgatgcagatgatggtgtctttccgttggcatttaatgtggttgaagatgaaaattatgatagctggggttggttcttaatgcatctgaaaatagctctccaaactcacaactacccttgcaatggcatgacattcttgtccaacggacaaatgggtctggatgctgctgtttctcacgtgtttgaggatggcgaacatgccttctgtttgcatcatatcattgaggaattcaaaggagagctgaggaagggaccatggtcacaacaaattagggaggggatggttgaagatttcactcgtgcagcccaagcatgcagcatcgaggattttaatgcatccatcgagagcataaggaatatatccagtgaagctgctgactggatcatagcgagcaagccagagcattggtcagatgccattttccgaggcttccggtatgatcatttctccttgaacattgttgatgctttcgataactggataccagccaagaaggagagttccatagtgctgatggtagactcgctgagaattaagattaaggaagtaatagaatcaaggcttgaagcttgcaaggtgtggcaagggcctttaacacctaccatggaatacaaagtgcaggatgagatgctgaaggctggtaaaatgactgtgctgtgttcctccgatactgtatttgaagtgaggggcaacgcagttttcgtggttaatattggaaactgggaatgcacgtgccggcggtggcagctctccggcctcccctgcatgcatgccattgctgtgttcaacaggcttgggcgctgtttctatgactactgcccgaagttctttagaatagaaagctaccatctgacatactcgggaataatcttcccaatacctgacttggatagcgttgatttcagtgctggggcaaatctactcccactgcctcccaagcggcgcacgtcagataaaccgaggaggaagcggtctaaccccaacaagataagcactctcacacgactctgtagcaggtgcaaacaaacaggacacaacaaggcaacatgtgaagttcagttctagtggaaggcaacctcagaattaattcagcgtcaaaggtctcaagtttaggtatattgcagagaacatggtttcttttctcagagaacaagatctcaagttttttttaggctagtcagtttgactttttgatccatgcatcacacgaagatacgactaatgaattaaggatagttagaaggtttattcactcctgatgaatgctgtacttgtccataggatcttggtgaccactggtagaagccacggtacaaaccaccttgtcacattttatgtttgatcttttggaacttaaatacacaatttatttgagaccaggacaaaatattcattctaagttcc

SEQ ID NO: 21126 - DNA, 1553 bp, Zea Mays
atgtatgtatctgcgcatttgccatttctggttacgctttcctctccggcctttccatcatcgccaccatttcgcacctcctccacaccggcaaacaacttcacgtcgcatgatctcgcgggagcgctcgaggatatgcaagtggcggccgctgcggcgtcaatgcgcggcaccgagacggttggcgcgaagtctgctgcgcggcggttgagccgcgtgctggtcgggcgccgccgccgggccgccgtgctgctcctcgcgctggcttacgcggctgcgatgctcatgctcaccattggcggcagcgaggggtctggatccagcggcgtggtggcgggtgtgctaaggcggggcgcgcaatcggcgccccccgggtcggtgtaccgcagccacctcgtgttcgaacggctgctcccggaaatgcgcgccttcgcctcccgcccgaacccgttagtgacatctcaatacaaaaagtttggaaagcaatgggaaccttgtatcagcaaggggttgatacactcagagctaccgccttcaaatggtttcctcatagttgaggcaaatggtggcttgaatcaacaacgcatttcaatttgtgatgctattgccgtggccaaaattcttaatgcaactcttgtgacaccagcatttcatttgaatagcgtttggcgtgattctagttttcagcaaatttggtgatatctttgacgaagatcacttcattgagtcacttagaaaatatgtaagggttgtaaaagatcttcctgaagatgtttttctgcgattcaaccataatatcagcataataccaaacatgagaaccaaagctttctcacccccaagttactacttacaacatgtgcttccaaagctgttggagctaggggctgtgcgtattgcccctttctcaaatagactggctcattcagttcctatgaatatccaggcattgagatgtttgacaaactataaggcattaagattttctgaaccaataagaattcttgcagataatatggttgaccgaatgatcaagaggagttttttaagtggcgggaagtacgtctcggttcatcttcgctttgaagaggttttactaaagtttatcttgtgtggactaatattactacttttctcaagttgtgatgagttatatgtctaggacatggtagctttttcatgctgtaattatgatggtggctcgacggagaataatgcaatggaaaatgctcgcgaaaggagctggagagggaaattccaccgacctggtcgagtgataaatcctgaggctaaccgaaggaatgggagatgccctttgacacctttggagtttatacaaggtcggaatgatgctgcgaggaatgggatttgacaacactacttccctttatgttgcatccggtaaaatatataacgctgaaaagtacatgactcctcttcgacggttgtttccatttctacaaacaaaacacgctctagttacacctgaggagcttgcacagttcaagaaatggaggccaggtatcaaaggataagttggccttcttacacac

SEQ ID NO: 21127 - DNA, 1788 bp, Zea Mays
atgtatgtatctgcgcatttgccatttctggttacgctttcctctccggcctttccatcatcgccaccatttcgcacctcctccacaccggcaaacaacttcacgtcgcatgatctcgcgggagcgctcgaggatatgcaagtggcggccgctgcggcgtcaatgcgcggcaccgagacggttggcgcgaagtctgctgcgcggcggttgagccgcgtgctggtcgggcgccgccgccgggccgccgtgctgctcctcgcgctggcttacgcggctgcgatgctcatgctcaccattggcggcagcgaggggtctggatccagcggcgtggtggcgggtgtgctaaggcggggcgcgcaatcggcgccccccgggtcggtgtaccgcagccacctcgtgttcgaacggctgctcccggaaatgcgcgccttcgcctcccgcccgaacccgttagtgacatctcaatacaaaaagtttggaaagcaatgggaaccttgtatcagcaaggggttgatacactcagagctaccgccttcaaatggtttcctcatagttgaggcaaatggtggcttgaatcaacaacgcatttcaatttgtgatgctattgccgtggccaaaattcttaatgcaactcttgtgacaccagcatttcatttgaatagcgtttggcgtgattctagcaaatttggtgatatctttgacgaagatcacttcattgagtcacttagaaaatatgtaagggttgtaaaagatcttcctgaagatgtttttctgcgattcaaccataatatcagcataataccaaacatgagaaccaaagctttctcacccccaagttactacttacaacatgtgcttccaaagctgttggagctaggataatatggttgaccgaatgatcaagaggagttttttaagtggcgggaagtacgtctcggttcatcttcgctttgaagaggttttactaaagtttatcttgtgtggactaatattactacttttctcaagttgtgatgagttatatgtctaggacatggtagctttttcatgctgtaattatgatggtggctcgacggagaataatgcaatggaaaatgctcgcgaaaggagctggagagggaaattccaccgacctggtcgagtgataaatcctgaggctaaccgaaggaatgggagatgccctttgacacctttggaggtcggaatgatgctgcgaggaatgggatttgacaacactacttccctttatgttgcatccggtaaaatatataacgctgaaaagtacatgactcctcttcgacggttgtttccatttctacaaacaaaacacgctctagttacacctgaggagcttgcacagttcaagggacattcatcaagacttgcagcactggactatactatctgtcttcatagcgaagtgtttgtgatgacacaaggaagcaatttccctcactttctgatggggcacagacgttatatgtatggaggacatgcaaagacaataaaaccagataagcggaagctagttcaactctttgacaatccaaatatcaggtaacaaggtaatgaaggccgaattcaggagacaaaatttgaagacatgacctcagataaatagcgtctaaagccatcaaaatatctcccttgatgatactctagcaagatttatagaagtggtcagtaaagccatctggccctggcgccttgtccattggcatgtcttttatagttgcccatagctccgcttccatgaaaggagcatctagttgagagagctcaatctgc

SEQ ID NO: 21128 - DNA, 1695 bp, Zea Mays
atgtatgtatctgcgcatttgccatttctggttacgctttcctctccggcctttccatcatcgccaccatttcgcacctcctccacaccggcaaacaacttcacgtcgcatgatctcgcgggagcgctcgaggatatgcaagtggcggccgctgcggcgtcaatgcgcggcaccgagacggttggcgcgaagtctgctgcgcggcggttgagccgcgtgctggtcgggcgccgccgccgggccgccgtgctgctcctcgcgctggcttacgcggctgcgatgctcatgctcaccattggcggcagcgaggggtctggatccagcggcgtggtggcgggtgtgctaaggcggggcgcgcaatcggcgccccccgggtcggtgtaccgcagccacctcgtgttcgaacggctgctcccggaaatgcgcgccttcgcctcccgcccgaacccgttagtgacatctcaatacaaaaagtttggaaagcaatgggaaccttgtatcagcaaggggttgatacactcagagctaccgccttcaaatggtttcctcatagttgaggcaaatggtggcttgaatcaacaacgcatttcaatttgtgatgctattgccgtggccaaaattcttaatgcaactcttgtgacaccagcatttcatttgaatagcgtttggcgtgattctagcaaatttggtgatatctttgacgaagatcacttcattgagtcacttagaaaatatgtaagggttgtaaaagatcttcctgaagatgtttttctgcgattcaaccataatatcagcataataccaaacatgagaaccaaagctttctcacccccaagttactacttacaacatgtgcttccaaagctgttggagctaggataatatggttgaccgaatgatcaagaggagttttttaagtggcgggaagacatggtagctttttcatgctgtaattatgatggtggctcgacggagaataatgcaatggaaaatgctcgcgaaaggagctggagagggaaattccaccgacctggtcgagtgataaatcctgaggctaaccgaaggaatgggagatgccctttgacacctttggagtttatacaaggtcggaatgatgctgcgaggaatgggatttgacaacactacttccctttatgttgcatccggtaaaatatataacgctgaaaagtacatgactcctcttcgacggttgtttccatttctacaaacaaaacacgctctagttacacctgaggagcttgcacagttcaagggacattcatcaagacttgcagcactggactatactatctgtcttcatagcgaagtgtttgtgatgacacaaggaagcaatttccctcactttctgatggggcacagacgttatatgtatggaggacatgcaaagacaataaaaccagataagcggaagctagttcaactctttgacaatccaaatatcaggtaacaaggtaatgaaggccgaattcaggagacaaaatttgaagacatgacctcagataaatagcgtctaaagccatcaaaatatctcccttgatgatactctagcaagatttatagaagtggtcagtaaagccatctggccctggcgccttgtccattggcatgtcttttatagttgcccatagctccgcttccatgaaaggagcatctagttgagagagctcaatctgc

SEQ ID NO: 21129 - DNA, 2109 bp, Zea Mays
atgtatgtatctgcgcatttgccatttctggttacgctttcctctccggcctttccatcatcgccaccatttcgcacctcctccacaccggcaaacaacttcacgtcgcatgatctcgcgggagcgctcgaggatatgcaagtggcggccgctgcggcgtcaatgcgcggcaccgagacggttggcgcgaagtctgctgcgcggcggttgagccgcgtgctggtcgggcgccgccgccgggccgccgtgctgctcctcgcgctggcttacgcggctgcgatgctcatgctcaccattggcggcagcgaggggtctggatccagcggcgtggtggcgggtgtgctaaggcggggcgcgcaatcggcgccccccgggtcggtgtaccgcagccacctcgtgttcgaacggctgctcccggaaatgcgcgccttcgcctcccgcccgaacccgttagtgacatctcaatacaaaaagtttggaaagcaatgggaaccttgtatcagcaaggggttgatacactcagagctaccgccttcaaatggtttcctcatagttgaggcaaatggtggcttgaatcaacaacgcatttcaatttgtgatgctattgccgtggccaaaattcttaatgcaactcttgtgacaccagcatttcatttgaatagcgtttggcgtgattctagcaaatttggtgatatctttgacgaagatcacttcattgagtcacttagaaaatatgtaagggttgtaaaagatcttcctgaagatgtttttctgcgattcaaccataatatcagcataataccaaacatgagaaccaaagctttctcacccccaagttactacttacaacatgtgcttccaaagctgttggagctaggggctgtgcgtattgcccctttctcaaatagactggctcattcagttcctatgaatatccaggcattgagatgtttgacaaactataaggcattaagattttctgaaccaataagaattcttgcagataatatggttgaccgaatgatcaagaggagttttttaagtggcgggaagtacgtctcggttcatcttcgctttgaagaggttttactaaagtttatcttgtgtggactaatattactacttttctcaagttgtgatgagttatatgtctaggacatggtagctttttcatgctgtaattatgatggtggctcgacggagaataatgcaatggaaaatgctcgcgaaaggagctggagagggaaattccaccgacctggtcgagtgataaatcctgaggctaaccgaaggaatgggagatgccctttgacacctttggaggtcggaatgatgctgcgaggaatgggatttgacaacactacttccctttatgttgcatccggtaaaatatataacgctgaaaagtacatgactcctcttcgacggttgtttccatttctacaaacaaaacacgctctagttacacctgaggagcttgcacagttcaagggacattcatcaagacttgcagcactggactatactatctgtcttcatagcgaagtgtttgtgatgacacaaggaagcaatttccctcactttctgatggggcacagacgttatatgtatggaggacatgcaaagacaataaaaccagataagcggaagctagttcaactctttgacaatccaaatatcagatgggatcgattcaagcaccacatgcaggacatgcgtcggcacagtgagatgaaaggtttcgcattaaggaaaccacaggaatccatatacacccttcctatgcctgactgcatgtgtcagcaagctgaagcacgatcaagggacacggcaaggagctaggcatgttccacccttcttctaacttgtaagcaggcacattaagcaaaggaaaaataaatattggtttgagcgtagaagagaatatagagatttcaaattatatggcccttgatatgaatcccttcctcaaataatagaggttcatcagtgagtatttgtatatgtgtgaagaaggtactccgcaatctattgtacttgtacattgtgctggataacttacaaagattttttcttcttatgagattaatctccagcgtgagctcaatc

SEQ ID NO: 21130 - DNA, 2299 bp, Zea Mays
atgtatgtatctgcgcatttgccatttctggttacgctttcctctccggcctttccatcatcgccaccatttcgcacctcctccacaccggcaaacaacttcacgtcgcatgatctcgcgggagcgctcgaggatatgcaagtggcggccgctgcggcgtcaatgcgcggcaccgagacggttggcgcgaagtctgctgcgcggcggttgagccgcgtgctggtcgggcgccgccgccgggccgccgtgctgctcctcgcgctggcttacgcggctgcgatgctcatgctcaccattggcggcagcgaggggtctggatccagcggcgtggtggcgggtgtgctaaggcggggcgcgcaatcggcgccccccgggtcggtgtaccgcagccacctcgtgttcgaacggctgctcccggaaatgcgcgccttcgcctcccgcccgaacccgttagtgacatctcaatacaaaaagtttggaaagcaatgggaaccttgtatcagcaaggggttgatacactcagagctaccgccttcaaatggtttcctcatagttgaggcaaatggtggcttgaatcaacaacgcatttcaatttgtgatgctattgccgtggccaaaattcttaatgcaactcttgtgacaccagcatttcatttgaatagcgtttggcgtgattctagcaaatttggtgatatctttgacgaagatcacttcattgagtcacttagaaaatatgtaagggttgtaaaagatcttcctgaagatgtttttctgcgattcaaccataatatcagcataataccaaacatgagaaccaaagctttctcacccccaagttactacttacaacatgtgcttccaaagctgttggagctaggggctgtgcgtattgcccctttctcaaatagactggctcattcagttcctatgaatatccaggcattgagatgtttgacaaactataaggcattaagattttctgaaccaataagaattcttgcagataatatggttgaccgaatgatcaagaggagttttttaagtggcgggaagacatggtagctttttcatgctgtaattatgatggtggctcgacggagaataatgcaatggaaaatgctcgcgaaaggagctggagagggaaattccaccgacctggtcgagtgataaatcctgaggctaaccgaaggaatgggagatgccctttgacacctttggaggttgcaatatttgttccttgcaatcttgctttttcctgaattgcttgagcccatgccatgtttgaggttctgctgtctactaatatacaattacatcacagacagagagcgcccggtcatattggcagatcatttctagattgtcttgtcttactccttgaatagaacaattatcctcacctaatttataagattggacttcatctctgataaaaaattaggggaactgtatttgcttcgttttataaggtatcatgtaacttatattttcttactagttcagtttatacaaggtcggaatgatgctgcgaggaatgggatttgacaacactacttccctttatgttgcatccggtaaaatatataacgctgaaaagtacatgactcctcttcgacggttgtttccatttctacaaacaaaacacgctctagttacacctgaggagcttgcacagttcaagggacattcatcaagacttgcagcactggactatactatctgtcttcatagcgaagtgtttgtgatgacacaaggaagcaatttccctcactttctgatggggcacagacgttatatgtatggaggacatgcaaagacaataaaaccagataagcggaagctagttcaactctttgacaatccaaatatcagatgggatcgattcaagcaccacatgcaggacatgcgtcggcacagtgagatgaaaggtttcgcattaaggaaaccacaggaatccatatacacccttcctatgcctgactgcatgtgtcagcaagctgaagcacgatcaagggacacggcaaggagctaggcatgttccacccttcttctaacttgtaagcaggcacattaagcaaaggaaaaataaatattggtttgagcgtagaagagaatatagagatttcaaattatatggcccttgatatgaatcccttcctcaaataatagaggttcatcagtgagtatttgtatatgtgtgaagaaggtactccgcaatctattgtacttgtacattgtgctggataacttacaaagattttttcttcttatgagattaatctccagcgtgagctcaatc

SEQ ID NO: 21131 - DNA, 2330 bp, Zea Mays
atgtatgtatctgcgcatttgccatttctggttacgctttcctctccggcctttccatcatcgccaccatttcgcacctcctccacaccggcaaacaacttcacgtcgcatgatctcgcgggagcgctcgaggatatgcaagtggcggccgctgcggcgtcaatgcgcggcaccgagacggttggcgcgaagtctgctgcgcggcggttgagccgcgtgctggtcgggcgccgccgccgggccgccgtgctgctcctcgcgctggcttacgcggctgcgatgctcatgctcaccattggcggcagcgaggggtctggatccagcggcgtggtggcgggtgtgctaaggcggggcgcgcaatcggcgccccccgggtcggtgtaccgcagccacctcgtgttcgaacggctgctcccggaaatgcgcgccttcgcctcccgcccgaacccgttagtgacatctcaatacaaaaagtttggaaagcaatgggaaccttgtatcagcaaggggttgatacactcagagctaccgccttcaaatggtttcctcatagttgaggcaaatggtggcttgaatcaacaacgcatttcaatttgtgatgctattgccgtggccaaaattcttaatgcaactcttgtgacaccagcatttcatttgaatagcgtttggcgtgattctagcaaatttggtgatatctttgacgaagatcacttcattgagtcacttagaaaatatgtaagggttgtaaaagatcttcctgaagatgtttttctgcgattcaaccataatatcagcataataccaaacatgagaaccaaagctttctcacccccaagttactacttacaacatgtgcttccaaagctgttggagctaggggctgtgcgtattgcccctttctcaaatagactggctcattcagttcctatgaatatccaggcattgagatgtttgacaaactataaggcattaagattttctgaaccaataagaattcttgcagataatatggttgaccgaatgatcaagaggagttttttaagtggcgggaagtacgtctcggttcatcttcgctttgaagaggacatggtagctttttcatgctgtaattatgatggtggctcgacggagaataatgcaatggaaaatgctcgcgaaaggagctggagagggaaattccaccgacctggtcgagtgataaatcctgaggctaaccgaaggaatgggagatgccctttgacacctttggaggttgcaatatttgttccttgcaatcttgctttttcctgaattgcttgagcccatgccatgtttgaggttctgctgtctactaatatacaattacatcacagacagagagcgcccggtcatattggcagatcatttctagattgtcttgtcttactccttgaatagaacaattatcctcacctaatttataagattggacttcatctctgataaaaaattaggggaactgtatttgcttcgttttataaggtatcatgtaacttatattttcttactagttcagtttatacaaggtcggaatgatgctgcgaggaatgggatttgacaacactacttccctttatgttgcatccggtaaaatatataacgctgaaaagtacatgactcctcttcgacggttgtttccatttctacaaacaaaacacgctctagttacacctgaggagcttgcacagttcaagggacattcatcaagacttgcagcactggactatactatctgtcttcatagcgaagtgtttgtgatgacacaaggaagcaatttccctcactttctgatggggcacagacgttatatgtatggaggacatgcaaagacaataaaaccagataagcggaagctagttcaactctttgacaatccaaatatcagatgggatcgattcaagcaccacatgcaggacatgcgtcggcacagtgagatgaaaggtttcgcattaaggaaaccacaggaatccatatacacccttcctatgcctgactgcatgtgtcagcaagctgaagcacgatcaagggacacggcaaggagctaggcatgttccacccttcttctaacttgtaagcaggcacattaagcaaaggaaaaataaatattggtttgagcgtagaagagaatatagagatttcaaattatatggcccttgatatgaatcccttcctcaaataatagaggttcatcagtgagtatttgtatatgtgtgaagaaggtactccgcaatctattgtacttgtacattgtgctggataacttacaaagattttttcttcttatgagattaatctccagcgtgagctcaatc

SEQ ID NO: 21132 - DNA, 2126 bp, Zea Mays
atgtatgtatctgcgcatttgccatttctggttacgctttcctctccggcctttccatcatcgccaccatttcgcacctcctccacaccggcaaacaacttcacgtcgcatgatctcgcgggagcgctcgaggatatgcaagtggcggccgctgcggcgtcaatgcgcggcaccgagacggttggcgcgaagtctgctgcgcggcggttgagccgcgtgctggtcgggcgccgccgccgggccgccgtgctgctcctcgcgctggcttacgcggctgcgatgctcatgctcaccattggcggcagcgaggggtctggatccagcggcgtggtggcgggtgtgctaaggcggggcgcgcaatcggcgccccccgggtcggtgtaccgcagccacctcgtgttcgaacggctgctcccggaaatgcgcgccttcgcctcccgcccgaacccgttagtgacatctcaatacaaaaagtttggaaagcaatgggaaccttgtatcagcaaggggttgatacactcagagctaccgccttcaaatggtttcctcatagttgaggcaaatggtggcttgaatcaacaacgcatttcaatttgtgatgctattgccgtggccaaaattcttaatgcaactcttgtgacaccagcatttcatttgaatagcgtttggcgtgattctagttttcagcaaatttggtgatatctttgacgaagatcacttcattgagtcacttagaaaatatgtaagggttgtaaaagatcttcctgaagatgtttttctgcgattcaaccataatatcagcataataccaaacatgagaaccaaagctttctcacccccaagttactacttacaacatgtgcttccaaagctgttggagctaggggctgtgcgtattgcccctttctcaaatagactggctcattcagttcctatgaatatccaggcattgagatgtttgacaaactataaggcattaagattttctgaaccaataagaattcttgcagataatatggttgaccgaatgatcaagaggagttttttaagtggcgggaagtacgtctcggttcatcttcgctttgaagaggttttactaaagtttatcttgtgtggactaatattactacttttctcaagttgtgatgagttatatgtctaggacatggtagctttttcatgctgtaattatgatggtggctcgacggagaataatgcaatggaaaatgctcgcgaaaggagctggagagggaaattccaccgacctggtcgagtgataaatcctgaggctaaccgaaggaatgggagatgccctttgacacctttggagtttatacaaggtcggaatgatgctgcgaggaatgggatttgacaacactacttccctttatgttgcatccggtaaaatatataacgctgaaaagtacatgactcctcttcgacggttgtttccatttctacaaacaaaacacgctctagttacacctgaggagcttgcacagttcaagggacattcatcaagacttgcagcactggactatactatctgtcttcatagcgaagtgtttgtgatgacacaaggaagcaatttccctcactttctgatggggcacagacgttatatgtatggaggacatgcaaagacaataaaaccagataagcggaagctagttcaactctttgacaatccaaatatcagatgggatcgattcaagcaccacatgcaggacatgcgtcggcacagtgagatgaaaggtttcgcattaaggaaaccacaggaatccatatacacccttcctatgcctgactgcatgtgtcagcaagctgaagcacgatcaagggacacggcaaggagctaggcatgttccacccttcttctaacttgtaagcaggcacattaagcaaaggaaaaataaatattggtttgagcgtagaagagaatatagagatttcaaattatatggcccttgatatgaatcccttcctcaaataatagaggttcatcagtgagtatttgtatatgtgtgaagaaggtactccgcaatctattgtacttgtacattgtgctggataacttacaaagattttttcttcttatgagattaatctccagcgtgagctcaatc

SEQ ID NO: 21133 - DNA, 3078 bp, Zea Mays
atgtatgtatctgcgcatttgccatttctggttacgctttcctctccggcctttccatcatcgccaccatttcgcacctcctccacaccggcaaacaacttcacgtcgcatgatctcgcgggagcgctcgaggatatgcaagtggcggccgctgcggcgtcaatgcgcggcaccgagacggttggcgcgaagtctgctgcgcggcggttgagccgcgtgctggtcgggcgccgccgccgggccgccgtgctgctcctcgcgctggcttacgcggctgcgatgctcatgctcaccattggcggcagcgaggggtctggatccagcggcgtggtggcgggtgtgctaaggcggggcgcgcaatcggcgccccccgggtcggtgtaccgcagccacctcgtgttcgaacggctgctcccggaaatgcgcgccttcgcctcccgcccgaacccgttagtgacatctcaatacaaaaagtttggaaagcaatgggaaccttgtatcagcaaggggttgatacactcagagctaccgccttcaaatggtttcctcatagttgaggcaaatggtggcttgaatcaacaacgcatttcaatttgtgatgctattgccgtggccaaaattcttaatgcaactcttgtgacaccagcatttcatttgaatagcgtttggcgtgattctagttttcagcaaatttggtgatatctttgacgaagatcacttcattgagtcacttagaaaatatgtaagggttgtaaaagatcttcctgaagatgtttttctgcgattcaaccataatatcagcataataccaaacatgagaaccaaagctttctcacccccaagttactacttacaacatgtgcttccaaagctgttggagctaggggctgtgcgtattgcccctttctcaaatagactggctcattcagttcctatgaatatccaggcattgagatgtttgacaaactataaggcattaagattttctgaaccaataagaattcttgcagataatatggttgaccgaatgatcaagaggagttttttaagtggcgggaattgtgatgagttatatgtctaggacatggtagctttttcatgctgtaattatgatggtggctcgacggagaataatgcaatggaaaatgctcgcgaaaggagctggagagggaaattccaccgacctggtcgagtgataaatcctgaggctaaccgaaggaatgggagatgccctttgacacctttggaggtcggaatgatgctgcgaggaatgggatttgacaacactacttccctttatgttgcatccggtaaaatatataacgctgaaaagtacatgactcctcttcgacggttgtttccatttctacaaacaaaacacgctctagttacacctgaggagcttgcacagttcaagggacattcatcaagacttgcagcactggactatactatctgtcttcatagcgaagtgtttgtgatgacacaaggaagcaatttccctcactttctgatggggcacagacgttatatgtatggaggacatgcaaagacaataaaaccagataagcggaagctagttcaactctttgacaatccaaatatcaggctgtattagcatcgccgtcttggagatagaggatacaggaccgcaagcgggcaatggttctttcaagggaggccaggccaaggcagtgtagtttaagcttcctccgcagccactcctgttcagagagatcccttgaatcacgctcaatttccagtcgatgtaagatttctttggccatttccatctgaactttgatgttgcccaccttcctctgaccccatttctgcagccctttactgagcctttgcaatttcagaaataggcgctcaactgcacaatttgaagacacaggagcttcctaattctgcttcaccgcatccaagaagcccggtattttggtccaaaaactttcaaaatggaaccgacgcttaccagcagtcttcactttgaggccaagtatgagggggtagtggtcagacactcctgctgtcatgctttgcagaattgactccggaaataaaccatcccaatcaacacagcaaaaggctctgtccagcctaaccaaagtacgggtctacgggactgccgctcattagaccaagtgtatttccttccaagcagggggatctccttgacctccatatcattcaagaagcgtctgaaacttgccatcatcgctgtatccaggaaggacactttctcatcgtctccctgtggtccataaactccagtgaacttccggccttcttgctcagcaaattgaatttcgttcatcctcgtgaagtttcataaactgtcaatgaatgtggcttgaaattcgtccacatgtagccatttttgtgtccaagataacggtcatctgatgacccttatttcataaaggtttcgccaaacatgattgcctctgtgtttattctaatctaattacagtataccgaatcctttatgtgcatgctgacactgacatacattgaatcttctgtaactggttactttcttttagttctgaacacctgcaatgggcagaacacgaaagggtttatgatttttttttcgtaatcatcatctagttgtggagtatcaaagctaatcttgtacgtagatgggatcgattcaagcaccacatgcaggacatgcgtcggcacagtgagatgaaaggtttcgcattaaggaaaccacaggaatccatatacacccttcctatgcctgactgcatgtgtcagcaagctgaagcacgatcaagggacacggcaaggagctaggcatgttccacccttcttctaacttgtaagcaggcacattaagcaaaggaaaaataaatattggtttgagcgtagaagagaatatagagatttcaaattatatggcccttgatatgaatcccttcctcaaataatagaggttcatcagtgagtatttgtatatgtgtgaagaaggtactccgcaatctattgtacttgtacattgtgctggataacttacaaagattttttcttcttatgagattaatctccagcgtgagctcaatc

SEQ ID NO: 21134 - DNA, 2861 bp, Zea Mays
atgtatgtatctgcgcatttgccatttctggttacgctttcctctccggcctttccatcatcgccaccatttcgcacctcctccacaccggcaaacaacttcacgtcgcatgatctcgcgggagcgctcgaggatatgcaagtggcggccgctgcggcgtcaatgcgcggcaccgagacggttggcgcgaagtctgctgcgcggcggttgagccgcgtgctggtcgggcgccgccgccgggccgccgtgctgctcctcgcgctggcttacgcggctgcgatgctcatgctcaccattggcggcagcgaggggtctggatccagcggcgtggtggcgggtgtgctaaggcggggcgcgcaatcggcgccccccgggtcggtgtaccgcagccacctcgtgttcgaacggctgctcccggaaatgcgcgccttcgcctcccgcccgaacccgttagtgacatctcaatacaaaaagtttggaaagcaatgggaaccttgtatcagcaaggggttgatacactcagagctaccgccttcaaatggtttcctcatagttgaggcaaatggtggcttgaatcaacaacgcatttcaataatatggttgaccgaatgatcaagaggagttttttaagtggcgggaagtacgtctcggttcatcttcgctttgaagaggttttactaaagtttatcttgtgtggactaatattactacttttctcaagttgtgatgagttatatgtctaggacatggtagctttttcatgctgtaattatgatggtggctcgacggagaataatgcaatggaaaatgctcgcgaaaggagctggagagggaaattccaccgacctggtcgagtgataaatcctgaggctaaccgaaggaatgggagatgccctttgacacctttggaggtcggaatgatgctgcgaggaatgggatttgacaacactacttccctttatgttgcatccggtaaaatatataacgctgaaaagtacatgactcctcttcgacggttgtttccatttctacaaacaaaacacgctctagttacacctgaggagcttgcacagttcaagggacattcatcaagacttgcagcactggactatactatctgtcttcatagcgaagtgtttgtgatgacacaaggaagcaatttccctcactttctgatggggcacagacgttatatgtatggaggacatgcaaagacaataaaaccagataagcggaagctagttcaactctttgacaatccaaatatcaggttttcataaaagtctagcacaactgcttgcttgtcctcttgggaaactgctatctgatcaccaacattaagcttgggtatgaaattcttcttcctgaaccttgcttgctgatggaagaaggctgtattagcatcgccgtcttggagatagaggatacaggaccgcaagcgggcaatggttctttcaagggaggccaggccaaggcagtgtagtttaagcttcctccgcagccactcctgttcagagagatcccttgaatcacgctcaatttccagtcgatgtaagatttctttggccatttccatctgaactttgatgttgcccaccttcctctgaccccatttctgcagccctttactgagcctttgcaatttcagaaataggcgctcaactgcacaatttgaagacacaggagcttcctaattctgcttcaccgcatccaagaagcccggtattttggtccaaaaactttcaaaatggaaccgacgcttaccagcagtcttcactttgaggccaagtatgagggggtagtggtcagacactcctgctgtcatgctttgcagaattgactccggaaataaaccatcccaatcaacacagcaaaaggctctgtccagcctaaccaaagtacgggtctacgggactgccgctcattagaccaagtgtatttccttccaagcagggggatctccttgacctccatatcattcaagaagcgtctgaaacttgccatcatcgctgtatccaggaaggacactttctcatcgtctccctgtggtccataaactccagtgaacttccggccttcttgctcagcaaattgaatttcgttcatcctcgtgaagtttcataaactgtcaatgaatgtggcttgaaattcgtccacatgtagccatttttgtgtccaagataacggtcatctgatgacccttatttcataaaggtttcgccaaacatgattgcctctgtgtttattctaatctaattacagtataccgaatcctttatgtgcatgctgacactgacatacattgaatcttctgtaactggttactttcttttagttctgaacacctgcaatgggcagaacacgaaagggtttatgatttttttttcgtaatcatcatctagttgtggagtatcaaagctaatcttgtacgtagatgggatcgattcaagcaccacatgcaggacatgcgtcggcacagtgagatgaaaggtttcgcattaaggaaaccacaggaatccatatacacccttcctatgcctgactgcatgtgtcagcaagctgaagcacgatcaagggacacggcaaggagctaggcatgttccacccttcttctaacttgtaagcaggcacattaagcaaaggaaaaataaatattggtttgagcgtagaagagaatatagagatttcaaattatatggcccttgatatgaatcccttcctcaaataatagaggttcatcagtgagtatttgtatatgtgtgaagaaggtactccgcaatctattgtacttgtacattgtgctggataacttacaaagattttttcttcttatgagattaatctccagcgtgagctcaatc

SEQ ID NO: 21135 - DNA, 2779 bp, Zea Mays
atgtatgtatctgcgcatttgccatttctggttacgctttcctctccggcctttccatcatcgccaccatttcgcacctcctccacaccggcaaacaacttcacgtcgcatgatctcgcgggagcgctcgaggatatgcaagtggcggccgctgcggcgtcaatgcgcggcaccgagacggttggcgcgaagtctgctgcgcggcggttgagccgcgtgctggtcgggcgccgccgccgggccgccgtgctgctcctcgcgctggcttacgcggctgcgatgctcatgctcaccattggcggcagcgaggggtctggatccagcggcgtggtggcgggtgtgctaaggcggggcgcgcaatcggcgccccccgggtcggtgtaccgcagccacctcgtgttcgaacggctgctcccggaaatgcgcgccttcgcctcccgcccgaacccgttagtgacatctcaatacaaaaagtttggaaagcaatgggaaccttgtatcagcaaggggttgatacactcagagctaccgccttcaaatggtttcctcatagttgaggcaaatggtggcttgaatcaacaacgcatttcaatttgtgatgctattgccgtggccaaaattcttaatgcaactcttgtgacaccagcatttcatttgaatagcgtttggcgtgattctaggtaaaagtttatgtttacataataatcagagatgtatttcgagtaactgaattattgtatataccttcgtccttttcctttcttggaaactagctttgtaaactattggtttactatactaagttgggaaacctacttctgttattagtctccttttgcaagtgtttttctggttaatctttcataacgagactggagtgaataagttaaatggattatgacccctatcgcatgcagccttttttgtatgcacactagcatttttttgttgctgctagcctgctacctttgagattatatttgctcttacgtagttatgtattttgacaacatagttttagtcattgttaagtactcctataagctcccacatatcctatcaggtgcatttccttttagcatataaaattttcccttaatcgtttaaatatgctgattctacatgtcccatgccattgggaattaaaactgtaatacctaaaatatatgttagtttacttctcactgtttcatgaggatgtcttttcaagttttcagcaaatttggtgatatctttgacgaagatcacttcattgagtcacttagaaaatatgtaagggttgtaaaagatcttcctgaagatgtttttctgcgattcaaccataatatcagcataataccaaacatgagaaccaaagctttctcacccccaagttactacttacaacatgtgcttccaaagctgttggagctaggggctgtgcgtattgcccctttctcaaatagactggctcattcagttcctatgaatatccaggcattgagatgtttgacaaactataaggcattaagattttctgaaccaataagaattcttgcagataatatggttgaccgaatgatcaagaggagttttttaagtggcgggaagtacgtctcggttcatcttcgctttgaagaggttttactaaagtttatcttgtgtggactaatattactacttttctcaagttgtgatgagttatatgtctaggacatggtagctttttcatgctgtaattatgatggtggctcgacggagaataatgcaatggaaaatgctcgcgaaaggagctggagagggaaattccaccgacctggtcgagtgataaatcctgaggctaaccgaaggaatgggagatgccctttgacacctttggaggtcggaatgatgctgcgaggaatgggatttgacaacactacttccctttatgttgcatccggtaaaatatataacgctgaaaagtacatgactcctcttcgacggttgtttccatttctacaaacaaaacacgctctagttacacctgaggagcttgcacagttcaaggtacctttttccttgattattccagtcctcaaacaaattttagaaagtgtgcctcccttatcctgtttgtattgcatcaagaaatggaggccaggtatcaaaggataagttggccttcttacacactctgtagggacattcatcaagacttgcagcactggactatactatctgtcttcatagcgaagtgtttgtgatgacacaaggaagcaatttccctcactttctgatggggcacagacgttatatgtatggaggacatgcaaagacaataaaaccagataagcggaagctagttcaactctttgacaatccaaatatcagatgggatcgattcaagcaccacatgcaggacatgcgtcggcacagtgagatgaaaggtttcgcattaaggaaaccacaggaatccatatacacccttcctatgcctgactgcatgtgtcagcaagctgaagcacgatcaagggacacggcaaggagctaggcatgttccacccttcttctaacttgtaagcaggcacattaagcaaaggaaaaataaatattggtttgagcgtagaagagaatatagagatttcaaattatatggcccttgatatgaatcccttcctcaaataatagaggttcatcagtgagtatttgtatatgtgtgaagaaggtactccgcaatctattgtacttgtacattgtgctggataacttacaaagattttttcttcttatgagattaatctccagcgtgagctcaatc

SEQ ID NO: 21136 - DNA, 1697 bp, Zea Mays
atgtatgtatctgcgcatttgccatttctggttacgctttcctctccggcctttccatcatcgccaccatttcgcacctcctccacaccggcaaacaacttcacgtcgcatgatctcgcgggagcgctcgaggatatgcaagtggcggccgctgcggcgtcaatgcgcggcaccgagacggttggcgcgaagtctgctgcgcggcggttgagccgcgtgctggtcgggcgccgccgccgggccgccgtgctgctcctcgcgctggcttacgcggctgcgatgctcatgctcaccattggcggcagcgaggggtctggatccagcggcgtggtggcgggtgtgctaaggcggggcgcgcaatcggcgccccccgggtcggtgtaccgcagccacctcgtgttcgaacggctgctcccggaaatgcgcgccttcgcctcccgcccgaacccgttagtgacatctcaatacaaaaagtttggaaagcaatgggaaccttgtatcagcaaggggttgatacactcagagctaccgccttcaaatggtttcctcatagttgaggcaaatggtggcttgaatcaacaacgcatttcaataatatggttgaccgaatgatcaagaggagttttttaagtggcgggaagtacgtctcggttcatcttcgctttgaagaggttttactaaagtttatcttgtgtggactaatattactacttttctcaagttgtgatgagttatatgtctaggacatggtagctttttcatgctgtaattatgatggtggctcgacggagaataatgcaatggaaaatgctcgcgaaaggagctggagagggaaattccaccgacctggtcgagtgataaatcctgaggctaaccgaaggaatgggagatgccctttgacacctttggaggtcggaatgatgctgcgaggaatgggatttgacaacactacttccctttatgttgcatccggtaaaatatataacgctgaaaagtacatgactcctcttcgacggttgtttccatttctacaaacaaaacacgctctagttacacctgaggagcttgcacagttcaagggacattcatcaagacttgcagcactggactatactatctgtcttcatagcgaagtgtttgtgatgacacaaggaagcaatttccctcactttctgatggggcacagacgttatatgtatggaggacatgcaaagacaataaaaccagataagcggaagctagttcaactctttgacaatccaaatatcagatgggatcgattcaagcaccacatgcaggacatgcgtcggcacagtgagatgaaaggtttcgcattaaggaaaccacaggaatccatatacacccttcctatgcctgactgcatgtgtcagcaagctgaagcacgatcaagggacacggcaaggagctaggcatgttccacccttcttctaacttgtaagcaggcacattaagcaaaggaaaaataaatattggtttgagcgtagaagagaatatagagatttcaaattatatggcccttgatatgaatcccttcctcaaataatagaggttcatcagtgagtatttgtatatgtgtgaagaaggtactccgcaatctattgtacttgtacattgtgctggataacttacaaagattttttcttcttatgagattaatctccagcgtgagctcaatc

SEQ ID NO: 21137 - DNA, 2016 bp, Zea Mays
atgtatgtatctgcgcatttgccatttctggttacgctttcctctccggcctttccatcatcgccaccatttcgcacctcctccacaccggcaaacaacttcacgtcgcatgatctcgcgggagcgctcgaggatatgcaagtggcggccgctgcggcgtcaatgcgcggcaccgagacggttggcgcgaagtctgctgcgcggcggttgagccgcgtgctggtcgggcgccgccgccgggccgccgtgctgctcctcgcgctggcttacgcggctgcgatgctcatgctcaccattggcggcagcgaggggtctggatccagcggcgtggtggcgggtgtgctaaggcggggcgcgcaatcggcgccccccgggtcggtgtaccgcagccacctcgtgttcgaacggctgctcccggaaatgcgcgccttcgcctcccgcccgaacccgttagtgacatctcaatacaaaaagtttggaaagcaatgggaaccttgtatcagcaaggggttgatacactcagagctaccgccttcaaatggtttcctcatagttgaggcaaatggtggcttgaatcaacaacgcatttcaatttgtgatgctattgccgtggccaaaattcttaatgcaactcttgtgacaccagcatttcatttgaatagcgtttggcgtgattctagcaaatttggtgatatctttgacgaagatcacttcattgagtcacttagaaaatatgtaagggttgtaaaagatcttcctgaagatgtttttctgcgattcaaccataatatcagcataataccaaacatgagaaccaaagctttctcacccccaagttactacttacaacatgtgcttccaaagctgttggagctaggggctgtgcgtattgcccctttctcaaatagactggctcattcagttcctatgaatatccaggcattgagatgtttgacaaactataaggcattaagattttctgaaccaataagaattcttgcagataatatggttgaccgaatgatcaagaggagttttttaagtggcgggaagacatggtagctttttcatgctgtaattatgatggtggctcgacggagaataatgcaatggaaaatgctcgcgaaaggagctggagagggaaattccaccgacctggtcgagtgataaatcctgaggctaaccgaaggaatgggagatgccctttgacacctttggagtttatacaaggtcggaatgatgctgcgaggaatgggatttgacaacactacttccctttatgttgcatccggtaaaatatataacgctgaaaagtacatgactcctcttcgacggttgtttccatttctacaaacaaaacacgctctagttacacctgaggagcttgcacagttcaagggacattcatcaagacttgcagcactggactatactatctgtcttcatagcgaagtgtttgtgatgacacaaggaagcaatttccctcactttctgatggggcacagacgttatatgtatggaggacatgcaaagacaataaaaccagataagcggaagctagttcaactctttgacaatccaaatatcagatgggatcgattcaagcaccacatgcaggacatgcgtcggcacagtgagatgaaaggtttcgcattaaggaaaccacaggaatccatatacacccttcctatgcctgactgcatgtgtcagcaagctgaagcacgatcaagggacacggcaaggagctaggcatgttccacccttcttctaacttgtaagcaggcacattaagcaaaggaaaaataaatattggtttgagcgtagaagagaatatagagatttcaaattatatggcccttgatatgaatcccttcctcaaataatagaggttcatcagtgagtatttgtatatgtgtgaagaaggtactccgcaatctattgtacttgtacattgtgctggataacttacaaagattttttcttcttatgagattaatctccagcgtgagctcaatc

SEQ ID NO: 21138 - DNA, 2081 bp, Zea Mays
gtatttggtgcatggaggccacgtaggtcagttcatatgtggttggcaccatgggaaaacacctctactgcatgtcaaacatgtcagggacaccttgccccatggttagtaggttaaaaggctaagtccagtgaagctttcctccttgccttaagccctacccacagaccgttgtaaagtgtgtggaggcctatgttccaactggtgaaagcctctccctagtctctagccttgatctgaaccagagccgagcacgccagccctctgcgtggtgaccacggccaccagctccttcacctcataatggccagaacatagtcgcgccaccgcaaatcatcgtcgtgtttagtttcatagtcgaccggccaacatacgacttccccgagcagtttcatgcacccaccgagaacttggactgtcagagctcccaaaataaagagtgaagattcaagatgaagtggttgctaaagaggagtctactccagtgtcttctcatcaagaggatggagctatctaattgatggttgggtagagagatctagaacctcttcactccaacaaaggcaagccccggtgcatttaccccttccttgtatttttaaaaatacttttatacacttaagtctagtgaaatgtgcattaagtttataggaattgcttggaaactatttgatgcattgactaccttgatatccattcctgttatagatacttctttggaagtatcaaatattatttacaaaaatgcttagccctgcttagatcttgtggatagaggttgtcttttgcaataatgcctagctcaggggttatcctgaggaaggatggcttctacctacaagaatattttcattgggagcatggtgggatcttactgcaaagttccctataatgctcttttcatcctaaggatggaagtacttaaatcgagacttgggctaggaacaggtgatgctccacccaggttaattaaggattggatgcgtatgtaggcctatatgatcaagtactatcttaattgcccacatgccctggatatgggacagggtaagcttgaacacggctattccatacatgaaaagacaatcccacactgggagtggagagatggcgagagtggcacgtaccctcctggcaaaggaccgcctaaaaggggtggtgtgctctcgggtggcacggaccagttcatgtagtgaaggatccgtgggaatggtagacatatgcaagagttacgagaaacatatgtcgtgtggttagagatcctcagctgagtaaatcgattcagatcgccgttatatccccggacagtggagacttgatctctgacctgcaacctaggtcaggatgtaaacattatgaataaaaataatgttgtattgatgagatggtgaaattagactagatgcaactagagtctattaatatttaatctggcgttaaaatattgaaagtaaggactcactttagtaagctatttctgcaaaagtatctaagttgattcttgctcaagcctttccttgattcctatttaaccagcatatccttgagagtctttttccttagacgggtaagatttgtgaaagtacactccgtactcagggtttttgaacccatgttgttgtaggtgatgaggagtactctaagtgttcctgtggttggagggcgtttccaattctggaggactagctaggtttatgtataagctttggagggtttctacctccctgcttttgtaataagttatgcactttaagcatattaggacttgtaataaatgtaactcttcctatgtaataaccttcagttttagaaatgaaaagaatgttttgtgaagtcttccgctcttatctccgaagtgtgtgtgtatcgaatgtggttactgtaatatgcatgtatggtgggagatccttggggtgatgagttcaagttgttgaactcgtgatagccttgttaagttacctagtacacatgcatagccatctgaggccatcaaggcaaggattggtgcatgtgggcccgataacttgggagggctgccacaaaagaactatgcatagtggaatttgaaattatacactcaa

SEQ ID NO: 21139 - DNA, 965 bp, Zea Mays
aaaacacctctactgcatgtcaaacatgtcagggacaccttgccccatggttagtaggttaaaaggctaagtccagtgaagctttcctccttgccttaagccctacccacagaccgttgtaaagtgtgtggaggcctatgttccaactggtgaaagcctctccctagtctctagccttgatctgaaccagagccgagcacgccagccctctgcgtggtgaccacggccaccagctccttcacctcataatggccagaacatagtcgcgccaccgcaaatcatcgtcgtgtttagtttcatagtcgaccggccaacatacgacttccccgagcagtttcatgcacccaccgagaacttggactgtcagagctcccaaaataaagagtgaagattcaagatgaagtggttgctaaagaggagtctactccagtgtcttctcatcaagaggatggagctatctaattgatggttgggtagagagatctagaacctcttcactccaacaaaggtgatgaggagtactctaagtgttcctgtggttggagggcgtttccaattctggaggactagctaggtttatgtataagctttggagggtttctacctccctgcttttgtaataagttatgcactttaagcatattaggacttgtaataaatgtaactcttcctatgtaataaccttcagttttagaaatgaaaagaatgttttgtgaagtcttccgctcttatctccgaagtgtgtgtgtatcgaatgtggttactgtaatatgcatgtatggtgggagatccttggggtgatgagttcaagttgttgaactcgtgatagccttgttaagttacctagtacacatgcatagccatctgaggccatcaaggcaaggattggtgcatgtgggcccgataacttgggagggctgccacaaaagaactatgcatagtggaatttgaaattatacactcaa

SEQ ID NO: 21140 - DNA, 2560 bp, Zea Mays
tgaaacccgaaattattctgggtaattcgggtagcgcaaaccggtacccgaataacccatacccgaaattcctacatgctacagtccaagtccgcaaacacccacggcccactgaccactgtccacaccgtgacaccggccgcccggccggcccaggcccaccagcgcacaccgccgcaaaccttaggtgtcactgtgtcagaccatcacacgcagacgcagacgccgccttcttcctgaccagcggtacaggcggtccagccttcagacgccgctagagcgccagcgccgccacccgccagcagcaggatccagctccacgtccagccgcactgccacagccaggcagccagcagccagggctccacgtccagccacagcagccagcaccagcaggctccacgtccagccacagccagagctcgccggggatcctggacaccgagtcgcccaccacgccggtcggccatgccatccaggaccaggctgctcaacaaagcctagaaaaatcttgcgagagttcaagtcagactggttttgtttctggttattttggtctcaaatggcaccagcaggatctcaaccttcgttaaaattttattgccgagtgctctggtgagtgttctgctctgaatagcaactgtttttaaaatttggttacttcgggagtacccgaaacccgaacccgaagtgtcgggtacccgaagtgtcgggtactataatacccagagcaaattcgggtaatactttctgaaacccgaaattttaattacccggattacccgacccgaaatattcgggtaacccgaacgcccaggcctactcctcgcgaccgccaccctagaaagaccatgggagctcacggtgtggtgaccgcgcggaagtcagggggagcgctgcaaattgtggtgtagcatcctcacatcgatggggacacgtaccctaggagcatcacaagatctcaccgagcgtgcccgtggcggtggcgggctctaacggtggaggtagaagtgtggattgctcgtcggagttcaacaagtgctcccgtccgccccacgcccggttctatgtgcacgtcgtcgcgatttccgatacgaacccccttttcatagtttagcgttgatccccgctttgtttggatgggtcccgcgtagagaatcaagcaccgtatcgatgtcgagtcatcaccggcggtgtttcgccatatgggggcggcggcgccgccattcaaaccgagaagggtgaggaagaacggtgtatgccattgatgagcgagcgaatggctgggattaacccactcgtaccggttcgacggtgtcaatccggtccttccgtctgtaatcaggcgcatcagattcaccgtgggcaacataagatccgaacggttgagctaagatcctaaggccagatatgcataccggttcgcgggggaatggatttaattttggtgggacccaataggttaccctagtttggctatctttataccttgtttaccactgatctttttgggtagtacttgctattgctttatgtggttttgggtatggatatacacattattcatgatcatacttttattatcagtttgttatttactattcatgataagatcattatgttaattggaacatggagcgaccacccgggaaaacagtgctaccataagggtggtatgggatgcccttggctgactaattaggaaagctagtggaggactaccttacctgaaaagggcaagggcagtaggggagtggtcggtgtagggaggctcttgggttgattttgttgcgatggcggtcaggcgaggggtccctgcattggagcttcctagaaactgtagcaggttttctgaaggtagtggaactttctaaaggcctcgtagtgttacactgcctcgcttccatggtagaggtgtatgggacgtcgcgattccttagcagatgggtaacatgacttgtgggtaaagatgcgcaacctctacagagtgtaaaactggtatatcagtcatgctcacggtcatgagcggctcggacccttacatgattaatttatggaattaaattcaatttgtcatttgcatcgcattaggatctattactgttgggggccttcggcttccgaaggtcctcaaaaacatgatttaacaatgtctctggagtataatgtgtggacagggatcttcgaactagaacccacggtatgaagaagcacggaaagaatacgaaggatggaacagagccgaagctgtgcgcaagggagcttcggcatgatggcagaaaagaggaaaccgacttaaagaggaaaagcctatctagacccagataggttactatagagttattgtcaaaagcaaagggcctggatgtaattttgaattgggctgcgacccgtgcctataaataggtgaacagtattcccgtactgttcacgctgacttggcattcgctttcgcgtcacgcttgtacccctgctttccttcgagccgaaggtacatttataatttgttattgttgatacagtaacgcaaataaaaataagttgataataatgtttaaag

SEQ ID NO: 21141 - DNA, 1625 bp, Zea Mays
cagcctccgtatctcactctccatttcaaactccattctgtaaacagtattttgcatttatagtaatgcatttacaatacaaaacagtgtttgttttcaaactcaactctgtaaacagtacatttacaacgtagaacagtcagtgttttgcacgctgagatggcctctagtgtcccacaacaaaaaccaaatatttcctccgagcgaggaaaaaattacctgcagagaatccattggctgcccaccatcaggagtaacaagacttgcaccaaaaatgggtatactctagtctacaagtagaaagttatagaagaacaaaaaaatatcaaaccagtaagcttgtaatatttcatcttacagcaatgtctgtatatgtacaggagcaagttccgttattttcttttgccaacatcgatggcaacaatgacacttctgtaactaagacgtcgccgatgaagcaggaaaagaaaatgtctagcaaaaatgctagcaaagcctcttcaagccttccgtgccagcctccccaagttattccgctccatttaacctcatgttagtgactaaagatagatgaatagccatggccaagcaagcataacaaaaatgctagcaaagcctcttcaattatgtgaaaagaacaggtggtggttgcttgaagctggggctggaagcacctgctttatttgacgatgttaacatcttatccttagcagtggcattgcctacaacctgttcagaagaatccggctgctggttgctttcgctatggatgggtcgggcccaaatttttatcagcccctcgcggcatatagtgaggattgattcactagtgaattccaggccggataggggatctacatgtacccggtgtgcaacgagagatgggcttccactactgaatgtcggtgagccaccagacggatggcgtagagggacagcaatctcttccaatgccagatcccagagaagcagttgggtatcctaagtgcaagcaaagtgaaaagatacaagagctgcaactcagcaagattggagtgggacagccaaaatacaatgaagctgtcacttcacatctaacacactatgttcgtcttcgctgatgcatgcactacaagttgtaagtcaagaacttagtatcttccatgcatatgggttatcgttacttttgtcagtatctcagaccgtgtccagcagctttttcatatgattatccaaaacactgttttacattgttttgcactgtagactgcactattcgctgagtagagtttgaatatgaagatgaggatggataagctgttggagatagtctcagcaaattctaacagatcgcagtgtactgcatgtcggcttgtgtaactcgtaggaccactaccatatcaagaaataaatatttaatactggtaaggtaacggcaagacaaatttgccaagcttattaagggggaaattgacaaacacttttagcacatgttcggctgtggtaaaaggcagctgttgctgctgccgtgctgcgggctccagcagcttcccgctctctcacaaaagtactgttgcagcagctgcggcaacagttttttatcatacccaaacagcgtgttaaattaaacagtaaaaatgaaaaca

SEQ ID NO: 21142 - DNA, 651 bp, Zea Mays
ttgtaccagctgctgcaagccaatatacaaatacaagagctgcaactcagcaagattggagtgggacagccaaaatacaatgaagctgtcacttcacatctaacacactatgttcgtcttcgctgatgcatgcactacaagttgtaagtcaagaacttagtatcttccatgcatatgggttatcgttacttttgtcagtatctcagaccgtgtccagcagctttttcatatgattatccaaaacactgttttacattgttttgcactgtagactgcactattcgctgagtagagtttgaatatgaagatgaggatggataagctgttggagatagtctcagcaaattctaacagatcgcagtgtactgcatgtcggcttgtgtaactcgtaggaccactaccatatcaagaaataaatatttaatactggtaaggtaacggcaagacaaatttgccaagcttattaagggggaaattgacaaacacttttagcacatgttcggctgtggtaaaaggcagctgttgctgctgccgtgctgcgggctccagcagcttcccgctctctcacaaaagtactgttgcagcagctgcggcaacagttttttatcatacccaaacagcgtgttaaattaaacagtaaaaatgaaaaca

SEQ ID NO: 21143 - DNA, 660 bp, Zea Mays
gtttgttcaagacaaccaaacatgccgtaactctcatagatacaagagctgcaactcagcaagattggagtgggacagccaaaatacaatgaagctgtcacttcacatctaacacactatgttcgtcttcgctgatgcatgcactacaagttgtaagtcaagaacttagtatcttccatgcatatgggttatcgttacttttgtcagtatctcagaccgtgtccagcagctttttcatatgattatccaaaacactgttttacattgttttgcactgtagactgcactattcgctgagtagagtttgaatatgaagatgaggatggataagctgttggagatagtctcagcaaattctaacagatcgcagtgtactgcatgtcggcttgtgtaactcgtaggaccactaccatatcaagaaataaatatttaatactggtaaggtaacggcaagacaaatttgccaagcttattaagggggaaattgacaaacacttttagcacatgttcggctgtggtaaaaggcagctgttgctgctgccgtgctgcgggctccagcagcttcccgctctctcacaaaagtactgttgcagcagctgcggcaacagttttttatcatacccaaacagcgtgttaaattaaacagtaaaaatgaaaaca

SEQ ID NO: 21144 - DNA, 3907 bp, Zea Mays
cgcatcaatactaaccaaaaccttcccagcaaaagcccggtccttctcagtctccctcgtctccctcagatctaagccaccgtcccttcccccagctccggcgatcaccggagtgcctccgccttggggcatgatggacctcctcatcgcgcagatcaccactgacctccgctcctcggacgcgctccggcagtcgtcggcgctgctgcaggccctgcagcagtgcgccgcggggcgggacgtctccgcgctcgcccgcaccgcggccaccgagatcctgtcggcgccctcctccgccgtctgcaagcgcctggcgctcgacctcctccgcgcgctcccgctgccgccggacctcctcgacccgctccttctctcctccctccgctccgatctctcctttccagaccccgacgtcgccgcctcctccatcgcctcgttcccatccctgccctcccaccttctcccctcgcttctctcctccgcccacgctgaaatcgctaatgcactctcctcgcccgctgagtcgctgcgcctcgcagctgtcacatctctgtcctcgctcctcccgcgcgatgacctaacgctcatgtgctccacaaacccctccctcatggcgcatgctaccacgtggtggggccgcctggccgagcttgcgctggactctgcagacgctgtttccgccggtgcgtttgaggctcttgcacggctgttccaggagctagaggggcgccgcatgagccggctagctggagacaagcttgttgatggagaaggtgcgcttgcagtgcgtgcccagtgggcggctgatgccattgatttcatttggtcaaggcgcaacatgctgattgcgcgctctatggtgatgcctgtggagagcttccgagttactgtgtaccctctagtgcatgcagcaaaaatggttgcttctggtgtggtaaacactctgcggcgagttgctaagccaggagacactacaattgctgatagcgtggagtcgagtgcggagaaattggtaggagtgtcagacatcgtctcacacttgctgccatttcttagttcacttgacccaccactggtgttcgaggttgggatcaatatgctggcgcttgcagatgtccctggaggcaagccagagtgggcatcagctgcaattattgcaatcctgacactatgggaccggcaagagttctcttcgatgagggagacaattgtaagggctgttgtaaccaatcttcatttgctggatcttggaatgcaggtctctctattcaaaagactgcttcagatggtgagaaacttgagagcagaatcagatcgaatgcatgctttggcatgtatttgtcggactgctctttgtgttgatctttttgcaaaggagagtgtccgaagaggtcagaagcctgttcctggaacagatgtgatatcgctctttgaagatgtgagggtgaaggaagatctaaacagcgtaacaagcaaaaacttgttcagagaagagctagtggcttccctagtcgaaagttgtttccagctatctcttccactaccagagttgaagaattctgggacagagagcagagttataggagcgttagcctatggaactggttatggtgcccttaactggacagaacctgctttggatgtggtggaagtttgcaggccatgtgttctttgggactgtgatggtcgtacctatgcaattgattgctatctaaagttacttgtgaggctttgtcatatatatgataccagaggcggtgtgaagacaattaaagctggtgcatctcaagatcagattctgaatgagacacgacttagaaatttgcagctgcagcttatcagggaccttcgcgaggttcacactccacgtatatcttcacgcttgatatgggcaatttctgaacactttgatcttgaaggtctggatccccttttagctgatgacccagaggacccactgaatattgtcatatctaacatgcacaagatattattcaacaccgattcatctgctactacatcaaataggatacaagatgtgcaggctgttctaatttgcgctcagcggttgggagcaagaaatgcaagagcaggccaacttctcactaaagaactggaagagtttagggcaagtacttcagctgattctatgaccaagcatcaatcacgttatgtgttgcaagtaataaaatacgtaacaaaccatcctgacaacaggtgggttggtgtaggtgatgctacaggggattatccatttagtcaccacaagcttaccgttcaattttcagaggcgtctgctgcccaagataggaaattggagggattagtccataaggccatccgggagctttggaggccgaatcccagtcaattaattctcctacaaacaaggggaattggtgctttgcataaagagcttccaaaagcgtgtgctttgactggcagcagtgatccgtgctacatcgaagcatatcatttggcagatccaactgatggcagaattaccctacatctaaagattttaaatttgactgagctggaactcaacagggtggacatccgtgttggcctgtctggagcactgtattatatggatggtttctctcgcactgttcgtcaccttcggaatcttgtttcccaggatccagtccaaagtagtgtgactgttggagtttcacattttgagagatgctcgctctgggttcaagttttgtattacccgttttatggaagtagtggatcaacagactatgaaggagattatgcagaagaggattcacagatgatgaggcagaagcgctcacatcggcctgaacttggggaaccggttgttttgcggtgccaaccatacaagtttcctctcgctgagctcctcctaccattagagtgttctccagttgagtatttccggctatggcctagcctaccagccatggtggagtgcactggcacatacacatatgaaggcagtggtttcaaggccaccgctgctcagcagtatgacagctctcccttcctcagtggattgaagtcgatttcttctaagcccttccatcaagtctgctcacatttcatccggacagtagctggattccagcaaagacatggtttggtggatttgtgggcatgatgatatttggggcaagtgaagtcagccggaatgttgatttgggtgatgagaccaccacaatgatctgcaaattcgtcatgcgcgcatccgatgaatccatcacgagagagatcaaatccgacctccagggctggctggatgatatcaccgacggcgctgtggaatacatgcctgaggatgaggtgaagagtgtggccgccgagcagctgaagatctccatggagaggattgccctgctcaaggcagccaggccaaaggtcccacccgcaaagaccgatcaagaggaggaagaggagcgaaagcagagcgaggaactagatgggtttggaaaccccaagggcccctcgacgctctccaagctcaccgcggaggaggctgagcaccgcgctctccaggctgccgtgcttcaggagtggcaccagctatgcaaagagagagccatgaaagcgcagtgaggtcgatttggaccgtgtggatcttacgcgcatgtataattttgtatttttccttcgtctcccattctttgcgtgtctatactgctggtttcactcactgtataccgtcgccgatttgttcattgtattctcaaatacttgtgcacgaaaaaacctgttttgtaacatactactgttagggcgtttttaagcttcggtgtgaagatcgattgtacaagagaatccaaatgtcattgttgccttcccagttttatgaaaatgcattctgtaattgaagaattctccccaaaatgccacgatttataaataagaaatgtggaat

SEQ ID NO: 21145 - DNA, 3272 bp, Zea Mays
ggtccttctcagtctccctcgtctccctcagatctaagccaccgtcccttcccccagctccggcgatcaccggagtgcctccgccttggggcatgatggacctcctcatcgcgcagatcaccactgacctccgctcctcggacgcgctccggcagtcgtcggcgctgctgcaggccctgcagcagtgcgccgcggggcgggacgtctccgcgctcgcccgcaccgcggccaccgagatcctgtcggcgccctcctccgccgtctgcaagcgcctggcgctcgacctcctccgcgcgctcccgctgccgccggacctcctcgacccgctccttctctcctccctccgctccgatctctcctttccagaccccgacgtcgccgcctcctccatcgcctcgttcccatccctgccctcccaccttctcccctcgcttctctcctccgcccacgctgaaatcgctaatgcactctcctcgcccgctgagtcgctgcgcctcgcagctgtcacatctctgtcctcgctcctcccgcgcgatgacctaacgctcatgtgctccacaaacccctccctcatggcgcatgctaccacgtggtggggccgcctggccgagcttgcgctggactctgcagacgctgtttccgccggtgcgtttgaggctcttgcacggctgttccaggagctagaggggcgccgcatgagccggctagctggagacaagcttgttgatggagaaggtgcgcttgcagtgcgtgcccagtgggcggctgatgccattgatttcatttggtcaaggcgcaacatgctgattgcgcgctctatggtgatgcctgtggagagcttccgagttactgtgtaccctctagtgcatgcagcaaaaatggttgcttctggtgtggtaaacactctgcggcgagttgctaagccaggagacactacaattgctgatagcgtggagtcgagtgcggagaaattggtaggagtgtcagacatcgtctcacacttgctgccatttcttagttcacttgacccaccactggtgttcgaggttgggatcaatatgctggcgcttgcagatgtccctggaggcaagccagagtgggcatcagctgcaattattgcaatcctgacactatgggaccggcaagagttctcttcgatgagggagacaattgtaagggctgttgtaaccaatcttcatttgctggatcttggaatgcaggttcacactccacgtatatcttcacgcttgatatgggcaatttctgaacactttgatcttgaaggtctggatccccttttagctgatgacccagaggacccactgaatattgtcatatctaacatgcacaagatattattcaacaccgattcatctgctactacatcaaataggatacaagatgtgcaggctgttctaatttgcgctcagcggttgggagcaagaaatgcaagagcaggccaacttctcactaaagaactggaagagtttagggcaagtacttcagctgattctatgaccaagcatcaatcacgttatgtgttgcaagtaataaaatacgtaacaaaccatcctgacaacaggtgggttggtgtaggtgatgctacaggggattatccatttagtcaccacaagcttaccgttcaattttcagaggcgtctgctgcccaagataggaaattggagggattagtccataaggccatccgggagctttggaggccgaatcccagtcaattaattctcctacaaacaaggggaattggtgctttgcataaagagcttccaaaagcgtgtgctttgactggcagcagtgatccgtgctacatcgaagcatatcatttggcagatccaactgatggcagaattaccctacatctaaagattttaaatttgactgagctggaactcaacagggtggacatccgtgttggcctgtctggagcactgtattatatggatggtttctctcgcactgttcgtcaccttcggaatcttgtttcccaggatccagtccaaagtagtgtgactgttggagtttcacattttgagagatgctcgctctgggttcaagttttgtattacccgttttatggaagtagtggatcaacagactatgaaggagattatgcagaagaggattcacagatgatgaggcagaagcgctcacatcggcctgaacttggggaaccggttgttttgcggtgccaaccatacaagtttcctctcgctgagctcctcctaccattagagtgttctccagttgagtatttccggctatggcctagcctaccagccatggtggagtgcactggcacatacacatatgaaggcagtggtttcaaggccaccgctgctcagcagtatgacagctctcccttcctcagtggattgaagtcgatttcttctaagcccttccatcaagtctgctcacatttcatccggacagtagctggattccagcaaagacatggtttggtggatttgtgggcatgatgatatttggggcaagtgaagtcagccggaatgttgatttgggtgatgagaccaccacaatgatctgcaaattcgtcatgcgcgcatccgatgaatccatcacgagagagatcaaatccgacctccagggctggctggatgatatcaccgacggcgctgtggaatacatgcctgaggatgaggtgaagagtgtggccgccgagcagctgaagatctccatggagaggattgccctgctcaaggcagccaggccaaaggtcccacccgcaaagaccgatcaagaggaggaagaggagcgaaagcagagcgaggaactagatgggtttggaaaccccaagggcccctcgacgctctccaagctcaccgcggaggaggctgagcaccgcgctctccaggctgccgtgcttcaggagtggcaccagctatgcaaagagagagccatgaaagcgcagtgaggtcgatttggaccgtgtggatcttacgcgcatgtataattttgtatttttccttcgtctcccattctttgcgtgtctatactgctggtttcactcactgtataccgtcgccgatttgttcattgtattctcaaatacttgtgcacgaaaaaacctgttttgtaacatactactgttagggcgtttttaagcttcggtgtgaagatcgattgtacaagagaatccaaatgtcattgttgccttcccagttttatgaaaatgcattctgtaattgaagaattctccccaaaatgccacgatttataaataagaaatgtggaat

SEQ ID NO: 21146 - DNA, 3882 bp, Zea Mays
ggtccttctcagtctccctcgtctccctcagatctaagccaccgtcccttcccccagctccggcgatcaccggagtgcctccgccttggggcatgatggacctcctcatcgcgcagatcaccactgacctccgctcctcggacgcgctccggcagtcgtcggcgctgctgcaggccctgcagcagtgcgccgcggggcgggacgtctccgcgctcgcccgcaccgcggccaccgagatcctgtcggcgccctcctccgccgtctgcaagcgcctggcgctcgacctcctccgcgcgctcccgctgccgccggacctcctcgacccgctccttctctcctccctccgctccgatctctcctttccagaccccgacgtcgccgcctcctccatcgcctcgttcccatccctgccctcccaccttctcccctcgcttctctcctccgcccacgctgaaatcgctaatgcactctcctcgcccgctgagtcgctgcgcctcgcagctgtcacatctctgtcctcgctcctcccgcgcgatgacctaacgctcatgtgctccacaaacccctccctcatggcgcatgctaccacgtggtggggccgcctggccgagcttgcgctggactctgcagacgctgtttccgccggtgcgtttgaggctcttgcacggctgttccaggagctagaggggcgccgcatgagccggctagctggagacaagcttgttgatggagaaggtgcgcttgcagtgcgtgcccagtgggcggctgatgccattgatttcatttggtcaaggcgcaacatgctgattgcgcgctctatggtgatgcctgtggagagcttccgagttactgtgtaccctctagtgcatgcagcaaaaatggttgcttctggtgtggtaaacactctgcggcgagttgctaagccaggagacactacaattgctgatagcgtggagtcgagtgcggagaaattggtaggagtgtcagacatcgtctcacacttgctgccatttcttagttcacttgacccaccactggtgttcgaggttgggatcaatatgctggcgcttgcagatgtccctggaggcaagccagagtgggcatcagctgcaattattgcaatcctgacactatgggaccggcaagagttctcttcgatgagggagacaattgtaagggctgttgtaaccaatcttcatttgctggatcttggaatgcaggtctctctattcaaaagactgcttcagatggtgagaaacttgagagcagaatcagatcgaatgcatgctttggcatgtatttgtcggactgctctttgtgttgatctttttgcaaaggagagtgtccgaagaggtcagaagcctgttcctggaacagatgtgatatcgctctttgaagatgtgagggtgaaggaagatctaaacagcgtaacaagcaaaaacttgttcagagaagagctagtggcttccctagtcgaaagttgtttccagctatctcttccactaccagagttgaagaattctgggacagagagcagagttataggagcgttagcctatggaactggttatggtgcccttaactggacagaacctgctttggatgtggtggaagtttgcaggccatgtgttctttgggactgtgatggtcgtacctatgcaattgattgctatctaaagttacttgtgaggctttgtcatatatatgataccagaggcggtgtgaagacaattaaagctggtgcatctcaagatcagattctgaatgagacacgacttagaaatttgcagctgcagcttatcagggaccttcgcgaggttcacactccacgtatatcttcacgcttgatatgggcaatttctgaacactttgatcttgaaggtctggatccccttttagctgatgacccagaggacccactgaatattgtcatatctaacatgcacaagatattattcaacaccgattcatctgctactacatcaaataggatacaagatgtgcaggctgttctaatttgcgctcagcggttgggagcaagaaatgcaagagcaggccaacttctcactaaagaactggaagagtttagggcaagtacttcagctgattctatgaccaagcatcaatcacgttatgtgttgcaagtaataaaatacgtaacaaaccatcctgacaacaggtgggttggtgtaggtgatgctacaggggattatccatttagtcaccacaagcttaccgttcaattttcagaggcgtctgctgcccaagataggaaattggagggattagtccataaggccatccgggagctttggaggccgaatcccagtcaattaattctcctacaaacaaggggaattggtgctttgcataaagagcttccaaaagcgtgtgctttgactggcagcagtgatccgtgctacatcgaagcatatcatttggcagatccaactgatggcagaattaccctacatctaaagattttaaatttgactgagctggaactcaacagggtggacatccgtgttggcctgtctggagcactgtattatatggatggtttctctcgcactgttcgtcaccttcggaatcttgtttcccaggatccagtccaaagtagtgtgactgttggagtttcacattttgagagatgctcgctctgggttcaagttttgtattacccgttttatggaagtagtggatcaacagactatgaaggagattatgcagaagaggattcacagatgatgaggcagaagcgctcacatcggcctgaacttggggaaccggttgttttgcggtgccaaccatacaagtttcctctcgctgagctcctcctaccattagagtgttctccagttgagtatttccggctatggcctagcctaccagccatggtggagtgcactggcacatacacatatgaaggcagtggtttcaaggccaccgctgctcagcagtatgacagctctcccttcctcagtggattgaagtcgatttcttctaagcccttccatcaagtctgctcacatttcatccggacagtagctggattccagttatgttatgcagcaaagacatggtttggtggatttgtgggcatgatgatatttggggcaagtgaagtcagccggaatgttgatttgggtgatgagaccaccacaatgatctgcaaattcgtcatgcgcgcatccgatgaatccatcacgagagagatcaaatccgacctccagggctggctggatgatatcaccgacggcgctgtggaatacatgcctgaggatgaggtgaagagtgtggccgccgagcagctgaagatctccatggagaggattgccctgctcaaggcagccaggccaaaggtcccacccgcaaagaccgatcaagaggaggaagaggagcgaaagcagagcgaggaactagatgggtttggaaaccccaagggcccctcgacgctctccaagctcaccgcggaggaggctgagcaccgcgctctccaggctgccgtgcttcaggagtggcaccagctatgcaaagagagagccatgaaagcgcagtgaggtcgatttggaccgtgtggatcttacgcgcatgtataattttgtatttttccttcgtctcccattctttgcgtgtctatactgctggtttcactcactgtataccgtcgccgatttgttcattgtattctcaaatacttgtgcacgaaaaaacctgttttgtaacatactactgttagggcgtttttaagcttcggtgtgaagatcgattgtacaagagaatccaaatgtcattgttgccttcccagttttatgaaaatgcattctgtaattgaagaattctccccaaaatgccacgatttataaataagaaatgtggaat

SEQ ID NO: 21147 - DNA, 2716 bp, Zea Mays
ccacctttcttctccctcgttcccgagtccgaatctgggtccagcggagacaaagaggagctggccgcgtcgtatcgactcctgccgccgaaaggccgagcccgagcccgtgtcccggtgcccgttcccgcaaccctaatcccctaccaccgtcggctctcgccggcgaagaagagggagccgcgcggcgtcgccagggagcacgcgccccctcccttcccggctccctccgcgccgtggggaggcgcgtccacccggatccgccctcaccgcgaggcagaggggaggagagggagccaggtccggcgcacccgctgtcgtccgcgccgaagagcgttaagagtctccccacaggcttggctgagggaaacttgtgctctgcgcatcttggacactacttcaccatttaccaagtcttgagttattgctccggtgccagacaaaaaaccaaactctctggccgaacacagtgatggcgcaagcctgtaagaagaggagaggagtttatataagcagtgaatcaggagactctgatacagattctgatgttgagggaagcaaacactctcaaaagtctggggtgacatcaatttctacatgcgagcaccagtcatcttataacctcaaggctgcaagtatgaaaagtagcaggatgataaggctgtgtggaaatatcgtaaggaagctcatcgatcacaaatgtggctggcttttcaaagaacctgttgatccagatctatatgggattccagactactttgatgttatccgcagtccaatggatttgggcactattaagaataaactcacaaaaaagaaatatgtaagcattgaggagtttgcagcagatgtgaggctaacattttcaaatgctatgaagtataatcctccaggcaatgatgtgcatatttttgctaaagaattgaatgaaatgtttgattcagaatgggaatcagtagaaaggaaatttagaggccgaaaccttggtcaagaccagcagacaatgaaggccataaaagttcgagctatgatggattcaaagtctacagttgctagagggccggttgcatgctcaaaccctaaaactttggttgctagaggtccagtagcttgctcaaattcgattgcaaagaagacactgacagatgcattatcctccaaagtaaaaatcaaattttccgtgcgcagctctgcgcatacctcttccaaagatatactcgttcaagcagctggtagcaaagaggggtccttaaatcactctgtccctactggcaacaaagaggcatcttcaaattgtactattcctatcgctaaggaggctaaaatatcaagggcacgagaaattgagcgctgctctggttcaattggtgaggaaagttaccttcatgatgaacctttgtcaccaagcagggctcttcgtgcagcaatgctcaggagtcgttttgctgggactatagtgaaggctcaacagaaggcacttctagatcatgggaagaatatagaccctgtgaaattgcaattggaaaaggagaggctggaaaagaggcagcaagaagagaaagcaaggatcgaggcccaggtgaaggctgctgaagcagctgcacaacaaaagtttgaggaagaaatgaggatgaagagaaagcaggaaagggaggcagcacgcctggcactacgcatgtgacttcctaaaggagctggagaacttcagcaaaacatggcaggcaaatccacctggcaaattaatcgtggattttatcagtggggacttgccaccggggttagggagtccgctggagaggctcggcctcttcatgaaggaagatttcgaggatgaggtagaacaggaaatggaggacagagtgtcaccctcaatggatgttgacatcaggaaagatttccaggaagacttaggacatgaaatgcaggacagtgcatcacccgtgactgtcattggcacaaagaatgacgtacagggagtggcaggacatgaaatggaggacagcggatcaccagccacagtcattgacacgaagaaagaagagacagaacatgagatggtggacagcgtatcacctttgatggatgttgacacggaggaaggggagatcagctgctgacggtagctacacctctcttcacccgcataatttattgaggcagacatccttgcttggttgttagattaggcaatttcataagcagagtgatgcagaaacattagttttatctgctttcatcgtagaaccatgtggtgtggagaacatgtctcagacgaaatgacgagtggttttggatttgctgcggattttaattttcgtggtcttgtcagtctggcaagagtatgatgactctgtatgttgaatttgacctcccccgctggatgacatgtataaaaggatgagaaaaaaaggatagtttggagctagtgtatgttgttggagtttatggtggagccagatttggtgagcgtgtcgtggacgtaaatgtaggtatagctatatacttgaaatattgataagagtgtttggttcaaaggatcaattcattccagttaaacatcatgagcttgttaatgggtgtttggttcgagagttcgttaatgggtgtttggtttgaagaataagctagtctactatttttttatttggttgttgaatgtaattttttgacctgtcatctcatttcttacaagtgaatgattatttctaagtctatg

SEQ ID NO: 21148 - DNA, 2878 bp, Zea Mays
ctttcttctccctcgttcccgagtccgaatctgggtccagcggagacaaagaggagctggccgcgtcgtatcgactcctgccgccgaaaggccgagcccgagcccgtgtcccggtgcccgttcccgcaaccctaatcccctaccaccgtcggctctcgccggcgaagaagagggagccgcgcggcgtcgccagggagcacgcgccccctcccttcccggctccctccgcgccgtggggaggcgcgtccacccggatccgccctcaccgcgaggcagaggggaggagagggagccaggtccggcgcacccgctgtcgtccgcgccgaagagcgttaagagtctccccacaggcttggctgagggaaacttgtgctctgcgcatcttggacactacttcaccatttaccaagtcttgagttattgctccggtgccagacaaaaaaccaaactctctggccgaacacagtgatggcgcaagcctgtaagaagaggagaggagtttatataagcagtgaatcaggagactctgatacagattctgatgttgagggaagcaaacactctcaaaagtctggggtgacatcaatttctacatgcgagcaccagtcatcttataacctcaaggctgcaagtatgaaaagtagcaggatgataaggctgtgtggaaatatcgtaaggaagctcatcgatcacaaatgtggctggcttttcaaagaacctgttgatccagatctatatgggattccagactactttgatgttatccgcagtccaatggatttgggcactattaagaataaactcacaaaaaagaaatatgtaagcattgaggagtttgcagcagatgtgaggctaacattttcaaatgctatgaagtataatcctccaggcaatgatgtgcatatttttgctaaagaattgaatgaaatgtttgattcagaatgggaatcagtagaaaggaaatttagaggccgaaaccttggtcaagaccagcagacaatgaaggccataaaagttcgagctatgatggattcaaagtctacagttgctagagggccggttgcatgctcaaaccctaaaactttggttgctagaggtccagtagcttgctcaaattcgattgcaaagaagacactgacagatgcattatcctccaaagtaaaaatcaaattttccgtgcgcagctctgcgcatacctcttccaaagatatactcgttcaagcagctggtagcaaagaggggtccttaaatcactctgtccctactggcaacaaagaggcatcttcaaattgtactattcctatcgctaaggaggctaaaatatcaagggcacgagaaattgagcgctgctctggttcaattggaaaacaatcatggtcttgcaatgacacttctacttcacctctcgcttcctctgtgcaaggtgaggaaagttaccttcatgatgaacctttgtcaccaagcagggctcttcgtgcagcaatgctcaggagtcgttttgctgggactatagtgaaggctcaacagaaggcacttctagatcatggaagaatatagaccctgtgaaattgcaattggaaaaggagaggctggaaaagaggcagcaagaagagaaagcaaggatcgaggcccaggtgaaggctgctgaagcagctgcacaacaaaagtttgaggaagaaatgaggatgaagagaaagcaggaaagggaggcagcacgcctggcactacgcatggtactacctgcctatagttttctgaccagcaagtttatatgcttcatggtatgcaagggataaatctcctttgtgcagatgaagaagactgttgatattgacaacagtgacttcctaaaggagctggagaacttcagcaaaacatggcaggcaaatccacctggcaaattaatcgtggattttatcagtggggacttgccaccggggttagggagtccgctggagaggctcggcctcttcatgaaggaagatttcgaggatgaggtagaacaggaaatggaggacagagtgtcaccctcaatggatgttgacatcaggaaagatttccaggaagacttaggacatgaaatgcaggacagtgcatcacccgtgactgtcattggcacaaagaatgacgtacagggagtggcaggacatgaaatggaggacagcggatcaccagccacagtcattgacacgaagaaagaagagacagaacatgagatggtggacagcgtatcacctttgatggatgttgacacggaggaaggggagatcagctgctgacggtagctacacctctcttcacccgcataatttattgaggcagacatccttgcttggttgttagattaggcaatttcataagcagagtgatgcagaaacattagttttatctgctttcatcgtagaaccatgtggtgtggagaacatgtctcagacgaaatgacgagtggttttggatttgctgcggattttaattttcgtggtcttgtcagtctggcaagagtatgatgactctgtatgttgaatttgacctcccccgctggatgacatgtataaaaggatgagaaaaaaaggatagtttggagctagtgtatgttgttggagtttatggtggagccagatttggtgagcgtgtcgtggacgtaaatgtaggtatagctatatacttgaaatattgataagagtgtttggttcaaaggatcaattcattccagttaaacatcatgagcttgttaatgggtgtttggttcgagagttcgttaatgggtgtttggtttgaagaataagctagtctactatttttttatttggttgttgaatgtaattttttgacctgtcatctcatttcttacaagtgaatgattatttctaagtctatg

SEQ ID NO: 21149 - DNA, 1944 bp, Zea Mays
ctttcttctccctcgttcccgagtccgaatctgggtccagcggagacaaagaggagctggccgcgtcgtatcgactcctgccgccgaaaggccgagcccgagcccgtgtcccggtgcccgttcccgcaaccctaatcccctaccaccgtcggctctcgccggcgaagaagagggagccgcgcggcgtcgccagggagcacgcgccccctcccttcccggctccctccgcgccgtggggaggcgcgtccacccggatccgccctcaccgcgaggcagaggggaggagagggagccaggtccggcgcacccgctgtcgtccgcgccgaagagcgttaagagtctccccacagatatactcgttcaagcagctggtagcaaagaggggtccttaaatcactctgtccctactggcaacaaagaggcatcttcaaattgtactattcctatcgctaaggaggctaaaatatcaagggcacgagaaattgagcgctgctctggttcaattggaaaacaatcatggtcttgcaatgacacttctacttcacctctcgcttcctctgtgcaaggtgaggaaagttaccttcatgatgaacctttgtcaccaagcagggctcttcgtgcagcaatgctcaggagtcgttttgctgggactatagtgaaggctcaacagaaggcacttctagatcatgggaagaatatagaccctgtgaaattgcaattggaaaaggagaggctggaaaagaggcagcaagaagagaaagcaaggatcgaggcccaggtgaaggctgctgaagcagctgcacaacaaaagtttgaggaagaaatgaggatgaagagaaagcaggaaagggaggcagcacgcctggcactacgcatgatgaagaagactgttgatattgacaacagtgacttcctaaaggagctggagaacttcagcaaaacatggcaggcaaatccacctggcaaattaatcgtggattttatcagtggggacttgccaccggggttagggagtccgctggagaggctcggcctcttcatgaaggaagatttcgaggatgaggtagaacaggaaatggaggacagagtgtcaccctcaatggatgttgacatcaggaaagatttccaggaagacttaggacatgaaatgcaggacagtgcatcacccgtgactgtcattggcacaaagaatgacgtacagggagtggcaggacatgaaatggaggacagcggatcaccagccacagtcattgacacgaagaaagaagagacagaacatgagatggtggacagcgtatcacctttgatggatgttgacacggaggaaggggagatcagctgctgacggtagctacacctctcttcacccgcataatttattgaggcagacatccttgcttggttgttagattaggcaatttcataagcagagtgatgcagaaacattagttttatctgctttcatcgtagaaccatgtggtgtggagaacatgtctcagacgaaatgacgagtggttttggatttgctgcggattttaattttcgtggtcttgtcagtctggcaagagtatgatgactctgtatgttgaatttgacctcccccgctggatgacatgtataaaaggatgagaaaaaaaggatagtttggagctagtgtatgttgttggagtttatggtggagccagatttggtgagcgtgtcgtggacgtaaatgtaggtatagctatatacttgaaatattgataagagtgtttggttcaaaggatcaattcattccagttaaacatcatgagcttgttaatgggtgtttggttcgagagttcgttaatgggtgtttggtttgaagaataagctagtctactatttttttatttggttgttgaatgtaattttttgacctgtcatctcatttcttacaagtgaatgattatttctaagtctatg

SEQ ID NO: 21150 - DNA, 2741 bp, Zea Mays
ctttcttctccctcgttcccgagtccgaatctgggtccagcggagacaaagaggagctggccgcgtcgtatcgactcctgccgccgaaaggccgagcccgagcccgtgtcccggtgcccgttcccgcaaccctaatcccctaccaccgtcggctctcgccggcgaagaagagggagccgcgcggcgtcgccagggagcacgcgccccctcccttcccggctccctccgcgccgtggggaggcgcgtccacccggatccgccctcaccgcgaggcagaggggaggagagggagccaggtccggcgcacccgctgtcgtccgcgccgaagagcgttaagagtctccccacaggcttggctgagggaaacttgtgctctgcgcatcttggacactacttcaccatttaccaagtcttgagttattgctccggtgccagacaaaaaaccaaactctctggccgaacacagtgatggcgcaagcctgtaagaagaggagaggagtttatataagcagtgaatcaggagactctgatacagattctgatgttgagggaagcaaacactctcaaaagtctggggtgacatcaatttctacatgcgagcaccagtcatcttataacctcaaggctgcaagtatgaaaagtagcaggatgataaggctgtgtggaaatatcgtaaggaagctcatcgatcacaaatgtggctggcttttcaaagaacctgttgatccagatctatatgggattccagactactttgatgttatccgcagtccaatggatttgggcactattaagaataaactcacaaaaaagaaatatgtaagcattgaggagtttgcagcagatgtgaggctaacattttcaaatgctatgaagtataatcctccaggcaatgatgtgcatatttttgctaaagaattgaatgaaatgtttgattcagaatgggaatcagtagaaaggaaatttagaggccgaaaccttggtcaagaccagcagacaatgaaggccataaaagttcgagctatgatggattcaaagtctacagttgctagagggccggttgcatgctcaaaccctaaaactttggttgctagaggtccagtagcttgctcaaattcgattgcaaagaagacactgacagatgcattatcctccaaagtaaaaatcaaattttccgtgcgcagctctgcgcatacctcttccaaagatatactcgttcaagcagctggtagcaaagaggggtccttaaatcactctgtccctactggcaacaaagaggcatcttcaaattgtactattcctatcgctaaggaggctaaaatatcaagggcacgagaaattgagcgctgctctggttcaattggtgaggaaagttaccttcatgatgaacctttgtcaccaagcagggctcttcgtgcagcaatgctcaggagtcgttttgctgggactatagtgaaggctcaacagaaggcacttctagatcatgggaagaatatagaccctgtgaaattgcaattggaaaaggagaggctggaaaagaggcagcaagaagagaaagcaaggatcgaggcccaggtgaaggctgctgaagcagctgcacaacaaaagtttgaggaagaaatgaggatgaagagaaagcaggaaagggaggcagcacgcctggcactacgcatgatgaagaagactgttgatattgacaacagtgacttcctaaaggagctggagaacttcagcaaaacatggcaggcaaatccacctggcaaattaatcgtggattttatcagtggggacttgccaccggggttagggagtccgctggagaggctcggcctcttcatgaaggaagatttcgaggatgaggtagaacaggaaatggaggacagagtgtcaccctcaatggatgttgacatcaggaaagatttccaggaagacttaggacatgaaatgcaggacagtgcatcacccgtgactgtcattggcacaaagaatgacgtacagggagtggcaggacatgaaatggaggacagcggatcaccagccacagtcattgacacgaagaaagaagagacagaacatgagatggtggacagcgtatcacctttgatggatgttgacacggaggaaggggagatcagctgctgacggtagctacacctctcttcacccgcataatttattgaggcagacatccttgcttggttgttagattaggcaatttcataagcagagtgatgcagaaacattagttttatctgctttcatcgtagaaccatgtggtgtggagaacatgtctcagacgaaatgacgagtggttttggatttgctgcggattttaattttcgtggtcttgtcagtctggcaagagtatgatgactctgtatgttgaatttgacctcccccgctggatgacatgtataaaaggatgagaaaaaaaggatagtttggagctagtgtatgttgttggagtttatggtggagccagatttggtgagcgtgtcgtggacgtaaatgtaggtatagctatatacttgaaatattgataagagtgtttggttcaaaggatcaattcattccagttaaacatcatgagcttgttaatgggtgtttggttcgagagttcgttaatgggtgtttggtttgaagaataagctagtctactatttttttatttggttgttgaatgtaattttttgacctgtcatctcatttcttacaagtgaatgattatttctaagtctatg

SEQ ID NO: 21151 - DNA, 2707 bp, Zea Mays
ctttcttctccctcgttcccgagtccgaatctgggtccagcggagacaaagaggagctggccgcgtcgtatcgactcctgccgccgaaaggccgagcccgagcccgtgtcccggtgcccgttcccgcaaccctaatcccctaccaccgtcggctctcgccggcgaagaagagggagccgcgcggcgtcgccagggagcacgcgccccctcccttcccggctccctccgcgccgtggggaggcgcgtccacccggatccgccctcaccgcgaggcagaggggaggagagggagccaggtccggcgcacccgctgtcgtccgcgccgaagagcgttaagagtctccccacaggcttggctgagggaaacttgtgctctgcgcatcttggacactacttcaccatttaccaagtcttgagttattgctccggtgccagacaaaaaaccaaactctctggccgaacacagtgatggcgcaagcctgtaagaagaggagaggagtttatataagcagtgaatcaggagactctgatacagattctgatgttgagggaagcaaacactctcaaaagtctggggtgacatcaatttctacatgcgagcaccagtcatcttataacctcaaggctgcaagtatgaaaagtagcaggatgataaggctgtgtggaaatatcgtaaggaagctcatcgatcacaaatgtggctggcttttcaaagaacctgttgatccagatctatatgggattccagactactttgatgttatccgcagtccaatggatttgggcactattaagaataaactcacaaaaaagaaatatgtaagcattgaggagtttgcagcagataatgggaatcagtagaaaggaaatttagaggccgaaaccttggtcaagaccagcagacaatgaaggccataaaagttcgagctatgatggattcaaagtctacagttgctagagggccggttgcatgctcaaaccctaaaactttggttgctagaggtccagtagcttgctcaaattcgattgcaaagaagacactgacagatgcattatcctccaaagtaaaaatcaaattttccgtgcgcagctctgcgcatacctcttccaaagatatactcgttcaagcagctggtagcaaagaggggtccttaaatcactctgtccctactggcaacaaagaggcatcttcaaattgtactattcctatcgctaaggaggctaaaatatcaagggcacgagaaattgagcgctgctctggttcaattggaaaacaatcatggtcttgcaatgacacttctacttcacctctcgcttcctctgtgcaaggtgaggaaagttaccttcatgatgaacctttgtcaccaagcagggctcttcgtgcagcaatgctcaggagtcgttttgctgggactatagtgaaggctcaacagaaggcacttctagatcatgggaagaatatagaccctgtgaaattgcaattggaaaaggagaggctggaaaagaggcagcaagaagagaaagcaaggatcgaggcccaggtgaaggctgctgaagcagctgcacaacaaaagtttgaggaagaaatgaggatgaagagaaagcaggaaagggaggcagcacgcctggcactacgcatgatgaagaagactgttgatattgacaacagtgacttcctaaaggagctggagaacttcagcaaaacatggcaggcaaatccacctggcaaattaatcgtggattttatcagtggggacttgccaccggggttagggagtccgctggagaggctcggcctcttcatgaaggaagatttcgaggatgaggtagaacaggaaatggaggacagagtgtcaccctcaatggatgttgacatcaggaaagatttccaggaagacttaggacatgaaatgcaggacagtgcatcacccgtgactgtcattggcacaaagaatgacgtacagggagtggcaggacatgaaatggaggacagcggatcaccagccacagtcattgacacgaagaaagaagagacagaacatgagatggtggacagcgtatcacctttgatggatgttgacacggaggaaggggagatcagctgctgacggtagctacacctctcttcacccgcataatttattgaggcagacatccttgcttggttgttagattaggcaatttcataagcagagtgatgcagaaacattagttttatctgctttcatcgtagaaccatgtggtgtggagaacatgtctcagacgaaatgacgagtggttttggatttgctgcggattttaattttcgtggtcttgtcagtctggcaagagtatgatgactctgtatgttgaatttgacctcccccgctggatgacatgtataaaaggatgagaaaaaaaggatagtttggagctagtgtatgttgttggagtttatggtggagccagatttggtgagcgtgtcgtggacgtaaatgtaggtatagctatatacttgaaatattgataagagtgtttggttcaaaggatcaattcattccagttaaacatcatgagcttgttaatgggtgtttggttcgagagttcgttaatgggtgtttggtttgaagaataagctagtctactatttttttatttggttgttgaatgtaattttttgacctgtcatctcatttcttacaagtgaatgattatttctaagtctatg

SEQ ID NO: 21152 - DNA, 2191 bp, Zea Mays
gcccaaaattttcgtaggctgtccaccgcaccaccaccctgcgcgccgagcgcaccccgatccagatccacccatcctccctccggtctccggcgggcgccctcctccacgtcctcacgcgcctccggacgccagtgcgcgcgcagtgagcatcaacatcaacccgcctcttctctcgtcggaccggcgcgcgccaggtggcggcggaggcggcaggcatgaagcgggtgtcgtcgcacgtctcgctcgcctccgaggcggagatcaacctcgacctgtcgcgcctcgtcatcgacaagcccaggttcacgctggagcggaagcgctccttcgacgagcagtcgtggagcgagctctcccaccgccagaacgacggcttcgacagcgtgcttcagtcgccggcattcccgtccggcggcttcgactcgcccttctccgtcggcacgcacttcggcggcccgcacccgctcgtcaacgaggcctgggaggcgctcaggaaatcggtcgtctacttccgggaacagcccgtcggcaccattgctgccgtcgatcatgcgtcggaggaagtgctcaactatgatcaggtttttgtgagggatttcgttccgagcgcattggcttttctaatgaacaatgagactgacatagtgaagaattttctcttgaaaactcttcaccttcagagctctgagaaaatggtagaccgattcaagcttggagcaggagcgatgccagcaagtttcaaggtggaccgtaataaaaacagaaacactgaaaccttagtcgctgattttggtgagagtgcaatcggtagggtggcaccggttgactctggattttggtggatcattctccttcgggcatatacaaagtacaccggagatgttagtttgtcagaatcacctgaatgccagaagtgcatgagggtatatatggttatcccattgagattcaagccctattctatatggcattaagatgtgctctccaaatgctcaagccagagggcgaagggaaggatttcatagagaagatagggcaacgactacatgcactaacctaccacatgaggaattacttctggctagattttcaccagctgaataacatatacagatacaaaacagaagagtattcccacactgctgtgaacaagttcaatgtaattccagattccattcctgattgggtgtttgatttcatgccatgtcgaggaggctactttcttggcaacgtcagccctgctatgatggatttccggtggtttgcccttggcaattgcattgccattgtatcatctctagccaccccagaacagtcagttgctataatggatctgatcgaggaaaagtgggatgagctagttggtgagatgcctctgaagatatgctatcctgctctcgagaatcatgagtggagaattattactggatgtgaccccaaaaacacccggtggagttaccacaatggaggatcttggccagttcttctgtggctgctgacagcagcctgcataaagactggtcggccacaaatggcaaaacgtgccattgagctcgcagagtcaaggctgctcaaggacggctggcccgagtattacgatggcaagctaggaagattcgttggcaagcaggccaggaagttccagacctggtccattgccggttacctcgtcgcccgcatgatgctggaggacccatcgacactgatgatgatctccatggaggaggaccgccctgtgaagccgaccatgcggcggtcagcatcatggaatgcctgaatgcgtggatagttgtttctgaaccaaggaaattcagaatcagctgttatacggatttgtgatttgtttggaccacaagagtgcagcctgcagcgttggtgtgatttgttgggaccacaaagttcaacattgattatagttggactctgtcaattaggacagagtttgtataccatagaggatcataggagttgcacaagattttgccatgcccttttggtttgtttcagaacaatactcaggatactgttcagttgaaaccttgattttggaataacaaatcactgtttatgcatacatttctcttcggctttaaaggtatctcagataattctggaatgccactttcttttttttaaagaaataacaaatcactgtttacacgcagcagaacatgtggattggtactat

SEQ ID NO: 21153 - DNA, 3775 bp, Zea Mays
cggcacaccgcacacgctggtcctaattctgaccgttgcaactccaaaatccaaatctgccgcccggtttcatagccacctccaacgtctccttcgccggcgctcatcccccctacacatccccctccccgttcttctccaaggcttcaaactcgcagagattcgcagtctgcactacgtctccttgacctcagcagcggccacacagccacgcgcaccgagagaagagagattccccacggcatggcggcggcggacggggacgccttgatcgcggcgtttgcggtgtccaagggcggcatcgtgctcaagcacattttcctcaacgcaccaccgccggaggcgatgtgcgggtccggcggaagagaagtggagagtgatgaggaggacccgccggtgatggtgggtcggcaccccgactgccacgtgctcgtcgaccaccccagcgtcagccgcttccacctcgagctacggtgccgacgtcgacagagtctcatcaccgtcaccgacctccactccgtgcacgggacatgggtttcggggcgacggatcccacccaacacgccagtggatctcgctaccggtgacacgctgcggctcggggcctctaagagggagtataagctgctctggctgtcgcttcgtgaggcatttgagatggacgatctgatgtatatgccatcgctgcctgaggaggacaaagaggagccatatgttaaggaaccaagcagcaagttattgcctgggcacagggattcagtgaacatggagacccatcaggatacaagtgaacaaattgtgtctgaagacattgcatttccagccaaagtggccccctcagcacctccattgtctgagttccttcaacctttttttgtggaagagcattcactttcccaatttcatgagaaaagaaacggagtgacagaggaaaagttggtcgacaagaatcaaatttcagaatcttttggttcgttgatcatacaggaaatgccaggcacactgacaaatgctggaaaatcaatccagtcaggcgagcaggaggatgcctcaaacaaagtgtccaagaggtccaagttgaagtcagtcaaatcacttcgtgttgacacaggcaggagcagcgagagaagcagcactctgagccatagctttcagaagggagaccaaaatgatattgttgtatgttctcagagctgtgggacagaatgtgcggtatgtatagctttatttggtatttctgaaattgaaaaggctgaagaaaaggaagagttgattgctgaagataacgttgacatgaatcccccggccagcatgatcatggagggaaatatgaacgagagaaaacctgataattatatcccacaagatccaattggtgcaaagctgcagaagaaactaggcttattagattctgctctccctttgcatttcaaagatgatgtgttcgccgacaaggaaattccacaatggaatgttgctagtgttcatacagaatctgagcttctttcagaatatcttataataccagaagtgaagcacgatgacttgaaccatcttaacttggaggaaggtctctcaaaaagcgagaatataaacccaaataagattactgagggccctgggaactgtcagctcgaagggaccattcgtgggaatctatttgacaatttggatactgatggaattgaagaaggtgaagagatctgcccactggacaaggatgaaatcacccccaatggatcagatcatggcgacttttctgaaaatgagaactccatgctgaacactggagatcagatgaaattaaatgaacctgtctctgagaatcttaacccattaattccaactgatgaaaaatatctgaagagccaaacggaggagtgtatgcccatttcatatctggaattcaaagatgatatccttctggatagggaaaactcagtgctggctccgagaaagtacgaggctatgtcccctgtgaggcaggaaaatctgttctcagacaaagagaacgtgactcctgcctctaaggtgaagaccgttgttaggggagttcttggtacaaggatggataattcagtgtcagcagcaaatgcttcaaataagaataaagttcttgggtcaagggtcgataattcagtgtcaacagagaatagctcaaataagaagcaatgtgaattatcatcgaagtccaaaaaagtccacacagtagattttgatgttttctattcggataaggagaacttgactcctatatcttcaggaggcatgaaagcaaggaagtgttttcccaaggacctctcagtcgacttagaccaagatcaggaagcattctgctcagacaaggagaacttgacaccactatcttctgcagctcggaaaacaagggacatgtctggaaaccttacacgagttgaaagtgcggtcacaaagaaaagggttgttggtaggctccccttccagactcttgtgtcaaattctcctttgagacctgctagctcgcatgattgtacctgtgctgttgctagaccagctggcgttgctgctggtgacttggcgatcaagttagaagataaattgaacgatctctcagtaatggccacgaatcaggtagtgctggagaaggcatgaaaacctggaccatggtggctaatacagacagtcttcttgatgacgagtctaggaaggctattatgctgctaaaaggcttaaaaggaactcgcctgttcataccaaggattgtgatcagggagttggattccatgaagcagcgggagggcctgttcagacggtcaacgaaggcgacctccatcctgcaatggatcgaggagtgcatggcaagggagagctggtggatccacgtccagagctcggccgacatgttcccggtagcaccaaccccgcccgcgaccccttcagcgcagcgcatcgacgaggagatcgagatcagctccggctccttcaacccgatgatggcgttgttcggccctcgaagctccgccgcgctcgcggatatgatatctcccagacccgaggaccgcgtcctcgactgcgccctcctcgtcagtagggtccggagcaacgagaaggtcgtggtgctgtcaaacagcgtcacgctcaagatcaaagccatggcagagggcctgccatgcgagggagccaaggagttccgcgagtccctcgtggacccgtcctccaggcggttcatgtgggcggccagcgccccacgggggtcggcctggtcctgcctggacgcgtccgcgctggcggagaactactacaacagccgccaccacgctatgaagcggagggttctggtggcggcgaggccctccgagtccgaggccgccaagggcctgaagctgatcctgcgtcacaattccctgtacgcgcaggccacggacgccgtcaacaagacgccgctggtatcgctggccgcggtgtgagatcccccgccctcggttcttgttttggcgtgttgttgtcatgatttccatgccgagcgaaactgtgggccgtgtgcagactttgaacaggacaccgtcagtggtttcgttttgggccatcatgagtttttgagtttgtgcctttattagctagcgcagcgaccgactagtgggtgagcaggaagctcccgagggcaggcagtgtctttgactctgtcttgtggacgtattctacacacatctctcgactgagatacgaatgttttttttcttcaaatatgtagctggcgacgagcagaagaaagattagtgcgtgcacaaagttgatt

SEQ ID NO: 21154 - DNA, 3791 bp, Zea Mays
ccaacgtctccttcgccggcgctcatcccccctacacatccccctccccgttcttctccaaggcttcaaactcgcagagattcgcagtctgcactacgtctccttgacctcagcagcggccacacagccacgcgcaccgagagaagagagattccccacggcatggcggcggcggacggggacgccttgatcgcggcgtttgcggtgtccaagggcggcatcgtgctcaagcacattttcctcaacgcaccaccgccggaggcgatgtgcgggtccggcggaagagaagtggagagtgatgaggaggacccgccggtgatggtgggtcggcaccccgactgccacgtgctcgtcgaccaccccagcgtcagccgcttccacctcgagctacggtgccgacgtcgacagagtctcatcaccgtcaccgacctccactccgtgcacgggacatgggtttcggggcgacggatcccacccaacacgccagtggatctcgctaccggtgacacgctgcggctcggggcctctaagagggagtataagctgctctggctgtcgcttcgtgaggcatttgagatggacgatctgatgtatatgccatcgctgcctgaggaggacaaagaggagccatatgttaaggaaccaagcagcaagttattgcctgggcacagggattcagtgaacatggagacccatcaggatacaagtgaacaaattgtgtctgaagacattgcatttccagccaaagtggccccctcagcacctccattgtctgagttccttcaacctttttttgtggaagagcattcactttcccaatttcatgagaaaagaaacggagtgacagaggaaaagttggtcgacaagaatcaaatttcagaatcttttggttcgttgatcatacaggaaatgccaggcacactgacaaatgctggaaaatcaatccagtcaggcgagcaggaggatgcctcaaacaaagtgtccaagaggtccaagttgaagtcagtcaaatcacttcgtgttgacacaggcaggagcagcgagagaagcagcactctgagccatagctttcagaagggagaccaaaatgatattgttgtatgttctcagagctgtgggacagaatgtgcggtatgtatagctttatttggtatttctgaaattgaaaaggctgaagaaaaggaagagttgattgctgaagataacgttgacatgaatcccccggccagcatgatcatggagggaaatatgaacgagagaaaacctgataattatatcccacaagatccaattggtgcaaagctgcagaagaaactaggcttattagattctgctctccctttgcatttcaaagatgatgtgttcgccgacaaggaaattccacaatggaatgttgctagtgttcatacagaatctgagcttctttcagaatatcttataataccagaagtgaagcacgatgacttgaaccatcttaacttggaggaaggtctctcaaaaagcgagaatataaacccaaataagattactgagggccctgggaactgtcagctcgaagggaccattcgtgggaatctatttgacaatttggatactgatggaattgaagaaggtgaagagatctgcccactggacaaggatgaaatcacccccaatggatcaggtaacataataatggagaggagcaatatagttttaaagcctaccatttcccaacagttgatggattctatttcccctctcaatttagatcatggcgacttttctgaaaatgagaactccatgctgaacactggagatcagatgaaattaaatgaacctgtctctgagaatcttaacccattaattccaactgatgaaaaatatctgaagagccaaacggaggagtgtatgcccatttcatatctggaattcaaagatgatatccttctggatagggaaaactcagtgctggctccgagaaagtacgaggctatgtcccctgtgaggcaggaaaatctgttctcagacaaagagaacgtgactcctgcctctaaggtgaagaccgttgttaggggagttcttggtacaaggatggataattcagtgtcagcagcaaatgcttcaaataagaataaagttcttgggtcaagggtcgataattcagtgtcaacagagaatagctcaaataagaagcaatgtgaattatcatcgaagtccaaaaaagtccacacagtagattttgatgttttctattcggataaggagaacttgactcctatatcttcaggaggcatgaaagcaaggaagtgttttcccaaggacctctcagtcgacttagaccaagatcaggaagcattctgctcagacaaggagaacttgacaccactatcttctgcagctcggaaaacaagggacatgtctggaaaccttacacgagttgaaagtgcggtcacaaagaaaagggttgttggtaggctccccttccagactcttgtgtcaaattctcctttgagacctgctagctcgcatgattgtacctgtgctgttgctagaccagctggcgttgctgctggtgacttggcgatcaagttagaagataaattgaacgatctctcatgtaatggccacgaatcaggtagtgctggagaaggcatgaaaacctggaccatggtggctaatacagacagtcttcttgatgacgagtctaggaaggctattatgctgctaaaaggcttaaaaggaactcgcctgttcataccaaggattgtgatcagggagttggattccatgaagcagcgggagggcctgttcagacggtcaacgaaggcgacctccatcctgcaatggatcgaggagtgcatggcaagggagagctggtggatccacgtccagagctcggccgacatgttcccggtagcaccaaccccgcccgcgaccccttcagcgcagcgcatcgacgaggagatcgagatcagctccggctccttcaacccgatgatggcgttgttcggccctcgaagctccgccgcgctcgcggatatgatatctcccagacccgaggaccgcgtcctcgactgcgccctcctcgtcagtagggtccggagcaacgagaaggtcgtggtgctgtcaaacagcgtcacgctcaagatcaaagccatggcagaggttagtacgggcctgccatgcgagggagccaaggagttccgcgagtccctcgtggacccgtcctccaggcggttcatgtgggcggccagcgccccacgggggtcggcctggtcctgcctggacgcgtccgcgctggcggagaactactacaacagccgccaccacgctatgaagcggagggttctggtggcggcgaggccctccgagtccgaggccgccaagggcctgaagctgatcctgcgtcacaattccctgtacgcgcaggccacggacgccgtcaacaagacgccgctggtatcgctggccgcggtgtgagatcccccgccctcggttcttgttttggcgtgttgttgtcatgatttccatgccgagcgaaactgtgggccgtgtgcagactttgaacaggacaccgtcagtggtttcgttttgggccatcatgagtttttgagtttgtgcctttattagctagcgcagcgaccgactagtgggtgagcaggaagctcccgagggcaggcagtgtctttgactctgtcttgtggacgtattctacacacatctctcgactgagatacgaatgttttttttcttcaaatatgtagctggcgacgagcagaagaaagattagtgcgtgcacaaagttgatt

SEQ ID NO: 21155 - DNA, 3629 bp, Zea Mays
ggcgctcatcccccctacacatccccctccccgttcttctccaaggcttcaaactcgcagagattcgcagtctgcactacgtctccttgacctcagcagcggccacacagccacgcgcaccgagagaagagagattccccacggcatggcggcggcggacggggacgccttgatcgcggcgtttgcggtgtccaagggcggcatcgtgctcaagcacattttcctcaacgcaccaccgccggaggcgatgtgcgggtccggcggaagagaagtggagagtgatgaggaggacccgccggtgatggtgggtcggcaccccgactgccacgtgctcgtcgaccaccccagcgtcagccgcttccacctcgagctacggtgccgacgtcgacagagtctcatcaccgtcaccgacctccactccgtgcacgggacatgggtttcggggcgacggatcccacccaacacgccagtggatctcgctaccggtgacacgctgcggctcggggcctctaagagggagtataagctgctctggctgtcgcttcgtgaggcatttgagatggacgatctgatgtatatgccatcgctgcctgaggaggacaaagaggagccatatgttaaggaaccaagcagcaagttattgcctgggcacagggattcagtgaacatggagacccatcaggatacaagtgaacaaattgtgtctgaagacattgcatttccagccaaagtggccccctcagcacctccattgtctgagttccttcaacctttttttgtggaagagcattcactttcccaatttcatgagaaaagaaacggagtgacagaggaaaagttggtcgacaagaatcaaatttcagaatcttttggttcgttgatcatacaggaaatgccaggcacactgacaaatgctggaaaatcaatccagtcaggcgagcaggaggatgcctcaaacaaagtgtccaagaggtccaagttgaagtcagtcaaatcacttcgtgttgacacaggcaggagcagcgagagaagcagcactctgagccatagctttcagaagggagaccaaaatgatattgttgtatgttctcagagctgtgggacagaatgtgcggtatgtatagctttatttggtatttctgaaattgaaaaggctgaagaaaaggaagagttgattgctgaagataacgttgacatgaatcccccggccagcatgatcatggagggaaatatgaacgagagaaaacctgataattatatcccacaagatccaattggtgcaaagctgcagaagaaactaggcttattagattctgctctccctttgcatttcaaagatgatgtgttcgccgacaaggaaattccacaatggaatgttgctagtgttcatacagaatctgagcttctttcagaatatcttataataccagaagtgaagcacgatgacttgaaccatcttaacttggaggaaggtctctcaaaaagcgagaatataaacccaaataagattactgagggccctgggaactgtcagctcgaagggaccattcgtgggaatctatttgacaatttggatactgatggaattgaagaaggtgaagagatctgcccactggacaaggatgaaatcacccccaatggatcaggtaacataataatggagaggagcaatatagttttaaagcctaccatttcccaacagttgatggattctatttcccctctcaatttagatcatggcgacttttctgaaaatgagaactccatgctgaacactggagatcagatgaaattaaatgaacctgtctctgagaatcttaacccattaattccaactgatgaaaaatatctgaagagccaaacggaggagtgtatgcccatttcatatctggaattcaaagatgatatccttctggatagggaaaactcagtgctggctccgagaaagtacgaggctatgtcccctgtgaggcaggaaaatctgttctcagacaaagagaacgtgactcctgcctctaaggtgaagaccgttgttaggggagttcttggtacaaggatggataattcagtgtcagcagcaaatgcttcaaataagaataaagttcttgggtcaagggtcgataattcagtgtcaacagagaatagctcaaataagaagcaatgtgaattatcatcgaagtccaaaaaagtccacacagtagattttgatgttttctattcggataaggagaacttgactcctatatcttcaggaggcatgaaagcaaggaagtgttttcccaaggacctctcagtcgacttagaccaagatcaggaagcattctgctcagacaaggagaacttgacaccactatcttctgcagctcggaaaacaagggacatgtctggaaaccttacacgagttgaaagtgcggtcacaaagaaaagggttgttggtaggctccccttccagactcttgtgtcaaattctcctttgagacctgctagctcgcatgattgtacctgtgctgttgctagaccagctggcgttgctgctggtgacttggcgatcaagttagaagataaattgaacgatctctcatgtaatggccacgaatcaggtagtgctggagaaggcatgaaaacctggaccatggtggctaatacagacagtcttcttgatgacgagtctaggaaggctattatgctgctaaaaggcttaaaaggaactcgcctgttcataccaaggattggtaagctcagagcaaatgcagctgttgtgtaaatgttgtgcaaactcatcctgaaatgctctggagaccatcaccaaaggttttgctaactgaggcagtacatacgtttctctttacagtgatcagggagttggattccatgaagcagcgggagggcctgttcagacggtcaacgaaggcgacctccatcctgcaatggatcgaggagtgcatggcaagggagagctggtggatccacgtccagagctcggccgacatgttcccggtagcaccaaccccgcccgcgaccccttcagcgcagcgcatcgacgaggagatcgagatcagctccggctccttcaacccgatgatggcgttgttcggccctcgaagctccgccgcgctcgcggatatgatatctcccagacccgaggaccgcgtcctcgactgcgccctcctcgtcagtagggtccggagcaacgagaaggtcgtggtgctgtcaaacagcgtcacgctcaagatcaaagccatggcagaggccacggacgccgtcaacaagacgccgctggtatcgctggccgcggtgtgagatcccccgccctcggttcttgttttggcgtgttgttgtcatgatttccatgccgagcgaaactgtgggccgtgtgcagactttgaacaggacaccgtcagtggtttcgttttgggccatcatgagtttttgagtttgtgcctttattagctagcgcagcgaccgactagtgggtgagcaggaagctcccgagggcaggcagtgtctttgactctgtcttgtggacgtattctacacacatctctcgactgagatacgaatgttttttttcttcaaatatgtagctggcgacgagcagaagaaagattagtgcgtgcacaaagttgatt

SEQ ID NO: 21156 - DNA, 2352 bp, Zea Mays
caaagtgtggtacatttaagccacaaaccaaacatgtctgaaagtcccagtaattcttataaaaaatatgggtggagccatcacccacgcccccaagatcctgtccacgccggatagatagaagaggctaacctttacctcccgcttgctccccccttttattttggcaggattgcacatcttccccaagtaacacctgacaaagggcgaggagagcatagatttcttctttcccttgccgttgccgcttccgtttctcgcttccattcctctctgctcgtgggtttgtcgaagataaacctcgcataaagcttcgttcgtcggcttttggtatcaatcggcagggctcccccgtttcctctctccaagatcttccccccttttcttctgtctccaacccgcggaaatccttggaggagttctttcctgctgcggcggcctccgcacggtttttgatccggggagcgcacctggggcgcgccaatgcagccggacccgagcgggaacgccaatgcgaagacgaaactgccgcagctggtgacggcgccggctccgtcgtcggggcgtccggcgtccgtgcttccgtacaagacggcgaacgtgcgggaccactaccgcatcggcaagaaactggggcaggggcagttcggcaccacgtaccagtgcgtgggcaaggcggacggcgctgagtacgcatgcaagtccatccccaagcgcaagctgctgtgccgggaggactacgaggacgtctaccgcgagatccagatcatgcaccacctctccgagcaccccaacgtcgtccgcatccgcggcgcctacgaggacgcgctcttcgtgcacatcgtcatggagctctgcgccggcggcgagctcttcgaccgcatcgtcgccaagggccactacagtgagcgcgcggctgcgaagctcatcaagaccattgtcggggtcgtggagggatgtcactcgctcggcgtcatgcaccgggacctcaagccggagaattttctctttgccagcaccgccgaggaagccccactcaaggccactgactttgggctttccatgttctacaagcccggtgataaattctctgatgtcgttggaagtccatactatgttgcaccagaggtgcttcagaaatgctatggtccagaagctgatgtgtggagcgcaggagtaattctgtacattttgctttgtggtgtgcccccgttttgggcagaaactgaggctggaatcttcaggcagattctgcgaggcaaacttgattttgaatctgaaccctggcctagtatttctgatagtgctaaggatctggtctgcaatatgcttacacgggatcctaaaaagagatttagtgctcatgaggttctctgtcacgcatggattgttgacgatgccgtggcacctgataagcctattgattctgctgttctctcaaggctgaagcatttttcggcaatgaacaagctcaagaagatggcattaagggttattgctgaaagcctgtctgaggaagagattggaggcctcaaggagttgttcaagatgattgatactgacagtagtgggactataacatttgatgagctgaaagatggcttgaaaagggtaggctctgaattaacagagaacgaaatccaggctctaatggaagcagctgatattgataacagcggaaccatcgactacggcgaattcattgcagctacgttgcacatgaacaaactggagagggaggaaaacttggtttcagcattctcgttttttgacaaagatggaagtggctttataaccatcgatgagctgtcacaagcatgtcgcgaatttggtctcgatgacctccacctcgaggatatgattaaagatgttgaccagaacaatgatggccaaatcgactacagcgagttcacggcgatgatgaggaagggcaatgctggtgcaacaggaaggagaaccatgaggaacagcttgcacttgaatctcggcgaactcttgaatcccagcaaaacctagcgcgttactggaaggccttgtcaggtacattcccatggcatctgaagtttttggatgcgttgtcgatctgctggcctattctgagatgttgagtggttatcctgtggtattactaagatgctggacaattttcgtagtgctggtggtatcctctagagaagagggatggctggcacaatgtggctactatcgccaactgcttttgtatgtgtaactatcgatgtagattgactatggtctaaacatcagtttagttgatatttcgttctctaagttccgttctacttggctcctcaaccaaacattacctatatatatatattctttctaacttaa

SEQ ID NO: 21157 - DNA, 1971 bp, Zea Mays
caaagtgtggtacatttaagccacaaaccaaacatgtctgaaagtcccagtaattcttataaaaaatatgggtggagccatcacccacgcccccaagatcctgtccacccggacccgagcgggaacgccaatgcgaagacgaaactgccgcagctggtgacggcgccggctccgtcgtcggggcgtccggcgtccgtgcttccgtacaagacggcgaacgtgcgggaccactaccgcatcggcaagaaactggggcaggggcagttcggcaccacgtaccagtgcgtgggcaaggcggacggcgctgagtacgcatgcaagtccatccccaagcgcaagctgctgtgccgggaggactacgaggacgtctaccgcgagatccagatcatgcaccacctctccgagcaccccaacgtcgtccgcatccgcggcgcctacgaggacgcgctcttcgtgcacatcgtcatggagctctgcgccggcggcgagctcttcgaccgcatcgtcgccaagggccactacagtgagcgcgcggctgcgaagctcatcaagaccattgtcggggtcgtggagggatgtcactcgctcggcgtcatgcaccgggacctcaagccggagaattttctctttgccagcaccgccgaggaagccccactcaaggccactgactttgggctttccatgttctacaagcccggtgataaattctctgatgtcgttggaagtccatactatgttgcaccagaggtgcttcagaaatgctatggtccagaagctgatgtgtggagcgcaggagtaattctgtacattttgctttgtggtgtgcccccgttttgggcagaaactgaggctggaatcttcaggcagattctgcgaggcaaacttgattttgaatctgaaccctggcctagtatttctgatagtgctaaggatctggtctgcaatatgcttacacgggatcctaaaaagagatttagtgctcatgaggttctctgtcacgcatggattgttgacgatgccgtggcacctgataagcctattgattctgctgttctctcaaggctgaagcatttttcggcaatgaacaagctcaagaagatggcattaagggttattgctgaaagcctgtctgaggaagagattggaggcctcaaggagttgttcaagatgattgatactgacagtagtgggactataacatttgatgagctgaaagatggcttgaaaagggtaggctctgaattaacagagaacgaaatccaggctctaatggaagcagctgatattgataacagcggaaccatcgactacggcgaattcattgcagctacgttgcacatgaacaaactggagagggaggaaaacttggtttcagcattctcgttttttgacaaagatggaagtggctttataaccatcgatgagctgtcacaagcatgtcgcgaatttggtctcgatgacctccacctcgaggatatgattaaagatgttgaccagaacaatgatggccaaatcgactacagcgagttcacggcgatgatgaggaagggcaatgctggtgcaacaggaaggagaaccatgaggaacagcttgcacttgaatctcggcgaactcttgaatcccagcaaaacctagcgcgttactggaaggccttgtcaggtacattcccatggcatctgaagtttttggatgcgttgtcgatctgctggcctattctgagatgttgagtggttatcctgtggtattactaagatgctggacaattttcgtagtgctggtggtatcctctagagaagagggatggctggcacaatgtggctactatcgccaactgcttttgtatgtgtaactatcgatgtagattgactatggtctaaacatcagtttagttgatatttcgttctctaagttccgttctacttggctcctcaaccaaacattacctatatatatatattctttctaacttaa

SEQ ID NO: 21158 - DNA, 1672 bp, Zea Mays
caccgcgagagcaaacgtggagctcaatgggctatcgccaccgcagttctctctcggccaaattggccaccatcacggtagcgccctttaaattgagcttgccctcagtcccgcctctccgttacgcacccaggccacactttattttcttcgtttgaccgttggtagccaagaacaccaggttcttcccgtcggtggtcaccagcgtcgctgagtggtgcatcgtcgtggccaacactttctaagaacacctagaagaagaaattgaagtagaagtggaggaggaaatagttcctcaactcgaagcttctccaactcaagttgttcctgaaggttgctccgaaagtgctccagtgagttttgctgccaattgcaacattatggtagaagagcctcactctcctcctcatcaaggcaagccccggtgcatttaccaaattccttgtgattttaaaatctttatcacttatatgatgtgttaggtgataggagttgaatgattaaaacttttgctgcataacttccttgaactattgaatatcatccttgacaccggtttaaaaaaatagatatgcttagtatgcttatagattaggaataaaaatgttttgatgtatgaatcatgtttattacaaaaataaaaaggtcttggagcgatgaaggtatcaaaggcctttatgacttcattccagccgggtaccgctgataggtacatgttttcagaaataatttaaactgagaccagacgttgagcgggataggtcgcccttctatgtcgtttaaggaccgcaacgattgttagcctgctgatctaggaccctttaactagccacatgccatgtcatgggtaagcttagcctcggctagaccaataccagaaaggctggcccgcaatgggagtggagagatggcgagagtatcgtgtatccacctggcaagaggttggatggtggggtactaagctctcggttggcagggacccgttctggtcttgagaaacccaggtgcgagttgacatatgcaagggttaagtactacatatgtcttgtggttggagatccctagctgggtataaatcgattcggatcgccttacttctcgaatatgaagactggatcttcgaccctcatcgtagataagaaatgaaacaagtttaaattatgtaaaaaaagctagactaggacaagtgattgaactagaccaggtcaatctagagaaaggtaatcacctaacttggaaaataaaagttggcctaaggatcaagtaatagtatgttcttatgcaaaaattgagtcattgaacattgatgacctataccttgactcccaaatcaactagcatatccttgagagtcttttctttagtcgggtcagtcttgctgagtaattgcgtactcggggttttattccctatgttgttgcacgagagactattaacacctttgagttctgttaagctcactctggaggccttttacttatctttgttgtatgtgtacttgtgggaagataacctcttcccaagtgatgtaataagttagcactttgattatacctcgggcatgtaataatgaacgctatttggtttgtaaccttaaatgtttgctaatgtatattatcttattataaagtcttccacccaactcatgtgtttaaagtttatgttcatgtct

SEQ ID NO: 21159 - DNA, 754 bp, Zea Mays
aaaatagtcggtctcgcgtctggagattttcagatcagaaccaaactcggctcgagagagatcgcatacgcctgcctgcccacccacctccccttttccttcctcttcgccccagcgacgcggccgcccggagaccgagcgaggcaggcaacccaccaccgagaggcagggacaggaacaggaagccggaggcgaagatgtcgtcggtgttcagcggcgatgagacggcccccttcttcggcttcctcggcgccgccgccgccctcgtcttctcatggcaaatgcgcaacagccaaagcttttcgttggcatgatcctcatcctcattttcgcagaagcgcttgctctctatggtctaattgttggaattatcctttcgtctcgcgctggtcaatcccgggcggattaagtgcaccaccattctgtgattaccgcaccgtttattatgctattctgagaggattggaactctattcccttgtctagtttattcttgttaccatgtattaatgtaacaatctgtagctgatggaaggtgacttccagtcatgttttggttttggtggtgtcgagcagaggttatttatttttgggttaaggtcggagtcggacggatgctcttgggctaagtggatttaattttatccttgctgaataaagaacacggaattgtagccaaataagaacgtgatatataaatatttctttcccactttgctggatgcctggattttcatcaccatctatacttgag

SEQ ID NO: 21160 - DNA, 832 bp, Zea Mays
cgtccattgctcgatctatcgttggggctccatggctagccctcgatctggccgagctccagcctccggcatgggcgccgcgtacgggaccgcgaagagcggcgtcggcgtggcgtcgatgggtgtgatgcggccggagctcgtcatgaagtccatcgtgcccgtggtcatggctggtgtgctcggtatctacgggctcatcatcgccgtcatcatcagcacggggatcaaccccaaggccaagccctactacctctttgatggctacgcccacctttcgtccgggcttgcctgtggtctcgctgggcttgcagctggcatggccatcggcattgtcggtgatgctggagtcagggcaaatgcgcaacagccaaagcttttcgttggcatgatcctcatcctcattttcgcagaagcgcttgctctctatggtctaattgttggaattatcctttcgtctcgcgctggtcaatcccgggcggattaagtgcaccaccattctgtgattaccgcaccgtttattatgctattctgagaggattggaactctattcccttgtctagtttattcttgttaccatgtattaatgtaacaatctgtagctgatggaaggtgacttccagtcatgttttggttttggtggtgtcgagcagaggttatttatttttgggttaaggtcggagtcggacggatgctcttgggctaagtggatttaattttatccttgctgaataaagaacacggaattgtagccaaataagaacgtgatatataaatatttctttcccactttgctggatgcctggattttcatcaccatctatacttgag

SEQ ID NO: 21161 - DNA, 802 bp, Zea Mays
cgattccgggcgtgctgatgctggatctgcccgatttggcatgggcgccgcgtacgggaccgcgaagagcggcgtcggcgtggcgtcgatgggtgtgatgcggccggagctcgtcatgaagtccatcgtgcccgtggtcatggctggtgtgctcggtatctacgggctcatcatcgccgtcatcatcagcacggggatcaaccccaaggccaagccctactacctctttgatggctacgcccacctttcgtccgggcttgcctgtggtctcgctgggcttgcagctggcatggccatcggcattgtcggtgatgctggagtcagggcaaatgcgcaacagccaaagcttttcgttggcatgatcctcatcctcattttcgcagaagcgcttgctctctatggtctaattgttggaattatcctttcgtctcgcgctggtcaatcccgggcggattaagtgcaccaccattctgtgattaccgcaccgtttattatgctattctgagaggattggaactctattcccttgtctagtttattcttgttaccatgtattaatgtaacaatctgtagctgatggaaggtgacttccagtcatgttttggttttggtggtgtcgagcagaggttatttatttttgggttaaggtcggagtcggacggatgctcttgggctaagtggatttaattttatccttgctgaataaagaacacggaattgtagccaaataagaacgtgatatataaatatttctttcccactttgctggatgcctggattttcatcaccatctatacttgag

SEQ ID NO: 21162 - DNA, 553 bp, Zea Mays
gttgataatccactttttaatatttcatacacaagtctggaaatgcaattattacacatttaggttctctgttagggcaaatgcgcaacagccaaagcttttcgttggcatgatcctcatcctcattttcgcagaagcgcttgctctctatggtctaattgttggaattatcctttcgtctcgcgctggtcaatcccgggcggattaagtgcaccaccattctgtgattaccgcaccgtttattatgctattctgagaggattggaactctattcccttgtctagtttattcttgttaccatgtattaatgtaacaatctgtagctgatggaaggtgacttccagtcatgttttggttttggtggtgtcgagcagaggttatttatttttgggttaaggtcggagtcggacggatgctcttgggctaagtggatttaattttatccttgctgaataaagaacacggaattgtagccaaataagaacgtgatatataaatatttctttcccactttgctggatgcctggattttcatcaccatctatacttgag

SEQ ID NO: 21163 - DNA, 492 bp, Zea Mays
ctggggttggcttccgcgggcatataggtagcgccccagaacccctaagtctccctcgaaaccacccagtaccttcaaggataggggcgtcgtcgcctgtgtcggccgtagctgtagcgggagagaggaagtgaggcgccgcgatgaacctgtgcaatcggtccccgtgcttcttcggctacggtggcacgcattgggatcggcgccaattgagggcttgtttggttattttcaatccatatggattggaggggattgatacggattgggagagattttgacttactagggattgaaaccctctcaatccccctcaatccatatggattggggtagaaccgaacaagccctgaaggaggagccgtcgtccgggggaattgctcgtccgtgcggcgacactgccgtcgtgtcgcgaatcgcgggggaaacgtcttcttccaccaatccgcgcactgacaagcaagccatagaggatccaagggttcaacaggt

SEQ ID NO: 21164 - DNA, 1662 bp, Zea Mays
cagaaggtcaccgtagggccgggacccctttatataactaacctctcctagggtttacgagcattgtggctcctcacttccgcgccgccacccccttcaggtaaggaagaggaggagggcaggatgtcgcaccgtaagttcgagcacccgaggcacggctccctcggcttccttcccaggaagcgctcctcccgccaccgcggcaaggtcattccccagggatgaccccaagaagccttgccatctcactgccttccttggctacaaggctggcatgactcacattgtccgtgaggttgagaagccaggatccaaactccataagaaggaaacttgtgaggctgttaccatcattgaaacccctcctcttgtcattgttgggctcgtggcatatgtgaagactcctcgtggcctccgcacactcaactctgtttgggcccaacatcttagcgaagaagtgaggagaaggttctacaagaactggtgcaagagcaagaagaaggctttcacaaagtatgctctcaaatatgaaaatgatgctggcaagaaggaaattcagctgcagcttgagaagatgaagaaatatgcttctgttatccgtgtcattgctcatacccagattaggaagatgaagggtttgaaacagaagaaggctcacctgatggagattcaggtcaatggtggtaccattgctgacaaggtggactacggctacaaattttttgagaaagaggtccctgttgatgctgtcttccagaaggatgagatgattgacatcattggtgtgaccaaaggtaaaggttatgagggcgtggtcactcgttggggtgtcacccgccttccccgcaaaacccacaggggtctccgcaaggttgcttgtatcggtgcatggcatcctgctagggtctcctatacagttgcccgtgctggtcagaacgggtaccaccaccgcaccgagatgaacaagaaagtttacaagatcggcaaggctggacaagagacccacgatgcctccacagagtttgacaggaccgagaaggacatcactcccatgggtggcttcccccactatggtatcgtgaagggtgactacctgatgatcaagggatgctgtgtgggtccaaagaagagggtggtgaccctccgccagtccctcctgaagcagacttcccggctggcgctggaggagatcaagctcaagttcatcgacacatcgtccaaatttgggcatggtcgcttccagactaccgatgagaagcagaggttctttggtaagctcaaggcgtaaggtgctgcggtgcagcgacaagtcccatttgtcaaaatcatcaaactgtgaaacttttgtttgttaccttgctgtaccaagttttgtagcaggatgatttgggagcatgttctggtcttctgtggattgttctacgcttcagaactgcagcgacattgcaagtgttttggtgtttgatcatcaacgtaactatttatattaattatgtttgctagtgtttaagaatatagtttagacggtgcaacgtggatttggatgaagacatcgtggtgatcaagaaattcatcttaaagtagtacagtagaagatttattgaagacttacgtagatcatgtaagagttcacacaagaagaaacacgaaattttttgagtt

SEQ ID NO: 21165 - DNA, 1953 bp, Zea Mays
aactaacctctcctagggtttacgagcattgtggctcctcacttccgcgccgccacccccttcaggtaaggaagaggaggagggcaggatgtcgcaccgtaagttcgagcacccgaggcacggctccctcggcttccttcccaggaagcgctcctcccgccaccgcggcaaggtgaagtcattccccagggatgaccccaagaagccttgccatctcactgccttccttggctacaaggctggcatgactcacattgtccgtgaggttgagaagccaggatccagtatgtccacccccttcttttttattaatcaattaagttgatcacatagtccagttttttgatatctgaaaaatgaactgtaacaacacaactatttcttcacaggtttctgaccagcagtttttagttttttatgaatttgtgggcacttaactttagatgataagccacacaactatttcttcacaggcccatagacttactcaaaacaacagttttttctgtttgaatatccacaactgcttgcacccatgaatctcaagtacatggataccatttcactccattattgtaactgctcttcctacttgatttcttcagaactccataagaaggaaacttgtgaggctgttaccatcattgaaacccctcctcttgtcattgttgggctcgtggcatatgtgaagactcctcgtggcctccgcacactcaactctgtttgggcccaacatcttagcgaagaagtgaggagaaggttctacaagaactggtgcaagagcaagaagaaggctttcacaaagtatgctctcaaatatgaaaatgatgctggcaagaaggaaattcagctgcagcttgagaagatgaagaaatatgcttctgttatccgtgtcattgctcatacccagattaggaagatgaagggtttgaaacagaagaaggctcacctgatggagattcaggtcaatggtggtaccattgctgacaaggtggactacggctacaaattttttgagaaagaggtccctgttgatgctgtcttccagaaggatgagatgattgacatcattggtgtgaccaaaggtaaaggttatgagggcgtggtcactcgttggggtgtcacccgccttccccgcaaaacccacaggggtctccgcaaggttgcttgtatcggtgcatggcatcctgctagggtctcctatacagttgcccgtgctggtcagaacgggtaccaccaccgcaccgagatgaacaagaaagtttacaagatcggcaaggctggacaagagacccacgatgcctccacagagtttgacaggaccgagaaggacatcactcccatgggtggcttcccccactatggtatcgtgaagggtgactacctgatgatcaagggatgctgtgtgggtccaaagaagagggtggtgaccctccgccagtccctcctgaagcagacttcccggctggcgctggaggagatcaagctcaagttcatcgacacatcgtccaaatttgggcatggtcgcttccagactaccgatgagaagcagaggttctttggtaagctcaaggcgtaaggtgctgcggtgcagcgacaagtcccatttgtcaaaatcatcaaactgtgaaacttttgtttgttaccttgctgtaccaagttttgtagcaggatgatttgggagcatgttctggtcttctgtggattgttctacgcttcagaactgcagcgacattgcaagtgttttggtgtttgatcatcaacgtaactatttatattaattatgtttgctagtgtttaagaatatagtttagacggtgcaacgtggatttggatgaagacatcgtggtgatcaagaaattcatcttaaagtagtacagtagaagatttattgaagacttacgtagatcatgtaagagttcacacaagaagaaacacgaaattttttgagtt

SEQ ID NO: 21166 - DNA, 316 bp, Zea Mays
ccgcgagctccctcctccagcgcgctcatctccctcaagctcctgcacgcagccatggcacgcctgcttcctggctcgcctgcgcgcgcgtcagctcccctctgctcgtcgcgcgcctgctccatccatggtcggctccttgcgtcggtctcccctgcaaactctctggcgcgcatctccctggcacgcctggctcgcccgtccgcgctccacctcgtcaatggccgccagttgaatctctctgtccctgctcggatggcgcacgcccctccctctcggctccttcctcttacttcccatgggcaccttcctcgcg

SEQ ID NO: 21167 - DNA, 570 bp, Zea Mays
atgcctagaccccagcctccgtcctgctcgtctgcctcggcagcaagtacttcgtgtcgaagcagcggcaacaacgccctcctttgcgtcgtgctcaccagatcgggccacgcgtcgtcgatctgtgcaattcctattcggctatcggtttcgccggttgtcgatttcctattcgccatggttatcccgtcggctgttccaatccgagctagcccagctcgccagccgtcgcgccctctttacccgttgagccgtgtgttgccgcgttcacctcattgtgtcgtcgtggacttgtcggcgtactgctgtggtacctggatcatgcttgcctcaactcgaacgagtcgtactgccatcatcttcgtcaaatggaaatcgttgcgctggcacgtcgatatcgtcgatcgccatcctcgtctacgccaactcccaagccgtgaagacgctcttttgctggccacgcgtcaccagctcaacaaaaggaatcccatggatatcgggtcaagaatagaaattgtgtgcttcatcaaagacgtcaaccggaaaccgtcgtcgtgcttccgactatcc

SEQ ID NO: 21168 - DNA, 3399 bp, Zea Mays
ccgatattaacccggcgagtacgctgaccacgcccgaacacccgaacagctgctgaccagcatcttgtggttgtggttcctcgtgtgtgacacctgtggtaatacggttgtgctgacaccacccattttgcaatcacaattaactaattcagacctgggtagacactattccctgtttcattttctgtcttttctttttttagttactactattaattttctctcaccaggacgagcctataaaaaccggcgaaatccttggctctcctctcctcacttggccaccataaccacaacctcttctcccctgtttcctctcgtgcgttctccgcaggagcgaggagggctcgcggcagcggcagggtctccgggtacgtcgtgaatgagaagagaaagggttggaggaaatatttccgaatctgtttccattacgattttggtggcgtagaatttggtttcaaacgcgcagttatgcgcacactagatcagatccgacttgttctgcggcattccgattgcttggcccttttttgccgattagttatctacgtaaaccatggtcggcataatgcgtttttgtttattgccttggtctctgaataaaggtagttattatttggttcttgggtaatggagtgccattgaatggtccctgcatagcgtggtattggttctgtagatttagatgaatcacagtgtcaagagagacaagattcacctgaatcctctgctaaatctgaaaaatagagatgatccaaggtcctctgctgaaaatgcagttttcttgttaataccaagcattctgccgtttcctattgagatagatattctgttactgatttttaccctagcttggtctcctctcctcctagtgtttttgttccagaatctgtagcaaatggctgacggcgaggacatccagccccttgtttgtgacaatggaactggcatggtcaaggctggttttgctggtgacgatgcgccaagggctgttttcccaagcattgttggacgcccacgtcacactggcgtgatggttggcatggggcagaaggatgcgtatgttggcgatgaggctcagtccaagaggggtatcctgactttgaagtacccgatcgaacatggcattgtcaacaactgggatgatatggagaagatctggcaccacaccttctataacgaactccgtgttgcgcctgaagagcaccctgtgctgctgaccgaagccccactcaacccaaaggctaacagggagaagatgacccaaatcatgtttgagactttcaatgttcctgccatgtatgtcgccatccaggctgtgctttccctgtacgccagtggacgtacaactggtattgtattggactctggtgatggtgtcagccacacagtgccaatctatgaaggttatgcccttcctcatgccatcctgcgccttgaccttgctgggcgtgacctgactgacagcctgatgaagatcctcactgagagaggttactccttcaccacctctgctgaacgcgaaattgtaagagacatcaaggaaaagcttgcatatgtggctcttgaatacgaccaggagctcgagaatgccaagagcagctcatctgtggagaagagctacgagctgcctgatggtcaggtgatcaccattggggcagagaggttcagatgccctgaggtcctcttccagccttccttcattggtatggaagctcctggcatccatgagaccacctacaactccatcatgaagtgcgatgtcgacatcaggaaggacttgtatggtaacattgtgctcagtggtggcacgaccatgttccctggtattgcggaccgtatgagcaaggagatcactgcccttgcgccgagcagcatgaaaatcaaggtggtggcaccgcctgagaggaaatacagtgtctggataggaggatccatccttgcctccctgagcaccttccaacagatgtggatctcaaaggctgagtatgacgagtcaggacctgggattgttcatcggaagtgcttctaagctctgggtcccccttcggctccattttatttattccttgagtgtttttcatataagctactatgtttgggattgcatgcctttgagcaggcaatgttgttgaatttatattttgggatttatattttgtggctcactacaatgcatacattgctccagctcctttccatgccaaatttgttgctagtggtgaaaacatcaaccacaaaaaagagaggatggaaattaataaagtacctaggatcatattataactgtacttgtcgagtaacactattggttctctttgtacatccatctctgagacatgcaattcatttgcgacgtgtttggtttgatgtagtgtaagggtataggacagttatctgataacgttacatgtgtttgttatgagttctattggaatcggatacattagaatcggataccacagtatagaaaactcaaaccctccaaccctagccggaatcaacgacccgattcactcgctcggcgccgctcgagccttcctcctcggacgccagtgccacgccgcgccgccacccagcctccctcctcctcggacgctagccgccggcgccaagtattcgccgccgtccaggtaacaaatcctgttctctccgaatctcaagtttgcacagagtccgtctcaccgaattccctagagtccgtttctccgtctctccgggtctggtggccacacctccgaaaccggctccttgttcctgtcgcctgccatcggcgacagatgcaacgagacgcagcgggatgctagctagagcgcgcgccaccactgtttccgtcccgctcagggccgtgacttgactgagcctcaagattgctgctgctggaatcattcacgggcttcggtctagatgatgactgatgagcgacgactgggacttgtgcgtgttcgccagatctagctagcatcccgttgtcagcctgttcctaatctaaacggagcagcaatggacagcattcttggacgacgacgtggggcacagtgggcagctctgtccatgtatttatctgactggaatagccaaagccagctctgtccatcagctctggatagctctgccatcagctctgtccatgtatttatcctcaagaactcatttgatattcagatttatcctcaaatctgaaaccgactgcagtgagcagccatgtcgtctgtttaatttatttgatgtgcacaatgatatccagatttatatgaaactcatttgttgacctccagatttattctcaagaactcgacgaaggaatatggcatttaggggtatcttgagttctctccttgtcacgtactattatgtctggttgctcatgggattagcatatagaagaaaatgtctgag

SEQ ID NO: 21169 - DNA, 2700 bp, Zea Mays
gtggttgtggttcctcgtgtgtgacacctgtggacgagcctataaaaaccggcgaaatccttggctctcctctcctcacttggccaccataaccacaacctcttctcccctgtttcctctcgtgcgttctccgcaggagcgaggagggctcgcggcagcggcagggtctccggtgtttttgttccagaatctgtagcaaatggctgacggcgaggacatccagccccttgtttgtgacaatggaactggcatggtcaaggctggttttgctggtgacgatgcgccaagggctgttttcccaagcattgttggacgcccacgtcacactggcgtgatggttggcatggggcagaaggatgcgtatgttggcgatgaggctcagtccaagaggggtatcctgactttgaagtacccgatcgaacatggcattgtcaacaactgggatgatatggagaagatctggcaccacaccttctataacgaactccgtgttgcgcctgaagagcaccctgtgctgctgaccgaagccccactcaacccaaaggctaacagggagaagatgacccaaatcatgtttgagactttcaatgttcctgccatgtatgtcgccatccaggctgtgctttccctgtacgccagtggacgtacaactggtattgtattggactctggtgatggtgtcagccacacagtgccaatctatgaaggttatgcccttcctcatgccatcctgcgccttgaccttgctgggcgtgacctgactgacagcctgatgaagatcctcactgagagaggttactccttcaccacctctgctgaacgcgaaattgtaagagacatcaaggaaaagcttgcatatgtggctcttgaatacgaccaggagctcgagaatgccaagagcagctcatctgtggagaagagctacgagctgcctgatggtcaggtgatcaccattggggcagagaggttcagatgccctgaggtcctcttccagccttccttcattggtatggaagctcctggcatccatgagaccacctacaactccatcatgaagtgcgatgtcgacatcaggaaggacttgtatggtaacattgtgctcagtggtggcacgaccatgttccctggtattgcggaccgtatgagcaaggagatcactgcccttgcgccgagcagcatgaaaatcaaggtggtggcaccgcctgagaggaaatacagtgtctggataggaggatccatccttgcctccctgagcaccttccaacagatgtggatctcaaaggctgagtatgacgagtcaggacctgggattgttcatcggaagtgcttctaagctctgggtcccccttcggctccattttatttattccttgagtgtttttcatataagctactatgtttgggattgcatgcctttgagcaggcaatgttgttgaatttatattttgggatttatattttgtggctcactacaatgcatacattgctccagctcctttccatgccaaatttgttgctagtggtgaaaacatcaaccacaaaaaagagaggatggaaattaataaagtacctaggatcatattataactgtacttgtcgagtaacactattggttctctttgtacatccatctctgagacatgcaattcatttgcgacgtgtttggtttgatgtagtgtaagggtataggacagttatctgataacgttacatgtgtttgttatgagttctattggaatcggatacattagaatcggataccacagtatagaaaactcaaaccctccaaccctagccggaatcaacgacccgattcactcgctcggcgccgctcgagccttcctcctcggacgccagtgccacgccgcgccgccacccagcctccctcctcctcggacgctagccgccggcgccaagtattcgccgccgtccaggtaacaaatcctgttctctccgaatctcaagtttgcacagagtccgtctcaccgaattccctagagtccgtttctccgtctctccgggtctggtggccacacctccgaaaccggctccttgttcctgtcgcctgccatcggcgacagatgcaacgagacgcagcgggatgctagctagagcgcgcgccaccactgtttccgtcccgctcagggccgtgacttgactgagcctcaagattgctgctgctggaatcattcacgggcttcggtctagatgatgactgatgagcgacgactgggacttgtgcgtgttcgccagatctagctagcatcccgttgtcagcctgttcctaatctaaacggagcagcaatggacagcattcttggacgacgacgtggggcacagtgggcagctctgtccatgtatttatctgactggaatagccaaagccagctctgtccatcagctctggatagctctgccatcagctctgtccatgtatttatcctcaagaactcatttgatattcagatttatcctcaaatctgaaaccgactgcagtgagcagccatgtcgtctgtttaatttatttgatgtgcacaatgatatccagatttatatgaaactcatttgttgacctccagatttattctcaagaactcgacgaaggaatatggcatttaggggtatcttgagttctctccttgtcacgtactattatgtctggttgctcatgggattagcatatagaagaaaatgtctgag

SEQ ID NO: 21170 - DNA, 2589 bp, Zea Mays
tcacaattaactaattcagacctgggagcgaggagggctcgcggcagcggcagggtctccggtgtttttgttccagaatctgtagcaaatggctgacggcgaggacatccagccccttgtttgtgacaatggaactggcatggtcaaggctggttttgctggtgacgatgcgccaagggctgttttcccaagcattgttggacgcccacgtcacactggcgtgatggttggcatggggcagaaggatgcgtatgttggcgatgaggctcagtccaagaggggtatcctgactttgaagtacccgatcgaacatggcattgtcaacaactgggatgatatggagaagatctggcaccacaccttctataacgaactccgtgttgcgcctgaagagcaccctgtgctgctgaccgaagccccactcaacccaaaggctaacagggagaagatgacccaaatcatgtttgagactttcaatgttcctgccatgtatgtcgccatccaggctgtgctttccctgtacgccagtggacgtacaactggtattgtattggactctggtgatggtgtcagccacacagtgccaatctatgaaggttatgcccttcctcatgccatcctgcgccttgaccttgctgggcgtgacctgactgacagcctgatgaagatcctcactgagagaggttactccttcaccacctctgctgaacgcgaaattgtaagagacatcaaggaaaagcttgcatatgtggctcttgaatacgaccaggagctcgagaatgccaagagcagctcatctgtggagaagagctacgagctgcctgatggtcaggtgatcaccattggggcagagaggttcagatgccctgaggtcctcttccagccttccttcattggtatggaagctcctggcatccatgagaccacctacaactccatcatgaagtgcgatgtcgacatcaggaaggacttgtatggtaacattgtgctcagtggtggcacgaccatgttccctggtattgcggaccgtatgagcaaggagatcactgcccttgcgccgagcagcatgaaaatcaaggtggtggcaccgcctgagaggaaatacagtgtctggataggaggatccatccttgcctccctgagcaccttccaacagatgtggatctcaaaggctgagtatgacgagtcaggacctgggattgttcatcggaagtgcttctaagctctgggtcccccttcggctccattttatttattccttgagtgtttttcatataagctactatgtttgggattgcatgcctttgagcaggcaatgttgttgaatttatattttgggatttatattttgtggctcactacaatgcatacattgctccagctcctttccatgccaaatttgttgctagtggtgaaaacatcaaccacaaaaaagagaggatggaaattaataaagtacctaggatcatattataactgtacttgtcgagtaacactattggttctctttgtacatccatctctgagacatgcaattcatttgcgacgtgtttggtttgatgtagtgtaagggtataggacagttatctgataacgttacatgtgtttgttatgagttctattggaatcggatacattagaatcggataccacagtatagaaaactcaaaccctccaaccctagccggaatcaacgacccgattcactcgctcggcgccgctcgagccttcctcctcggacgccagtgccacgccgcgccgccacccagcctccctcctcctcggacgctagccgccggcgccaagtattcgccgccgtccaggtaacaaatcctgttctctccgaatctcaagtttgcacagagtccgtctcaccgaattccctagagtccgtttctccgtctctccgggtctggtggccacacctccgaaaccggctccttgttcctgtcgcctgccatcggcgacagatgcaacgagacgcagcgggatgctagctagagcgcgcgccaccactgtttccgtcccgctcagggccgtgacttgactgagcctcaagattgctgctgctggaatcattcacgggcttcggtctagatgatgactgatgagcgacgactgggacttgtgcgtgttcgccagatctagctagcatcccgttgtcagcctgttcctaatctaaacggagcagcaatggacagcattcttggacgacgacgtggggcacagtgggcagctctgtccatgtatttatctgactggaatagccaaagccagctctgtccatcagctctggatagctctgccatcagctctgtccatgtatttatcctcaagaactcatttgatattcagatttatcctcaaatctgaaaccgactgcagtgagcagccatgtcgtctgtttaatttatttgatgtgcacaatgatatccagatttatatgaaactcatttgttgacctccagatttattctcaagaactcgacgaaggaatatggcatttaggggtatcttgagttctctccttgtcacgtactattatgtctggttgctcatgggattagcatatagaagaaaatgtctgag

SEQ ID NO: 21171 - DNA, 3716 bp, Zea Mays
cttggagttcggatcaaaaagtttctgccgacctcagcggacccgagggccaacgaagcccaaagcccacagacgacgctacggcctcgccttccgtttctgcacgttccttctctggaagccgaggcccgctcgctcgaagcggctgttgcgccgctcaatttcaatccggaggctgaagccacgggggagaagggcgcatggtttccgcagcgcgcgctgcatcccttctggccttgttgcggcctccggagcgcggatcttgacatcggcgacgacaacggcgaggaggaggatcttctcacggcactgcgaccctgcgagatggacatcgtatgtgaagtgtgtggtgttgttggctacaggcaacttttaatacaatgtagcaattgcaaaaatgctgcaaggcacctatattgtttggacccggtaatttatgatgcctcagcaattgaatggttgtgtgacgattgtcctccaaaacataatgaagaaacacaaaaggcagtgggtgctgttgggcctaccatgaacacaatggagtgtctggacctctcaatgggaaaagatggctgctctttttcacagaattgtgttgaaggcttcacccaaggaacaaagtctgactttttttcttcaatcaatgatgttgagacatcatatccatttgttaagggtagttcttgtcctacactaccgaatatggagcaaaaagatggtgtattggaaaatgcggaacaacctcatcttttggagatggttaatcttgatggtacaagccattcacttgtggaccctccattagaaatcaaagaacaaggagcggaagctggcttatttgcttcagttgaagatgtcgagcaaacccatcccattttaactgatgaaactagtcctatatggtcaagtgaggagcaagtagacggttcttgtcctgcatcggaaagccgggagcaacctgttcctttcaaggtggttatactcggaccatggcatgatgtgccaaatagcatcctaagatcaaggcctccttcaaactactcacagtccatgcaaggatcagatctatatgttggaaatgtggatgtattggatctttctaaggagcagttggactcgaggttaaaacctgaagaacaaggagcggaggatggcttatttgcctcagtggaatatgttgagcaaacacatcccaattttactgaggagaaagtagatggttctattcctacaccagcaagttcggagcaacctgatcagttggaggtggttagaccatgggatgatgcgccgaatagtaccctaaggtcaaagcctccatcaaactactcacagccaatgcaaggatcagatctagatgttaggaatatggatgccttggatccatctaaggagtggttggactcaaggttattgtcaaatacggtagagccatcaagttcctcaaatggaggaggcacatctgttgagaaagacaacattgaaaaaacagaacgcttgtcaggcattgacaccgtcacccctggactggataatgtccagggatcaaatccctcagcagagccatcaagttcctcaactggagaaggaaactcagctgttgaaaaacacagtgctgaaatgacagaatgcttgttaggcatgggaattttgaaccctgcactgcataatgtccaggtattgagtccctcgacaccaaaagaatgcttggtttctagcgcagacaagtcagatgtagcaaataggtcagatgaaattaatcacagtctcgatgattttaaccaaagtaatcccaagccagtgctgaagggaagagtctccaaaatgatgtgcccaagacttgcgtttcaactgccaaaagtgttgcctgtatgcgaacatcacaaaagggagatgtcattgccttccaagcatgttagtccacggaaagcaacaaaaagtagctttagaaagcaatatgaaggaccaaacagacatgtttcacgtcatactgaacatcagaaaaccaaactcgttatgaaggacagaaatacaggtcctgctcatatgagaagttgtaggccaacaaagcaaattgattgtacttgctcaagtgcttccttggattcatctacaaagactaaggaagtaaatgatgcagaaccaagatgttctaaatctgtaaaaacttttgagaatgtcatggccaagaaaagaaaacgacctattctatcatatgatgaagatgccaaggccatgcagatggaagtgaggatgcgcaggagacacagggaaagtggtgtgatgaagctgcgaagatccacagaaaattctgatgaagcgatgtgtccaggaaattcaaataatcaacttaccaatgatcatacgaaggcaaggaagcagagaagggccaacaaagacaataaaacaccaccagtgaacgctagtgttccatgcacacagattgatgctgcacgattagcatcagatcagcaaagctttatttgcacgcgacccattgatagaccttactggactggaatcatgaagattggccaggaatatatttcattggttgcacacctgtcaaatcaagcatgcaagaaggtgcaggaattatcgatgtcattaccaccactaatgaaagtaacaaagcattcaaagttgaaagcctggccagggaggtggaaggcatcggaacctactgctgaatgcgttggcttgtatttcttctcagataatatgagggaactggatcaacttgtgcattatctcaatgatcatagcttagtcctaaaatatgtcgttggctttgccaagctgctgatctccccgtctgttttcctaccagagcaatgccaaacgttccaagggaaacgctatctgtggggagtgttcaagcgcaggatgaatacggggagaatacatcatgtgaatgcaaagtgacaccctagtccaataaatccatgttgtgaagggtatcgctagctcaaagagacaacagttcgccaagcactgttgatgcctttttgagctgagaccgacccctgtgatcataagcagccccgcgagaactctcccctacccaggctatcgggccttgtcattgtgcggacgtctgaggtcggagcacttcatttgtttgggagctggaaaaatgaaggtgcactggttggtttctctgaacttgtgaaagggttagcgaaggaccgtactgtaatgttcatggcctggaggaatgatgcagcaagtaggatcagaaatcagaactagccagcgacaatcacgctccagcttctgaaacgttgctgtagccttttgttgatgttcaggactgggagctagattgtcacgatttgacactgaggacgttactgtgcctgcaagcctaacctaagatgtatcaagcatcaagtgctgctgctgctgctatggaaggtcttagccaaaattaaattatgtttctaagctctgcatgcatcttaacctgcgctaataggttttcttgatggcctcaatgggagcagcaggaacctactactttttatgcgcataaactggcacttcgcatgatgtacttgttcataagttggtcaaaaagtcggttccgtggggtaaatccattaaaaaagggtaaattttagcggagggagcagctacagttggcggggaacttgctttagaaaaaagttttagtagcttatatgccttgggagggttacaattttgaagacaca

SEQ ID NO: 21172 - DNA, 3616 bp, Zea Mays
caaaaagtttctgccgacctcagcggacccgagggccaacgaagcccaaagcccacagacgacgctacggcctcgccttccgtttctgcacgttccttctctggaagccgaggcccgctcgctcgaagcggctgttgcgccgctcaatttcaatccggaggctgaagccacgggggagaagggcgcatggtttccgcagcgcgcgctgcatcccttctggccttgttgcggcctccggagcgcggatcttgacatcggcgacgacaacggcgaggaggaggatcttctcacggcactgcgaccctgcgagatgatattgtttggacccggtaatttatgatgcctcagcaattgaatggttgtgtgacgattgtcctccaaaacataatgaagaaacacaaaaggcagtgggtgctgttgggcctaccatgaacacaatggagtgtctggacctctcaatgggaaaagatggctgctctttttcacagaattgtgttgaaggcttcacccaaggaacaaagtctgactttttttcttcaatcaatgatgttgagacatcatatccatttgttaagggtagttcttgtcctacactaccgaatatggagcaaaaagatggtgtattggaaaatgcggaacaacctcatcttttggagatggttaatcttgatggtacaagccattcacttgtggaccctccattagaaatcaaagaacaaggagcggaagctggcttatttgcttcagttgaagatgtcgagcaaacccatcccattttaactgatgaaactagtcctatatggtcaagtgaggagcaagtagacggttcttgtcctgcatcggaaagccgggagcaacctgttcctttcaaggtggttatactcggaccatggcatgatgtgccaaatagcatcctaagatcaaggcctccttcaaactactcacagtccatgcaaggatcagatctatatgttggaaatgtggatgtattggatctttctaaggagcagttggactcgaggttaaaacctgaagaacaaggagcggaggatggcttatttgcctcagtggaatatgttgagcaaacacatcccaattttactgaggagaaagtagatggttctattcctacaccagcaagttcggagcaacctgatcagttggaggtggttagaccatgggatgatgcgccgaatagtaccctaaggtcaaagcctccatcaaactactcacagccaatgcaaggatcagatctagatgttaggaatatggatgccttggatccatctaaggagtggttggactcaaggttattgtcaaatacggtagagccatcaagttcctcaaatggaggaggcacatctgttgagaaagacaacattgaaaaaacagaacgcttgtcaggcattgacaccgtcacccctggactggataatgtccagggatcaaatccctcagcagagccatcaagttcctcaactggagaaggaaactcagctgttgaaaaacacagtgctgaaatgacagaatgcttgttaggcatgggaattttgaaccctgcactgcataatgtccaggtattgagtccctcgacaccaaaagaatgcttggtttctagcgcagacaagtcagatgtagcaaataggtcagatgaaattaatcacagtctcgatgattttaaccaaagtaatcccaagccagtgctgaagggaagagtctccaaaatgatgtgcccaagacttgcgtttcaactgccaaaagtgttgcctgtatgcgaacatcacaaaagggagatgtcattgccttccaagcatgttagtccacggaaagcaacaaaaagtagctttagaaagcaatatgaaggaccaaacagacatgtttcacgtcatactgaacatcagaaaaccaaactcgttatgaaggacagaaatacaggtcctgctcatatgagaagttgtaggccaacaaagcaaattgattgtacttgctcaagtgcttccttggattcatctacaaagactaaggaagtaaatgatgcagaaccaagatgttctaaatctgtaaaaacttttgagaatgtcatggccaagaaaagaaaacgacctattctatcatatgatgaagatgccaaggccatgcagatggaagtgaggatgcgcaggagacacagggaaagtggtgtgatgaagctgcgaagatccacagaaaattctgatgaagcgatgtgtccaggaaattcaaataatcaacttaccaatgatcatacgaaggcaaggaagcagagaagggccaacaaagacaataaaacaccaccagtgaacgctagtgttccatgcacacagattgatgctgcacgattagcatcagatcagcaaagctttatttgcacgcgacccattgatagaccttactggactggaatcatgaagattggccaggaatatatttcattggttgcacacctgtcaaatcaagcatgcaagaaggtgcaggaattatcgatgtcattaccaccactaatgaaagtaacaaagcattcaaagttgaaagcctggccagggaggtggaaggcatcggaacctactgctgaatgcgttggcttgtatttcttctcagataatatgagggaactggatcaacttgtgcattatctcaatgatcatagcttagtcctaaaatatgtcgttggctttgccaagctgctgatctccccgtctgttttcctaccagagcaatgccaaacgttccaagggaaacgctatctgtggggagtgttcaagcgcaggatgaatacggggagaatacatcatgtgaatgcaaagtgacaccctagtccaataaatccatgttgtgaagggtatcgctagctcaaagagacaacagttcgccaagcactgttgatgcctttttgagctgagaccgacccctgtgatcataagcagccccgcgagaactctcccctacccaggctatcgggccttgtcattgtgcggacgtctgaggtcggagcacttcatttgtttgggagctggaaaaatgaaggtgcactggttggtttctctgaacttgtgaaagggttagcgaaggaccgtactgtaatgttcatggcctggaggaatgatgcagcaagtaggatcagaaatcagaactagccagcgacaatcacgctccagcttctgaaacgttgctgtagccttttgttgatgttcaggactgggagctagattgtcacgatttgacactgaggacgttactgtgcctgcaagcctaacctaagatgtatcaagcatcaagtgctgctgctgctgctatggaaggtcttagccaaaattaaattatgtttctaagctctgcatgcatcttaacctgcgctaataggttttcttgatggcctcaatgggagcagcaggaacctactactttttatgcgcataaactggcacttcgcatgatgtacttgttcataagttggtcaaaaagtcggttccgtggggtaaatccattaaaaaagggtaaattttagcggagggagcagctacagttggcggggaacttgctttagaaaaaagttttagtagcttatatgccttgggagggttacaattttgaagacaca

SEQ ID NO: 21173 - DNA, 2332 bp, Zea Mays
cccaaagcccacagacgacgctacggcctcgccttccgtttctgcacgttccttctctggaagccgaggcccgctcgctcgaagcggctgttgcgccgctcaatttcaatccggaggctgaagccacgggggagaagggcgcatggtttccgcagcgcgcgctgcatcccttctggccttgttgcggcctccggagcgcggatcttgacatcggcgacgacaacggcgaggaggaggatcttctcacggcactgcgaccctgcgagatgatattgtttggacccggtaatttatgatgcctcagcaattgaatggttgtgtgacgattgtcctccaaaacataatgaagaaacacaaaaggcagtgggtgctgttgggcctaccatgaacacaatggagtgtctggacctctcaatgggaaaagatggctgctctttttcacagaattgtgttgaaggcttcacccaaggaacaaagtctgactttttttcttcaatcaatgatgttgagacatcatatccatttgttaagggtagttcttgtcctacactaccgaatatggagcaaaaagatggtgtattggaaaatgcggaacaacctcatcttttggagatggttaatcttgatggtacaagccattcacttgtggaccctccattagaaatcaaagaacaaggagcggaagatggcttatttgcctcagtggaatatgttgagcaaacacatcccaattttactgaggagaaagtagatggttctattcctacaccagcaagttcggagcaacctgatcagttggaggtggttagaccatgggatgatgcgccgaatagtaccctaaggtcaaagcctccatcaaactactcacagccaatgcaaggatcagatctagatgttaggaatatggatgccttggatccatctaaggagtggttggactcaaggttattgtcaaatacggtagagccatcaagttcctcaaatggaggaggcacatctgttgagaaagacaacattgaaaaaacagaacgcttgtcaggcattgacaccgtcacccctggactggataatgtccagggatcaaatccctcagcagagccatcaagttcctcaactggagaaggaaactcagctgttgaaaaacacagtgctgaaatgacagaatgcttgttaggcatgggaattttgaaccctgcactgcataatgtccaggtattgagtccctcgacaccaaaagaatgcttggtttctagcgcagacaagtcagatgtagcaaataggtcagatgaaattaatcacagtctcgatgattttaaccaaagtaatcccaagccagtgctgaagggaagagtctccaaaatgatgtgcccaagacttgcgtttcaactgccaaaagtgttgcctgtatgcgaacatcacaaaagggagatgtcattgccttccaagcatgttagtccacggaaagcaacaaaaagtagctttagaaagcaatatgaaggaccaaacagacatgtttcacgtcatactgaacatcagaaaaccaaactcgttatgaaggacagaaatacaggtcctgctcatatgagaagttgtaggccaacaaagcaaattgattgtacttgctcaagtgcttccttggattcatctacaaagactaaggaagtaaatgatgcagaaccaagatgttctaaatctgtaaaaacttttgagaatgtcatggccaagaaaagaaaacgacctattctatcatatgatgaagatgccaaggccatgcagatggaagtgaggatgcgcaggagacacagggaaagtggtgtgatgaagctgcgaagatccacagaaaattctgatgaagcgatgtgtccaggaaattcaaataatcaacttaccaatgatcatacgaaggcaaggaagcagagaagggccaacaaagacaataaaacaccaccagtgaacgctagtgttccatgcacacagattgatgctgcacgattagcatcagatcagcaaagctttatttgcacgcgacccattgatagaccttactggactggaatcatgaagattggccaggaatatatttcattggttgcacacctgtcaaatcaagcatgcaagaaggtgcaggaattatcgatgtcattaccaccactaatgaaagtaacaaagcattcaaagttgaaagcctggccagggaggtggaaggcatcggaacctactgctgaatgcgttggcttgtatttcttctcagataatatgagggaactggatcaacttgtgcattatctcaatgatcatagcttagtcctaaaatatgtcgttggctttgcca

SEQ ID NO: 21174 - DNA, 3636 bp, Zea Mays
gacgctacggcctcgccttccgtttctgcacgttccttctctggaagccgaggcccgctcgctcgaagcggctgttgcgccgctcaatttcaatccggaggctgaagccacgggggagaagggcgcatggtttccgcagcgcgcgctgcatcccttctggccttgttgcggcctccggagcgcggatcttgacatcggcgacgacaacggcgaggaggaggatcttctcacggcactgcgaccctgcgagatggacatcgtatgtgaagtgtgtggtgttgttggctacaggcaacttttaatacaatgtagcaattgcaaaaatgctgcaagatattgtttggacccggtaatttatgatgcctcagcaattgaatggttgtgtgacgattgtcctccaaaacataatgaagaaacacaaaaggcagtgggtgctgttgggcctaccatgaacacaatggagtgtctggacctctcaatgggaaaagatggctgctctttttcacagaattgtgttgaaggcttcacccaaggaacaaagtctgactttttttcttcaatcaatgatgttgagacatcatatccatttgttaagggtagttcttgtcctacactaccgaatatggagcaaaaagatggtgtattggaaaatgcggaacaacctcatcttttggagatggttaatcttgatggtacaagccattcacttgtggaccctccattagaaatcaaagaacaaggagcggaagctggcttatttgcttcagttgaagatgtcgagcaaacccatcccattttaactgatgaaactagtcctatatggtcaagtgaggagcaagtagacggttcttgtcctgcatcggaaagccgggagcaacctgttcctttcaaggtggttatactcggaccatggcatgatgtgccaaatagcatcctaagatcaaggcctccttcaaactactcacagtccatgcaaggatcagatctatatgttggaaatgtggatgtattggatctttctaaggagcagttggactcgaggttaaaacctgaagaacaaggagcggaggatggcttatttgcctcagtggaatatgttgagcaaacacatcccaattttactgaggagaaagtagatggttctattcctacaccagcaagttcggagcaacctgatcagttggaggtggttagaccatgggatgatgcgccgaatagtaccctaaggtcaaagcctccatcaaactactcacagccaatgcaaggatcagatctagatgttaggaatatggatgccttggatccatctaaggagtggttggactcaaggttattgtcaaatacggtagagccatcaagttcctcaaatggaggaggcacatctgttgagaaagacaacattgaaaaaacagaacgcttgtcaggcattgacaccgtcacccctggactggataatgtccagggatcaaatccctcagcagagccatcaagttcctcaactggagaaggaaactcagctgttgaaaaacacagtgctgaaatgacagaatgcttgttaggcatgggaattttgaaccctgcactgcataatgtccaggtattgagtccctcgacaccaaaagaatgcttggtttctagcgcagacaagtcagatgtagcaaataggtcagatgaaattaatcacagtctcgatgattttaaccaaagtaatcccaagccagtgctgaagggaagagtctccaaaatgatgtgcccaagacttgcgtttcaactgccaaaagtgttgcctgtatgcgaacatcacaaaagggagatgtcattgccttccaagcatgttagtccacggaaagcaacaaaaagtagctttagaaagcaatatgaaggaccaaacagacatgtttcacgtcatactgaacatcagaaaaccaaactcgttatgaaggacagaaatacaggtcctgctcatatgagaagttgtaggccaacaaagcaaattgattgtacttgctcaagtgcttccttggattcatctacaaagactaaggaagtaaatgatgcagaaccaagatgttctaaatctgtaaaaacttttgagaatgtcatggccaagaaaagaaaacgacctattctatcatatgatgaagatgccaaggccatgcagatggaagtgaggatgcgcaggagacacagggaaagtggtgtgatgaagctgcgaagatccacagaaaattctgatgaagcgatgtgtccaggaaattcaaataatcaacttaccaatgatcatacgaaggcaaggaagcagagaagggccaacaaagacaataaaacaccaccagtgaacgctagtgttccatgcacacagattgatgctgcacgattagcatcagatcagcaaagctttatttgcacgcgacccattgatagaccttactggactggaatcatgaagattggccaggaatatatttcattggttgcacacctgtcaaatcaagcatgcaagaaggtgcaggaattatcgatgtcattaccaccactaatgaaagtaacaaagcattcaaagttgaaagcctggccagggaggtggaaggcatcggaacctactgctgaatgcgttggcttgtatttcttctcagataatatgagggaactggatcaacttgtgcattatctcaatgatcatagcttagtcctaaaatatgtcgttggctttgccaagctgctgatctccccgtctgttttcctaccagagcaatgccaaacgttccaagggaaacgctatctgtggggagtgttcaagcgcaggatgaatacggggagaatacatcatgtgaatgcaaagtgacaccctagtccaataaatccatgttgtgaagggtatcgctagctcaaagagacaacagttcgccaagcactgttgatgcctttttgagctgagaccgacccctgtgatcataagcagccccgcgagaactctcccctacccaggctatcgggccttgtcattgtgcggacgtctgaggtcggagcacttcatttgtttgggagctggaaaaatgaaggtgcactggttggtttctctgaacttgtgaaagggttagcgaaggaccgtactgtaatgttcatggcctggaggaatgatgcagcaagtaggatcagaaatcagaactagccagcgacaatcacgctccagcttctgaaacgttgctgtagccttttgttgatgttcaggactgggagctagattgtcacgatttgacactgaggacgttactgtgcctgcaagcctaacctaagatgtatcaagcatcaagtgctgctgctgctgctatggaaggtcttagccaaaattaaattatgtttctaagctctgcatgcatcttaacctgcgctaataggttttcttgatggcctcaatgggagcagcaggaacctactactttttatgcgcataaactggcacttcgcatgatgtacttgttcataagttggtcaaaaagtcggttccgtggggtaaatccattaaaaaagggtaaattttagcggagggagcagctacagttggcggggaacttgctttagaaaaaagttttagtagcttatatgccttgggagggttacaattttgaagacaca

SEQ ID NO: 21175 - DNA, 3361 bp, Zea Mays
ctcatccaaactaccaccagtgtcacaaagtttcttgtatgaagggcacaaggaatggatattgtttggacccggtaatttatgatgcctcagcaattgaatggttgtgtgacgattgtcctccaaaacataatgaagaaacacaaaaggcagtgggtgctgttgggcctaccatgaacacaatggagtgtctggacctctcaatgggaaaagatggctgctctttttcacagaattgtgttgaaggcttcacccaaggaacaaagtctgactttttttcttcaatcaatgatgttgagacatcatatccatttgttaagggtagttcttgtcctacactaccgaatatggagcaaaaagatggtgtattggaaaatgcggaacaacctcatcttttggagatggttaatcttgatggtacaagccattcacttgtggaccctccattagaaatcaaagaacaaggagcggaagctggcttatttgcttcagttgaagatgtcgagcaaacccatcccattttaactgatgaaactagtcctatatggtcaagtgaggagcaagtagacggttcttgtcctgcatcggaaagccgggagcaacctgttcctttcaaggtggttatactcggaccatggcatgatgtgccaaatagcatcctaagatcaaggcctccttcaaactactcacagtccatgcaaggatcagatctatatgttggaaatgtggatgtattggatctttctaaggagcagttggactcgaggttaaaacctgaagaacaaggagcggaggatggcttatttgcctcagtggaatatgttgagcaaacacatcccaattttactgaggagaaagtagatggttctattcctacaccagcaagttcggagcaacctgatcagttggaggtggttagaccatgggatgatgcgccgaatagtaccctaaggtcaaagcctccatcaaactactcacagccaatgcaaggatcagatctagatgttaggaatatggatgccttggatccatctaaggagtggttggactcaaggttattgtcaaatacggtagagccatcaagttcctcaaatggaggaggcacatctgttgagaaagacaacattgaaaaaacagaacgcttgtcaggcattgacaccgtcacccctggactggataatgtccagggatcaaatccctcagcagagccatcaagttcctcaactggagaaggaaactcagctgttgaaaaacacagtgctgaaatgacagaatgcttgttaggcatgggaattttgaaccctgcactgcataatgtccaggtattgagtccctcgacaccaaaagaatgcttggtttctagcgcagacaagtcagatgtagcaaataggtcagatgaaattaatcacagtctcgatgattttaaccaaagtaatcccaagccagtgctgaagggaagagtctccaaaatgatgtgcccaagacttgcgtttcaactgccaaaagtgttgcctgtatgcgaacatcacaaaagggagatgtcattgccttccaagcatgttagtccacggaaagcaacaaaaagtagctttagaaagcaatatgaaggaccaaacagacatgtttcacgtcatactgaacatcagaaaaccaaactcgttatgaaggacagaaatacaggtcctgctcatatgagaagttgtaggccaacaaagcaaattgattgtacttgctcaagtgcttccttggattcatctacaaagactaaggaagtaaatgatgcagaaccaagatgttctaaatctgtaaaaacttttgagaatgtcatggccaagaaaagaaaacgacctattctatcatatgatgaagatgccaaggccatgcagatggaagtgaggatgcgcaggagacacagggaaagtggtgtgatgaagctgcgaagatccacagaaaattctgatgaagcgatgtgtccaggaaattcaaataatcaacttaccaatgatcatacgaaggcaaggaagcagagaagggccaacaaagacaataaaacaccaccagtgaacgctagtgttccatgcacacagattgatgctgcacgattagcatcagatcagcaaagctttatttgcacgcgacccattgatagaccttactggactggaatcatgaagattggccaggaatatatttcattggttgcacacctgtcaaatcaagcatgcaagaaggtgcaggaattatcgatgtcattaccaccactaatgaaagtaacaaagcattcaaagttgaaagcctggccagggaggtggaaggcatcggaacctactgctgaatgcgttggcttgtatttcttctcagataatatgagggaactggatcaacttgtgcattatctcaatgatcatagcttagtcctaaaatatgtcgttggctttgccaagctgctgatctccccgtctgttttcctaccagagcaatgccaaacgttccaagggaaacgctatctgtggggagtgttcaagcgcaggatgaatacggggagaatacatcatgtgaatgcaaagtgacaccctagtccaataaatccatgttgtgaagggtatcgctagctcaaagagacaacagttcgccaagcactgttgatgcctttttgagctgagaccgacccctgtgatcataagcagccccgcgagaactctcccctacccaggctatcgggccttgtcattgtgcggacgtctgaggtcggagcacttcatttgtttgggagctggaaaaatgaaggtgcactggttggtttctctgaacttgtgaaagggttagcgaaggaccgtactgtaatgttcatggcctggaggaatgatgcagcaagtaggatcagaaatcagaactagccagcgacaatcacgctccagcttctgaaacgttgctgtagccttttgttgatgttcaggactgggagctagattgtcacgatttgacactgaggacgttactgtgcctgcaagcctaacctaagatgtatcaagcatcaagtgctgctgctgctgctatggaaggtcttagccaaaattaaattatgtttctaagctctgcatgcatcttaacctgcgctaataggttttcttgatggcctcaatgggagcagcaggaacctactactttttatgcgcataaactggcacttcgcatgatgtacttgttcataagttggtcaaaaagtcggttccgtggggtaaatccattaaaaaagggtaaattttagcggagggagcagctacagttggcggggaacttgctttagaaaaaagttttagtagcttatatgccttgggagggttacaattttgaagacaca

SEQ ID NO: 21176 - DNA, 843 bp, Zea Mays
cctattggattcaaaggctcttgttgacaaggtctatccatgtgtgtttctaagtctaaattgtagtgttgtattactgcaaaatgaaaagaactgtatattataatggaaatatgaccaataccttcagaccaaaaaatcttcgaaagatcctaggtggtggaatgaggcaggttggatttctgtgtgctggtgctcatacaatatgggaaagcttgctggtgaggatagaaaggctaaagttgtggcagaagggccaaatagaattgaacagttcacagtggattcaactttagtcgtgcccaatatgtgtgaggcttgtccttcattgccaaattttagataccgatgttgaatatgaagtggcaccgttttttactattattgttcgggctcgtgtaacaaagacacaattttgaagaaatattcgtcaactcttgccacaatattgactggtctagcttctgctgtatttttgggacattccttgaccattaattttctcctaggcatatcagtggtgtttatttcaatgcaccagttcttctctccacttgcaaaagtcgaagatgacaaatcagccgactcaatagagttggaagacacaaaatgaccgtccatctgaatcttcttttgtaaatataactgttggtgctgctgatgatgagtttgacacatggacaaatacctaacagtcggtggatttttactcacctgctaactctgatgtggagtctaaactgagaactgcttgagttgggaagcgacaaaattttaggaatacaagtctgcgcttataaagatggaaatgtcataatagatattgctgtcggttgccaataa

SEQ ID NO: 21177 - DNA, 913 bp, Zea Mays
cctattggattcaaaggctcttgttgacaaggtctatccatgtgtgtttctaagtctaaattgtagtgttgtattactgcaaaatgaaaagaactgtatattataatggaaatatgaccaataccttcagaccaaaaaatcttcgaaagatcctaggtggtggaatgaggcaggttggatttctgtgtgctggtgctcatacaatatgggaaagcttgctggtgaggatagaaaggctaaagttgtggcagtgtgaggcttgtccttcattgccaaattttagataccgatgttgaatatgaagtggcaccgttttttactattattgttcgggctcgtgtaacaaaggtatgcagtaatggtacacaaggcattacatcttcattcttctttaagtatgcaataatggtgtttgacatttgctcttcattattattgaagttaccacaactattgtctgactgaaatatgctacagacacaattttgaagaaatattcgtcaactcttgccacaatattgactggtctagcttctgctgtatttttgggacattccttgaccattaattttctcctaggcatatcagtggtgtttatttcaatgcaccagttcttctctccacttgcaaaagtcgaagatgacaaatcagccgactcaatagagttggaagacacaaaatgaccgtccatctgaatcttcttttgtaaatataactgttggtgctgctgatgatgagtttgacacatggacaaatacctaacagtcggtggatttttactcacctgctaactctgatgtggagtctaaactgagaactgcttgagttgggaagcgacaaaattttaggaatacaagtctgcgcttataaagatggaaatgtcataatagatattgctgtcggttgccaataa

SEQ ID NO: 21178 - DNA, 1387 bp, Zea Mays
ccgccgttcaaccctcttctcgcctgatcgcctcccgcacgtacctctctatatttgtttctcccatccatgcgaagctccggcatctagctagcaggtcgctcgatcgccatgtccgacgatagcgacggccagcggcaatgccgccggggcgtcaccgtcgacgtcgagctcggcgccgccatggcgcttgccgacatggccggggtcgccggaccgggcggcgaacagccgccgcccgtgcggcgcgctactcccgctccttctgctcaccaggaggacgaggcgagcacgcggctgagcctggagctaggggaggtgagcatccaggcctccccgtgctccagcagctccagctttggcgggcacccgccgccgccgccgtcccaccaggcggcgtaccagcagcccgccgtaccggagccagcgacgactggctacggaccccggccccggcacgcggtcaccgaggccgagaaggaggcgaagcggctgcggcgcgtgctggccaaccgcgagtccgcccgccagaccatcctccgccgccaggccatccgggacgagctcgccaggaaggtcgccgacctgtcgtcgcagaacgagagcatgaagaaggtaggtaccaccgcaccttgctcggcggcggcggcatctggtgtaatgtcgtcttcacgtacgccgctctttcgatcgagttgcactgatgagccgacggccacggtgcaggagaaggacgtggtcatggaggagtacctgtcgctcaaggaggcgaacaagcagctcaaagaagaggcacatcgctttcctacctttcatgctcgatctatacttgaataaaatctctgcgtaatcctgtacttgactcggcagatgacgtagcatcactcacctggtttactacgattatagtaacgatgttgccattgttaggcagacaacctctctacttgttcccctcaaacgaggacacatgtgcgcatgacttgcactgcactttttcgcctttcctgtttctgcccaccactaccagtgctctactcatgccgtacacctggctcctgctgctagtcgtgttcgaattgcatgttcttgtgcagaggcgtgcgtgaggactgaggacacgtcggtggatttcatcgctttctccgactggtcttggcgccgtcaacacaagctaataacacggacgtgtgctcattcaattctccgcgcgcaggtggcgaagacgtccaggaagccggcgatgccagcgcagcagcaggcggcagaatccttggtgccggcgccgccgcggccggggttcctgtactcagcggcaccgccggcaccagtgccggtgccctatgtctggggctcctggccgcccagcgccgccgccgggagcgag

SEQ ID NO: 21179 - DNA, 837 bp, Zea Mays
cttctcgcctgatcgcctcccgcacgtacctctctatatttgtttctcccatccatgcgaagctccggcatctagctagcaggtcgctcgatcgccatgtccgacgatagcgacggccagcggcaatgccgccggggcgtcaccgtcgacgtcgagctcggcgccgccatggcgcttgccgacatggccggggtcgccggaccgggcggcgaacagccgccgcccgtgcggcgcgctactcccgctccttctgctcaccaggaggacgaggcgagcacgcggctgagcctggagctaggggaggtgagcatccaggcctccccgtgctccagcagctccagctttggcgggcacccgccgccgccgccgtcccaccaggcggcgtaccagcagcccgccgtaccggagccagcgacgactggctacggaccccggccccggcacgcggtcaccgaggccgagaaggaggcgaagcggctgcggcgcgtgctggccaaccgcgagtccgcccgccagaccatcctccgccgccaggccatccgggacgagctcgccaggaaggtcgccgacctgtcgtcgcagaacgagagcatgaagaaggagaaggacgtggtcatggaggagtacctgtcgctcaaggaggcgaacaagcagctcaaagaagaggtggcgaagacgtccaggaagccggcgatgccagcgcagcagcaggcggcagaatccttggtgccggcgccgccgcggccggggttcctgtactcagcggcaccgccggcaccagtgccggtgccctatgtctggggctcctggccgcccagcgccgccgccgggagcgag

SEQ ID NO: 21180 - DNA, 1229 bp, Zea Mays
tatttgtttctcccatccatgcgaagctccggcatctagctagcaggtcgctcgatcgccatgtccgacgatagcgacggccagcggcaatgccgccggggcgtcaccgtcgacgtcgagctcggcgccgccatggcgcttgccgacatggccggggtcgccggaccgggcggcgaacagccgccgcccgtgcggcgcgctactcccgctccttctgctcaccaggaggacgaggcgagcacgcggctgagcctggagctaggggaggtgagcatccaggcctccccgtgctccagcagctccagctttggcgggcacccgccgccgccgccgtcccaccaggcggcgtaccagcagcccgccgtaccggagccagcgacgactggctacggaccccggccccggcacgcggtcaccgaggtatgccgagaaggaggcgaagcggctgcggcgcgtgctggccaaccgcgagtccgcccgccagaccatcctccgccgccaggccatccgggacgagctcgccaggaaggtcgccgacctgtcgtcgcagaacgagagcatgaagaaggagaaggacgtggtcatggaggagtacctgtcgctcaaggaggcgaacaagcagctcaaagaagaggcacatcgctttcctacctttcatgctcgatctatacttgaataaaatctctgcgtaatcctgtacttgactcggcagatgacgtagcatcactcacctggtttactacgattatagtaacgatgttgccattgttaggcagacaacctctctacttgttcccctcaaacgaggacacatgtgcgcatgacttgcactgcactttttcgcctttcctgtttctgcccaccactaccagtgctctactcatgccgtacacctggctcctgctgctagtcgtgttcgaattgcatgttcttgtgcagaggcgtgcgtgaggactgaggacacgtcggtggatttcatcgctttctccgactggtcttggcgccgtcaacacaagctaataacacggacgtgtgctcattcaattctccgcgcgcaggtggcgaagacgtccaggaagccggcgatgccagcgcagcagcaggcggcagaatccttggtgccggcgccgccgcggccggggttcctgtactcagcggcaccgccggcaccagtgccggtgccctatgtctggggctcctggccgcccagcgccgccgccgggagcgag

SEQ ID NO: 21181 - DNA, 1344 bp, Zea Mays
tatttgtttctcccatccatgcgaagctccggcatctagctagcaggtcgctcgatcgccatgtccgacgatagcgacggccagcggcaatgccgccggggcgtcaccgtcgacgtcgagctcggcgccgccatggcgcttgccgacatggccggggtcgccggaccgggcggcgaacagccgccgcccgtgcggcgcgctactcccgctccttctgctcaccaggaggacgaggcgagcacgcggctgagcctggagctaggggaggtgagcatccaggcctccccgtgctccagcagctccagctttggcgggcacccgccgccgccgccgtcccaccaggcggcgtaccagcagcccgccgtaccggagccagcgacgactggctacggaccccggccccggcacgcggtcaccgaggtatgtaagccgagaaggaggcgaagcggctgcggcgcgtgctggccaaccgcgagtccgcccgccagaccatcctccgccgccaggccatccgggacgagctcgccaggaaggtcgccgacctgtcgtcgcagaacgagagcatgaagaaggtaggtaccaccgcaccttgctcggcggcggcggcatctggtgtaatgtcgtcttcacgtacgccgctctttcgatcgagttgcactgatgagccgacggccacggtgcaggagaaggacgtggtcatggaggagtacctgtcgctcaaggaggcgaacaagcagctcaaagaagaggcacatcgctttcctacctttcatgctcgatctatacttgaataaaatctctgcgtaatcctgtacttgactcggcagatgacgtagcatcactcacctggtttactacgattatagtaacgatgttgccattgttaggcagacaacctctctacttgttcccctcaaacgaggacacatgtgcgcatgacttgcactgcactttttcgcctttcctgtttctgcccaccactaccagtgctctactcatgccgtacacctggctcctgctgctagtcgtgttcgaattgcatgttcttgtgcagaggcgtgcgtgaggactgaggacacgtcggtggatttcatcgctttctccgactggtcttggcgccgtcaacacaagctaataacacggacgtgtgctcattcaattctccgcgcgcaggtggcgaagacgtccaggaagccggcgatgccagcgcagcagcaggcggcagaatccttggtgccggcgccgccgcggccggggttcctgtactcagcggcaccgccggcaccagtgccggtgccctatgtctggggctcctggccgcccagcgccgccgccgggagcgag

SEQ ID NO: 21182 - DNA, 2489 bp, Zea Mays
ctcaaatttcttcatatcggtacgacaagttcaattgttcagacaaagcgcgaaggatctgtttcggaccaatgggcctagagcccctagacaggcagtttccatgcctgctccaggcccaggcaaaacagcaccggactgcggctccaccattgccgttcctgtttcttcgaattcttctcccgttcaggcgtccatccctcttttctctcgtggcgacgaagacgaccgacgccgacgctgacgccctacgccaggtgccaggttccgtcgggtccttcgccggcgaagagcatccaccaggcgacccagtgctgttctggtgcggtttcattgcggaagttttgttgtgggattttccggtggcgaagatgatccgactacccatgtacgcggcgttcagcctgctggcgacggcttcggcggcgtactacgcgttcagcagccgggagcagttctacccggcgatggtgtacctctccacctccaagatctgcttcgtgctgctcctcaacacgggcctggttgccatgtgcgtcgcctggcagctcgccaggcgtctcttcctcggctccctccgggaggccgaggtcgagcgcctcaacgagcagtcctggcgggaggtcatcgagattctcttcgccgtcaccatcttccggcaggacttctcggtgtccttccttgccatggtcgctgcactgcttcttgttaaggcactgcactggctcgcgcagaagagggtcgagtacatcgagaccacaccctccgtgcccttgctctcgcacatcaggattgtatccttcatggttttcctgctcacggtcgattgcctcttcctgtcaaactcactcaggtcactcatacagaagcgggaggcgtctgttgccatcttcttctcctttgaatatacgatactagcaacatccactttatcaacatttgtgaagtacatattctatgtcagtgacatgctaatggaaggtcaatgggagagaaaggcagtttatacattttacttggagctcatcagtgaccttgtgcacttgtcattatacatgctcttcttcatagctatcttcttgaactatggtgtcccgctgcacttgattcgtgagctatatgagaccttccgcagcttcagaattcgcattgcagattacatacgttacagaaagatcacttccaacatgaatgaacgctttccagaagctacatcagaagagctcgatgcgagtgatgctacatgtattatttgccgtgaggagatgactacagcaaagaaactgctctgtgggcatctgttccatgtgcattgtctgaggtcatggctagagcgccaacacacttgccccacgtgcagagctccaatcgttcctgcagataatggacgtgctgcatcatcacgacaacatggagcccaggctggggttcaacctgctgcaggtactgccactccatcctcagaaggagcaccaggtgagaacatgagcaggcgccaagcaaaacttgaagctgctgctgcagcagcttctttatatggaagatcttttgtttatcctccagcaaacaccctaaacagcaggtctggttctccccagcctacatcaagtgcaccacaatctgaagccagtagctccaatcatcagtcacaaaaagaccaagaaacacagctccaaaacagcagcgatggtttagtgcctctgccttttagtgcagatggtgttgttggttcaggaacaagcacaagagatcttgaaaattcactgcagaaggcacaagaaaactttattaagagccagattgagatgttacaaatccaactgcaaatggtgcagcgtggcgctgctgggttgagcagtagcgagaacactgagcacacagaagactgactgaatctgtaaacaggcactcctgcatcgtggagtaataatgagaatactgagcacacgcagctgaatctgtaaataggcggagatgaggatggggataaaagaaagcaatcaaagaattggctatacctgggggaaactgatgttttgcctggattttggtaggcttgttgactatgctttcctgttactgtgttagtgccttcttgccagcgttagatgtttctctacgtgtggtggtttctgtaggttgggtacatctaattgctagtttaattatacgattacacaaaattcttgtaccgagggaaaatagaaaggataattgtacaaatgacttttttgtgtgcatatccatgatatcgggattgtctgtagattttgtgtttactggagtaaaacagaaaatttggctgctgattggatgttgaacagagtggatctggcatgcctaatactgcagctaaccgagcgattgctgaaacataagactacaagttggttgccgtggcgttggctcgccggccgaatcgaccacgagactcatgacgagtgtgccgcagcccgcagggcagaggcgcagagccggctaggtccttg

SEQ ID NO: 21183 - DNA, 2043 bp, Zea Mays
ggaccaatgggcctagagcccctagacaggcagtttccatgcctgctccaggcccaggcaaaacagcaccggactgcggctccaccattgccgttcctgtttcttcgaattcttctcccgttcaggcgtccatccctcttttctctcgtggcgacgaagacgaccgacgccgacgctgacgccctacgccaggtgccaggttccgtcgggtccttcgccggcgaagagcatccaccaggcgacccagtgctgttctggtgcggtttcattgcggaagttttgttgtgggattttccggtggcgaagatgatccgactacccatgtacgcggcgttcagcctgctggcgacggcttcggcggcgtactacgcgttcagcagccgggagcagttctacccggcgatggtgtcactcatacagaagcgggaggcgtctgttgccatcttcttctcctttgaatatacgatactagcaacatccactttatcaacatttgtgaagtacatattctatgtcagtgacatgctaatggaaggtcaatgggagagaaaggcagtttatacattttacttggagctcatcagtgaccttgtgcacttgtcattatacatgctcttcttcatagctatcttcttgaactatggtgtcccgctgcacttgattcgtgagctatatgagaccttccgcagcttcagaattcgcattgcagattacatacgttacagaaagatcacttccaacatgaatgaacgctttccagaagctacatcagaagagctcgatgcgagtgatgctacatgtattatttgccgtgaggagatgactacagcaaagaaactgctctgtgggcatctgttccatgtgcattgtctgaggtcatggctagagcgccaacacacttgccccacgtgcagagctccaatcgttcctgcagataatggacgtgctgcatcatcacgacaacatggagcccaggctggggttcaacctgctgcaggtactgccactccatcctcagaaggagcaccaggtgagaacatgagcaggcgccaagcaaaacttgaagctgctgctgcagcagcttctttatatggaagatcttttgtttatcctccagcaaacaccctaaacagcaggtctggttctccccagcctacatcaagtgcaccacaatctgaagccagtagctccaatcatcagtcacaaaaagaccaagaaacacagctccaaaacagcagcgatggtttagtgcctctgccttttagtgcagatggtgttgttggttcaggaacaagcacaagagatcttgaaaattcactgcagaaggcacaagaaaactttattaagagccagattgagatgttacaaatccaactgcaaatggtgcagcgtggcgctgctgggttgagcagtagcgagaacactgagcacacagaagactgactgaatctgtaaacaggcactcctgcatcgtggagtaataatgagaatactgagcacacgcagctgaatctgtaaataggcggagatgaggatggggataaaagaaagcaatcaaagaattggctatacctgggggaaactgatgttttgcctggattttggtaggcttgttgactatgctttcctgttactgtgttagtgccttcttgccagcgttagatgtttctctacgtgtggtggtttctgtaggttgggtacatctaattgctagtttaattatacgattacacaaaattcttgtaccgagggaaaatagaaaggataattgtacaaatgacttttttgtgtgcatatccatgatatcgggattgtctgtagattttgtgtttactggagtaaaacagaaaatttggctgctgattggatgttgaacagagtggatctggcatgcctaatactgcagctaaccgagcgattgctgaaacataagactacaagttggttgccgtggcgttggctcgccggccgaatcgaccacgagactcatgacgagtgtgccgcagcccgcagggcagaggcgcagagccggctaggtccttg

SEQ ID NO: 21184 - DNA, 2115 bp, Zea Mays
ggaccaatgggcctagagcccctagacaggcagtttccatgcctgctccaggcccaggcaaaacagcaccggactgcggctccaccattgccgttcctgtttcttcgaattcttctcccgttcaggcgtccatccctcttttctctcgtggcgacgaagacgaccgacgccgacgctgacgccctacgccaggtgccaggttccgtcgggtccttcgccggcgaagagcatccaccaggcgacccagtgctgttctggtgcggtttcattgcggaagttttgttgtgggattttccggtggcgaagatgatccgactacccatgtacgcggcgttcagcctgctggcgacggcttcggcggcgtactacgcgttcagcagccgggagcagttctacccggcgatggtcactcatacagaagcgggaggcgtctgttgccatcttcttctcctttgaatatacgatactagcaacatccactttatcaacatttgtgaagtacatattctatgtcagtgacatgctaatggaaggtcaatgggagagaaaggcagtttatacattttacttggagctcatcagtgaccttgtgcacttgtcattatacatgctcttcttcatagctatcttcttgaactatggtgtcccgctgcacttgattcgtgagctatatgagaccttccgcagcttcagaattcgcattgcagattacatacgttacagaaagatcacttccaacatgaatgaacgctttccagaagctacatcagaagagctcgatgcgttagttttatattttaatttttggtgattcagttgactcaactataaaaatagtgtcatttaaattttattgtattcaggagtgatgctacatgtattatttgccgtgaggagatgactacagcaaagaaactgctctgtgggcatctgttccatgtgcattgtctgaggtcatggctagagcgccaacacacttgccccacgtgcagagctccaatcgttcctgcagataatggacgtgctgcatcatcacgacaacatggagcccaggctggggttcaacctggtactgccactccatcctcagaaggagcaccaggtgagaacatgagcaggcgccaagcaaaacttgaagctgctgctgcagcagcttctttatatggaagatcttttgtttatcctccagcaaacaccctaaacagcaggtctggttctccccagcctacatcaagtgcaccacaatctgaagccagtagctccaatcatcagtcacaaaaagaccaagaaacacagctccaaaacagcagcgatggtttagtgcctctgccttttagtgcagatggtgttgttggttcaggaacaagcacaagagatcttgaaaattcactgcagaaggcacaagaaaactttattaagagccagattgagatgttacaaatccaactgcaaatggtgcagcgtggcgctgctgggttgagcagtagcgagaacactgagcacacagaagactgactgaatctgtaaacaggcactcctgcatcgtggagtaataatgagaatactgagcacacgcagctgaatctgtaaataggcggagatgaggatggggataaaagaaagcaatcaaagaattggctatacctgggggaaactgatgttttgcctggattttggtaggcttgttgactatgctttcctgttactgtgttagtgccttcttgccagcgttagatgtttctctacgtgtggtggtttctgtaggttgggtacatctaattgctagtttaattatacgattacacaaaattcttgtaccgagggaaaatagaaaggataattgtacaaatgacttttttgtgtgcatatccatgatatcgggattgtctgtagattttgtgtttactggagtaaaacagaaaatttggctgctgattggatgttgaacagagtggatctggcatgcctaatactgcagctaaccgagcgattgctgaaacataagactacaagttggttgccgtggcgttggctcgccggccgaatcgaccacgagactcatgacgagtgtgccgcagcccgcagggcagaggcgcagagccggctaggtccttg

SEQ ID NO: 21185 - DNA, 2246 bp, Zea Mays
cgaaacggagcttccaaaccctaacttaagctatttggctatgagtatccggatctgagtgtacatgcgacccagtgctgttctggtgcggtttcattgcggaagttttgttgtgggattttccggtggcgaagatgatccgactacccatgtacgcggcgttcagcctgctggcgacggcttcggcggcgtactacgcgttcagcagccgggagcagttctacccggcgatggtgtacctctccacctccaagatctgcttcgtgctgctcctcaacacgggcctggttgccatgtgcgtcgcctggcagctcgccaggcgtctcttcctcggctccctccgggaggccgaggtcgagcgcctcaacgagcagtcctggcgggaggtcatcgagattctcttcgccgtcaccatcttccggcaggacttctcggtgtccttccttgccatggtcgctgcactgcttcttgttaaggcactgcactggctcgcgcagaagagggtcgagtacatcgagaccacaccctccgtgcccttgctctcgcacatcaggattgtatccttcatggttttcctgctcacggtcgattgcctcttcctgtcaaactcactcaggtcactcatacagaagcgggaggcgtctgttgccatcttcttctcctttgaatatacgatactagcaacatccactttatcaacatttgtgaagtacatattctatgtcagtgacatgctaatggaaggtcaatgggagagaaaggcagtttatacattttacttggagctcatcagtgaccttgtgcacttgtcattatacatgctcttcttcatagctatcttcttgaactatggtgtcccgctgcacttgattcgtgagctatatgagaccttccgcagcttcagaattcgcattgcagattacatacgttacagaaagatcacttccaacatgaatgaacgctttccagaagctacatcagaagagctcgatgcgagtgatgctacatgtattatttgccgtgaggagatgactacagcaaagaaactgctctgtgggcatctgttccatgtgcattgtctgaggtcatggctagagcgccaacacacttgccccacgtgcagagctccaatcgttcctgcagataatggacgtgctgcatcatcacgacaacatggagcccaggctggggttcaacctggtactgccactccatcctcagaaggagcaccaggtgagaacatgagcaggcgccaagcaaaacttgaagctgctgctgcagcagcttctttatatggaagatcttttgtttatcctccagcaaacaccctaaacagcaggtctggttctccccagcctacatcaagtgcaccacaatctgaagccagtagctccaatcatcagtcacaaaaagaccaagaaacacagctccaaaacagcagcgatggtttagtgcctctgccttttagtgcagatggtgttgttggttcaggaacaagcacaagagatcttgaaaattcactgcagaaggcacaagaaaactttattaagagccagattgagatgttacaaatccaactgcaaatggtgcagcgtggcgctgctgggttgagcagtagcgagaacactgagcacacagaagactgactgaatctgtaaacaggcactcctgcatcgtggagtaataatgagaatactgagcacacgcagctgaatctgtaaataggcggagatgaggatggggataaaagaaagcaatcaaagaattggctatacctgggggaaactgatgttttgcctggattttggtaggcttgttgactatgctttcctgttactgtgttagtgccttcttgccagcgttagatgtttctctacgtgtggtggtttctgtaggttgggtacatctaattgctagtttaattatacgattacacaaaattcttgtaccgagggaaaatagaaaggataattgtacaaatgacttttttgtgtgcatatccatgatatcgggattgtctgtagattttgtgtttactggagtaaaacagaaaatttggctgctgattggatgttgaacagagtggatctggcatgcctaatactgcagctaaccgagcgattgctgaaacataagactacaagttggttgccgtggcgttggctcgccggccgaatcgaccacgagactcatgacgagtgtgccgcagcccgcagggcagaggcgcagagccggctaggtccttg

SEQ ID NO: 21186 - DNA, 1601 bp, Zea Mays
gcaaggcgtatggcttgcaggttggatatacgatactagcaacatccactttatcaacatttgtgaagtacatattctatgtcagtgacatgctaatggaaggtcaatgggagagaaaggcagtttatacattttacttggagctcatcagtgaccttgtgcacttgtcattatacatgctcttcttcatagctatcttcttgaactatggtgtcccgctgcacttgattcgtgagctatatgagaccttccgcagcttcagaattcgcattgcagattacatacgttacagaaagatcacttccaacatgaatgaacgctttccagaagctacatcagaagagctcgatgcgagtgatgctacatgtattatttgccgtgaggagatgactacagcaaagaaactgctctgtgggcatctgttccatgtgcattgtctgaggtcatggctagagcgccaacacacttgccccacgtgcagagctccaatcgttcctgcagataatggacgtgctgcatcatcacgacaacatggagcccaggctggggttcaacctggtactgccactccatcctcagaaggagcaccaggtgagaacatgagcaggcgccaagcaaaacttgaagctgctgctgcagcagcttctttatatggaagatcttttgtttatcctccagcaaacaccctaaacaggtctggttctccccagcctacatcaagtgcaccacaatctgaagccagtagctccaatcatcagtcacaaaaagaccaagaaacacagctccaaaacagcagcgatggtttagtgcctctgccttttagtgcagatggtgttgttggttcaggaacaagcacaagagatcttgaaaattcactgcagaaggcacaagaaaactttattaagagccagattgagatgttacaaatccaactgcaaatggtgcagcgtggcgctgctgggttgagcagtagcgagaacactgagcacacagaagactgactgaatctgtaaacaggcactcctgcatcgtggagtaataatgagaatactgagcacacgcagctgaatctgtaaataggcggagatgaggatggggataaaagaaagcaatcaaagaattggctatacctgggggaaactgatgttttgcctggattttggtaggcttgttgactatgctttcctgttactgtgttagtgccttcttgccagcgttagatgtttctctacgtgtggtggtttctgtaggttgggtacatctaattgctagtttaattatacgattacacaaaattcttgtaccgagggaaaatagaaaggataattgtacaaatgacttttttgtgtgcatatccatgatatcgggattgtctgtagattttgtgtttactggagtaaaacagaaaatttggctgctgattggatgttgaacagagtggatctggcatgcctaatactgcagctaaccgagcgattgctgaaacataagactacaagttggttgccgtggcgttggctcgccggccgaatcgaccacgagactcatgacgagtgtgccgcagcccgcagggcagaggcgcagagccggctaggtccttg

SEQ ID NO: 21187 - DNA, 610 bp, Zea Mays
caaacacttgcagcggaaataaactctttattgcaaaatgattacaagtttatcaagattttattatacctcatcggagtgattacaaaagaaagtgtttcaaaagaattacactttaaaatgttatagaatatttgtaaatttgaaatacatgctagcttaagtgacaatcctcgttaaagaaactataggagggatatacttatataagaaggccgagcccaccggcacttagcaccatccacaacagaacaaaattacaacctgaaaaacaacagggaataaaaccctgagtacgcaattactcaacaagacttacccgactaaagaaaagactctcaagggtatgctggtttgtcgggaatcaaggtaaagcttatcaaatttcaaagactcatttttgcagaaaagcttactagtagtggatccttatgccaaaattttacatcacaagttaagtacttttcctagatttgcctaatctagagcattcacttgtcctatactaactttcttttaaatcaaaagtttgtttcgctagttatctacgatgaagggcagcgatccagtcttcatatccgagaagtaacggcgattcgaatcgattaat

SEQ ID NO: 21188 - DNA, 1092 bp, Zea Mays
ggcgaccttttctgctcaacgtctggtcccattttaaactatttcaaaaatttggcgcctaacagaggggccatgcctggataatgaatttatcaacgtcttgatgccttcattatcccaagcccattttcttttttgtaaaaacatgagtcatatatcaaaaatatgtttcttaatctatcagcaagactaagcatctctagcttttataaaacgggtgacaaggtgtggtaatcaacctttcaaggatggtaatgcatcaagtgtttaatcactcaactcctatcacctaatgcagcatataagtgataaaattttgtaaacacaaggaaggtgacaaatgcaccggggcttgcctgggataacactatgttagtgttgttagatgatggccacttgacgatcaacttttattctgacacccgcttagtccatctagcttcaggatcatcggccgacatcgtcttgtgggttgttttgatccacacccctcgcttcgcacgattttcagctagcgtacctgcacggcgaacgtgtctggtgtgagcacacgagccgaaactggaagacgaaggcggggtaaatcagtggagcggttcgagctagaagatgttgtgctggcgatgcttcaccgacgaggagacttggagcagggcgcacggttctagtgtgtgcacggctggaggcgaggtcgaagtcgaggacgcacagcccgacgaggaacagggaggggcgatggcgagctggagcgcaggggcgagctcacatctggggaggtgaggagggcggctggagattgaggaagatagaggctgggcggctagtgctccatgggaaggaaaacagagaccgaggagatgacgcccagggcactggataaggccatcaacctgttcagcggcgtggagaggagaagaatgaattttcttcatttttttgttaataaaatataattatatctctggtttctagaattaggatttttgcgatgtgtgaacaggccggaccaaaattatatgggtgattgtatttagacaacgcttgctgaagtttgaaattggacaaaaatgtatctgcgggaacatatttaat

SEQ ID NO: 21189 - DNA, 1302 bp, Zea Mays
ccgcgctacccgggagcacattaccctaccatccagcctcttgccaggagggtaactgctactcccaccatctcccacgtccagtgcgctgttgtcttttcacgtatggaatagtcgggttcaggcttacccatgacgatgtatgtggccagttaaaatgtcctagatcatcaggccaacaatcggtacggtccttaatcgacacagacggacgacctttcctgctcaacgtctgatcccattttaaactatttcaaaaatttggcgcctgacagaggggccatgcctggataatgaatttatcaacgtcttgatgccttcattatcccaagctcattttcttttttgtaaaaacatgagtcatatatcaaaaatatgtttcttaatatatcagcaagactaagcatctctagcttttataaaacgggtgacaaggtgtggtaatcaacctttcaaggatggtaatgcatcaaatgtttaatcactcaactcctatcacctaatgcagcatataagtgataaaattttgtaaacacaaggaaggtgacaaatgcaccggggcttgcctgagataacactatgttagtgttgttagatgatggccacttgacgatcaacttttattctgacacccgcttagtccatctagcttcaggatcatcggccgacatcgtcttgtgggttgttttgatccacacccctcgcttcgcacgattttcagctagcgtacctgcacggcgaacgtgtctggtgtgagcacacgagccgaaactggaagacgaaggcggggtaaatcagtggagcggttcgagctagaagatgttgtgctggcgatgcttcaccgacgaggagacttggagcagggcgcacggttctagtgtgtgcacggctggaggcgaggtcgaagtcgaggacgcacagcccgacgaggaacagggaggggcgatggcgagctggagcgcaggggcgagctcacatctggggaggtgaggagggcggctggagattgaggaagatagaggctgggcggctagtgctccatgggaaggaaaacagagaccgaggagatgacgcccagggcactggataaggccatcaacctgttcagcggcgtggagaggagaagaatgaattttcttcatttttttgttaataaaatataattatatctctggtttctagaattaggatttttgcgatgtgtgaacaggccggaccaaaattatatgggtgattgtatttagacaacgcttgctgaagtttgaaattggacaaaaatgtatctgcgggaacatatttaat

SEQ ID NO: 21190 - DNA, 2472 bp, Zea Mays
cgacttctttcgtcgtcgtcgttcgtaccgcagtccgcagttcctcccgcgaatgcgataccctgctccccgttccttcaattattccctcggctcgcgtgctaatccacggattaaactcccacctgctctccaaaaccttgacacaccgcacgagcgccgggcgaagagccattctcgcccgccctcgcgtccgcctccgcggacgaactgccggctcggtccaagtttagcgccccaaccccagaggaatggaggtggaggcggcggggccggataggccggagcctccctcgccggcgaaggggactggcgagaatggcgcggccaccacgctgcagaaggtgtaccgcagctaccggacccggcggaagctggccgactccgccgtcgtcgtcgaggagctctggtggcaggcgctggactacgtgcgcctggagcacagcaccgtctccttcttcgacgagcccaagccggagacagccgcctcgcgctggaaccgcgtcagcctcaacgcgtccaaggtgggccagggtttatccagagacggcaaggccctcaagctggctttccagcactggatcgaagcgatcgacccgcggcatagatatgggcacaacctgcacttctactacgacgagtggtgccaaagccaagcaggccagccattcttctattggcttgatgttggagaggggaaggacctagaccttcctgaatgtccaagagctttactgaagatgcaatgtatcagcaagagcgcgagcactatgaatacatcattaaggagggaaaagttatccataaacagtctggagaaccgcttgatacaaggggtcctaaggggactaaatggatatttgttatgagtacagcaaaaaagatttatgctggacagaaacagagaggcgtattccagcactccagctttttggcaggaggtgcaactatagctgctgggagatttactgcagaaaatggagtgatcaagtccatctgggcatacagcggccactacaaacctagtgcagagaacctcctcaacttcatgaacttccttgaagggaatggagtcgatctcaaagaagtcgaggtacgctcatcgaccagagaagactacaacgaagatccagtgcctaatgactcgcagaagttcgcttcagctaccatggaaccaacaaatcttccacagctggtcccccctctaaacaccacgcaaggcaatgaaggcgacaatgctcctaagatcaagctaggccaacctaccaaaggaccttgtcgggcggtctgcagagccccagagccaccgaagtcccccagaaggcgattcttgagaggatgaagtccaagagcgggtctaagtcctaccagctcgggcacaggttgtcccttaaatggagcacgggggctggtccgaggattgggtgtgtcaaggactacccaatggagctcaggatgcaggctctggagatggtggatctttcgccaagggcgtcaactccgtcggcgtcgaggcgactgcctccgtgcttgtctcccactgaaatcgccttgccaacatcactgctcgccctgatctaggcctccctgcctcagccaagtgaacttcgagtagcttatgccacgcaaagagcacacaaccatgcggctgtccggttactgctattctgcaataccatctttcagcactgcaaagatcacatacctggtctgttgtcctttcttcttgtcccctgtcctgtggttccacagagagtagcacaatgcaatgctctccagctgaaataggctatgggcaagctgattctgtcacatttcagacatggtagctttgaagcagatggtgatggtatgtttttgttaccgtggtttaagtaacctgcttttcattctgttgagcaccattttgagcctagcggacggtccggccctgaggccggacggtccgcggtccggacagtccgcgcctgtgggtcggacggtccgcgcatgcgcagagcagtttagggttccgagttttgtgctatgtttgttggctagatttgcggaattagctcggaatccagtcgtgtaaagggtccagcccccctcctctataaaaagagaggtctacggctgatttgtaatcatcaatcgaatcaatacaacttctatttcgcattttatcctaggagtagttctagtctagtttaggtttagcttctcgatccccaaattctccgcctctcttcgactctacgtcgattagaggagtctaggttggcctgctcgagcctagacaactcctaggatctctcctccccgacggggtccctcccgggagcgagatccaggcgccgccggcgatcttccgccgcccctacgcacgcgcggaccgtccggccgtcaggtagggaacccgagctcctgcaccaggtcgtggaccgtccgaccctgtgccgcggaccgtccgcgcttgaccagagagcgccg

SEQ ID NO: 21191 - DNA, 1038 bp, Zea Mays
cttttcgctagtgcgctcgtcgcgttgccgaccgctcgccccgccctgaaacgagggagctcggcgacggcaactagggggggcacggcagcgaggcgcgcacgcaggccacagaaacgggcggcgcggacgcaaagcgaaggcatcagcatccgaggtgcgtcatttgtctcgaagaatacgaagagagggacgtgctacgcgtcctccctcactgcggccatgacttccacatggcatgtatacatgtatggctggagcagaactcgacctgccccgtctgtagaatctcgttgctcgataatcccaacagcgagcacaatgcccctccgccgccgccgccgccgctacccggtgtagcagtgacgatgagctctccaggctctcctgagccgccaggctccgacccgtgccgctgcctgttcgccggtgccgggcactcgtcgagggcgtcatcagaggctcctcctaggcacgagcccgaccaggagaatcaggtggcgtctgggccatcggtggacgggggtgctaacagtaacggcatgccgctgtccgaagttaaccccactccacccgagagcaacagccagacagtgaggaagcagcagccagggccctgcaaatagcagctgcctggagtcggcgaggcgagatcgctgttctgcagcggtctgctgcaggacgagcaaacacctgtacagtggcagatggctgtctggctgctgtaggttggggtttgatgagggtatggtgtaaatatgagaaatcattcagatttgttgttggaaaccaaacacacttcatctgttcagttcagtattgatgctgaaaacagcaaccccccgtggtatgcggatacgggataccacagagagattcaaccatcggtgaattcgccaaaaggctagtaactattcatgtcattaactgttgtcatcagcaaatatgatgatcttgactggttccatttcgaaactaacaggattttctgcaacagaaatcaaaatgagcattttttatagggagtgggtaatttag

SEQ ID NO: 21192 - DNA, 6518 bp, Zea Mays
cagtgcttgtgcttctcctccctcccacccatccacccatcatcatctcgacctcttcccccaactcctcgccgccgccacttgccggtagggtttgcgagcccatcccgctccaatcgcccgccgccgccgcgagatcggcggctcccatcccagattcgttcccgcccacgccagcgcgccgcatccgatacccgtcccgttggcccgcgactcgcgaacgaggatgcctcagtagggcgcgcgcgtgtcgagctagggttgtcgcgtccgaggccatggacaccgccgcgggcccggggccccgggacggccccgatcggacgccgcaggggcccggcgcctcccccgaggaggccgccgctgatggcgtgaagacggacatcgcaggtggggcggaagcgcttgcagcggcaggcgcggccggtgaggccgatccgggtggaggcgccgctgcggcggggcgtgggggtgacgcggaggcctcggcgagcgagcccacggcggaggaggttaacgaaggctgcggcggcgccgctgctgctgcgggcggagatcgccccgccgcgcccgaggcggatgcggacggcggcgcgggcaaagggcggtctgctgtgcacgcggtgagtgaggtggagcagggccaaggcattgcgggggcagcgcaggatgtggatcccgcggtgtttgaggtgaagaagatggacgtgagcgagggtggcgacgcaagcaagcagaatcagcactctccgtcttgtacggccagcgaggtggatgtggggatcgttcctgtggcagtgcgagatttggatcctgtggggtctgaagtgatgatggaggtggacgacggccatgtcagggaacaagagcgcgcgggagtggctgtggcgggcagcgagtttaagatggaggaagctgatggaagagtggtgcatcaagggtctgctgccacatctgctgggggccttcaggcgcgagccgaggaagtgggagagtgcttggtcggccgttacattggccgcaacgcgccaatgcaagcggggatccttattgggaaggttgcatcctatgatagcacagctggcatctacagcgtggtgtttgaggatggacataatgaggatttggagcttcctgagctccacgagttcctcatgcccgacaagaatggcacgttaggcatgagtgtgaactgcaggaagaggaagctgggcctgctggttttgtcggggagtgtctcggaggtgaaagagccagcaagtactagacagagggttgacggatgcgagatgcctgccaacactgatgcactgcggtatagtgggtctggctcggatatgtccgaggatatcgaatcttcgagtaattcatccgatttcactaaagaagaaccatctgagccgtgtcctcctgtacaggctgtggagttgcccccgtcatcgggagacattcatgtgccagaagattccataagctatctcttttctgtttataacttcctgagatccttcagtgtgcagctgttcctgagtccgtttggtctggatgattttgttgcagccattaattgcactgttcagaataacttgttggatgccgtacatgtctcgctattgcgtgcactgaggcggtatcttgaatctaaatctgctcaaggatctcagatggcttcaaattgcttgaagtatttggattggacattactagatgcattgacttggccaactttcttactagagtacctgtatgtgatggggtgcattaagaacctaggggggcagagttttgctagaagccttctagccgctgaatactataaactttctgttgccacgaagttgagggtgctgcaaatactctgtgatcatgtccttgaatcacaagaatacaaaactatactggaagatcgagtaggctacaatgaggagatggaatatgagatagattctagcacctttttggaggctggttccagagcagtcttgactagagcctcaaaggcctcagcttacaaaatgctgaatgatttacagaactttgaaagtggtccaaatgtaacaaattcagatgttgctgtagcagatgtttctcaggacggtaatagtgatgattgccgaatatgtggaatggatgggactttggtatgctgtgatggctgcccatgggcatatcattcgagatgtatcggtcaaaataaagctttccttccccagggggactggttctgtccagaatgtgttgtcaacaagcttggaccaacttcatcaagaattgaacgtggtgcaagaggagctcaaatgtttggcattgatatgcacgggaggctattcttaggaacctgcaactatttactggtgatcgaaatatcttcagatgtagagtcttatgcaagatattacaatcattatgatgttgtcaaggtactccagagacttgcactctcagatgcatatgtggatatatgcaggcaaataatggaatactggaaacatttactcggtagagttcagagtgagagatcaacaatattgaaagaagttggtacaagacatactccacaatccagcatgttgagttttactccaacaatgtcaggagatggaagtggctggacaactttaaaagatggtggggacagtaaaacagtagcacttcctcaaacaaatgtgcaacagaaaattttcgctaatcagtatacagtgtgctctgctgaacaaacggagaagaatgttgatgtttgcaagcaagctctgtcagctcagaacaacatacataatgcacctagaaatggagcttctggaccatttgtggcatcccccgtttctcatcagaatggatccattggaacgggtatgtctaacatagcacaagcacagccagctcatagtatatatcgtccagacttatccactgtttctgcaaagtcagaatcatttcgttcatctttgcaaggtaaacttcaccttcagatgtgtactgaaagacctggaaacatgagttgtggcaaggcagcaaagttgtcttcttttaaaccacaagcttacatgaacctctacaatcatggcaacattgcagcatctgctgccgccaatctagctattattgcatccagtgaaggtaaggtttccacatcccaactgtccgcaaaaccaaagaagaaggtggctgcagacaatgctctacagttgaaagcattttcctcagcagtcgcacaatttgtttggccgagtactgaaaagaagcttatggaagttccaagagatagatgtggttggtgccttgcttgcagaagttcagcaagtggaaacaaaaaggcttgttttcttaacatgaccacatcaaacgctgctaaaagttctgctcgagttcttagcacaatgcgcgtaataaagatttctgacagccatttccccagtattgctgcttatttagccaacatggaggaaagtttgcgtggcctgttggttggttcactacaagacatgcagcagagagaacggtggcgtgaacaacttgaagaagcttccaactgcagaactgtaatacccctcttgcttgagttggaaagcaacatccgtggagtagcattttctgcaagctggttcaagccgatagacgattggcctgcggaatctccttgtccatcaacaggggcatctcgtcctgcacaacaccaaaaacgtggggctggcggaaggcgtggcagaagacgtttgttggtgtctgaacccggtactgttactgatgatgacaacagctggacttggtggaccggaggaaatataataaaacgtactttgcagaggggggctcttctacattcaaccataagaaaagctgctcgccaaggttagatatcttgatgctcacatcagatggaaggagtttatctctccagatcaaattccttcagatggaaaaagttctgacgctgacttttctgcactcagaaatgctgtactctgtgataaaaaaataatcgacaataagataagatacgcactgaagtttcccaaccaaaagcatcttcctgtccgtctgacaaaaaatatcttggaagcagaaagtgatcaggatgaaattagaaaaatgtggttttctgaaaaccacgtgccattgtacatgttacgagaatttgagcagcatgctgaggctagctccttgcctactccaggaattccggaatgttttaccaatttatacccaaggcgagtgaaagcacctgacagagatgttttttcatatctctttcacaagggagaagtctatccctgcgcgtcatgcaagaagggtgttctctacagggatattgttaaatgcagctcttgtcaaggtaattgtcataaagagtgtacatcaagatctgttgttagcaaaggaggcagtactacttccagtttgatatgcaagttatgtctccagaagcgaaatcttatgctcactagttacaatacaaatgcaagttatatccagcatctacagaagaataatggccaacagccagtgaccgctcccagaaatgtctctaaggttagttcttcccattctgctgagcctgcccccaaagtggaagccgagccagtcacaaaggttaaggcacaacgagttggaaatgtggaagctacaacccagccagttctaaatgtgaaagcccagccacccgccaaagtggtaactcagaacatcactagtgtccaaaagacaaaagctaaaaagtcaaagtccgaaaaaccaacgaaggctaaaaaagttcaagcgatcacatatttcggtctcatatggaagaaaaataagaacgacaaggatgatggaagcgagttcagggcgaatgatgtaatccttaaaagcaaggatggtataggttcgtcaataaaaccaaaatgttgtctatgtgacaaagcatattctccggaattcctgtatgtacgctgtgagaggtgcaaaaattggtttcatggtgattccttgcaacttgaagaagataggattggtgagttggttggataccgatgctgtaggtgccggaggagggccatccccccgtgtcctcattcagataattatgtaaagcctgaacccgaatttagtgagcaaacagttgcaacatcatcggtgtcaactatgctatccagtgggaagacttctgcttcagcagatcaggacccactgcttgcttcgtatggaatagttgaaccaatcggggaagagacaggggatgttgatttatcagcgaacacggcaagcattgccccgggaagtagccagaagctgtctataagaagagcactagctaaaacttctggataccttgaccaagctggtaaatctgtgaatgagtattatgtccagaaccagaatacacctccaggcaatggaaacatcaatttcagccacacgaatgagatttccttttcggaggctgacagcgtgggcgcttcaggactactggggtgggatttttcgagaggaaccgcgtatgctgccccacctggtttcacttctaatcgccagcagaaccgcactagccgtggcagctttgtgccggacgagtgtgagcgtgagccccagacttatttctcgttcactgagctgcttgaggctgacgacgcacagcttgatgacaacgcgtttgggatagctactggtctgcaaggtgatgctaacggctccggaagctttgtccaacgaggagttggttttggtggtacgtctttcatggcagaagatggagcttcgaatatgaacgtgccaacaaatggtcccacgcctgaagaggtagcgtgccacaacggcacgaacactcagccgccacctgatcccagatgttctgtccgtgacctccgcacacaccggtagtgctctccctgggaaccgaggcgtgtagagcctgtcgagagcggcaactggagttgtggtggttgccgcgaatggtgatgatgagcctctaaacttcactgccagttgcaatggcaggtaaatccaacggcatcccatatacttaccggatttctcgttaccggtcgctgggttgctgctgtcatgatgtgctactgatttctcggatcatttcattatttgatctaatcttaaccatcatacagttagagtagcgattaccgcttggggtttacactgtacatactgaaaggatgggtcgacgacgacgtaccatttccattctttaggctatttatttttttggggtgggagttttagagctaggatgctgctagcacatagcaacatggtatatgggtcgtctggaaaaaaaaaaccatattattatgtaactgtattaaccttggttgtctcttctcgccttctgagatacaagtgtctcttggtcagagtgggtggccgtttctatgcctatgcagctatgctccagtattgtcgcatttgcctaggtaaaataactaattacatggcatgcgatttatgttccattcttcctttagatgaattactctctccagccatcaacacaagcgaactttttggatgccgtttaatctgtg

SEQ ID NO: 21193 - DNA, 6314 bp, Zea Mays
gcttgtgcttctcctccctcccacccatccacccatcatcatctcgacctcttcccccaactcctcgccgccgccacttgccggtagggtttgcgagcccatcccgctccaatcgcccgccgccgccgcgagatcggcggctcccatcccagattcgttcccgcccacgccagcgcgccgcatccgatacccgtcccgttggcccgcgactcgcgaacgaggatgcctcagtagggcgcgcgcgtgtcgagctagggttgtcgcgtccgaggccatggacaccgccgcgggcccggggccccgggacggccccgatcggacgccgcaggggcccggcgcctcccccgaggaggccgccgctgatggcgtgaagacggacatcgcaggtggggcggaagcgcttgcagcggcaggcgcggccggtgaggccgatccgggtggaggcgccgctgcggcggggcgtgggggtgacgcggaggcctcggcgagcgagcccacggcggaggaggttaacgaaggctgcggcggcgccgctgctgctgcgggcggagatcgccccgccgcgcccgaggcggatgcggacggcggcgcgggcaaagggcggtctgctgtgcacgcggtgagtgaggtggagcagggccaaggcattgcgggggcagcgcaggatgtggatcccgcggtgtttgaggtgaagaagatggacgtgagcgagggtggcgacgcaagcaagcagaatcagcactctccgtcttgtacggccagcgaggtggatgtggggatcgttcctgtggcagtgcgagatttggatcctgtggggtctgaagtgatgatggaggtggacgacggccatgtcagggaacaagagcgcgcgggagtggctgtggcgggcagcgagtttaagatggaggaagctgatggaagagtggtgcatcaagggtctgctgccacatctgctgggggccttcaggcgcgagccgaggaagtgggagagtgcttggtcggccgttacattggccgcaacgcgccaatgcaagcggggatccttattgggaaggttgcatcctatgatagcacagctggcatctacagcgtggtgtttgaggatggacataatgaggatttggagcttcctgagctccacgagttcctcatgcccgacaagaatggcacgttaggcatgagtgtgaactgcaggaagaggaagctgggcctgctggttttgtcggggagtgtctcggaggtgaaagagccagcaagtactagacagagggttgacggatgcgagatgcctgccaacactgatgcactgcggtatagtgggtctggctcggatatgtccgaggatatcgaatcttcgagtaattcatccgatttcactaaagaagaaccatctgagccgtgtcctcctgtacaggctgtggagttgcccccgtcatcgggagacattcatgtgccagaagattccataagctatctcttttctgtttataacttcctgagatccttcagtgtgcagctgttcctgagtccgtttggtctggatgattttgttgcagccattaattgcactgttcagaataacttgttggatgccgtacatgtctcgctattgcgtgcactgaggcggtatcttgaatctaaatctgctcaaggatctcagatggcttcaaattgcttgaagtatttggattggacattactagatgcattgacttggccaactttcttactagagtacctgtatgtgatggggtgcattaagaacctaggggggcagagttttgctagaagccttctagccgctgaatactataaactttctgttgccacgaagttgagggtgctgcaaatactctgtgatcatgtccttgaatcacaagaatacaaaactatactggaagatcgagtaggctacaatgaggagatggaatatgagatagattctagcacctttttggaggctggttccagagcagtcttgactagagcctcaaaggcctcagcttacaaaatgctgaatgatttacagaactttgaaagtggtccaaatgtaacaaattcagatgttgctgtagcagatgtttctcaggacggtaatagtgatgattgccgaatatgtggaatggatgggactttggtatgctgtgatggctgcccatgggcatatcattcgagatgtatcggtcaaaataaagctttccttccccagggggactggttctgtccagaatgtgttgtcaacaagcttggaccaacttcatcaagaattgaacgtggtgcaagaggagctcaaatgtttggcattgatatgcacgggaggctattcttaggaacctgcaactatttactggtgatcgaaatatcttcagatgtagagtcttatgcaagatattacaatcattatgatgttgtcaaggtactccagagacttgcactctcagatgcatatgtggatatatgcaggcaaataatggaatactggaaacatttactcggtagagttcagagtgagagatcaacaatattgaaagaagttggtacaagacatactccacaatccagcatgttgagttttactccaacaatgtcaggagatggaagtggctggacaactttaaaagatggtggggacagtaaaacagtagcacttcctcaaacaaatgtgcaacagaaaattttcgctaatcagtatacagtgtgctctgctgaacaaacggagaagaatgttgatgtttgcaagcaagctctgtcagctcagaacaacatacataatgcacctagaaatggagcttctggaccatttgtggcatcccccgtttctcatcagaatggatccattggaacgggtatgtctaacatagcacaagcacagccagctcatagtatatatcgtccagacttatccactgtttctgcaaagtcagaatcatttcgttcatctttgcaaggtaaacttcaccttcagatgtgtactgaaagacctggaaacatgagttgtggcaaggcagcaaagttgtcttcttttaaaccacaagcttacatgaacctctacaatcatggcaacattgcagcatctgctgccgccaatctagctattattgcatccagtgaaggtaaggtttccacatcccaactgtccgcaaaaccaaagaagaaggtggctgcagacaatgctctacagttgaaagcattttcctcagcagtcgcacaatttgtttggccgagtactgaaaagaagcttatggaagttccaagagatagatgtggttggtgccttgcttgcagaagttcagcaagtggaaacaaaaaggcttgttttcttaacatgaccacatcaaacgctgctaaaagttctgctcgagttcttagcacaatgcgcgtaataaagatttctgacagccatttccccagtattgctgcttatttagccaacatggaggaaagtttgcgtggcctgttggttggttcactacaagacatgcagcagagagaacggtggcgtgaacaacttgaagaagcttccaactgcagaactgtaatacccctcttgcttgagttggaaagcaacatccgtggagtagcattttctgcaagctggttcaagccgatagacgattggcctgcggaatctccttgtccatcaacaggggcatctcgtcctgcacaacaccaaaaacgtggggctggcggaaggcgtggcagaagacgtttgttggtgtctgaacccggtactgttactgatgatgacaacagctggacttggtggaccggaggaaatataataaaacgtactttgcagaggggggctcttctacattcaaccataagaaaagctgctcgccaaggtggtaagaaaaggttagcaggtttatcttatcatgaaggttctaattttccaagacgatctcggcaacttttctggagagcatgtgttggactaagccagacttcgtctcaacttgctctgcaggaattccggaatgttttaccaatttatacccaaggcgagtgaaagcacctgacagagatgttttttcatatctctttcacaagggagaagtctatccctgcgcgtcatgcaagaagggtgttctctacagggatattgttaaatgcagctcttgtcaaggtaattgtcataaagagtgtacatcaagatctgttgttagcaaaggaggcagtactacttccagtttgatatgcaagttatgtctccagaagcgaaatcttatgctcactagttacaatacaaatgcaagttatatccagcatctacagaagaataatggccaacagccagtgaccgctcccagaaatgtctctaaggttagttcttcccattctgctgagcctgcccccaaagtggaagccgagccagtcacaaaggttaaggcacaacgagttggaaatgtggaagctacaacccagccagttctaaatgtgaaagcccagccacccgccaaagtggtaactcagaacatcactagtgtccaaaagacaaaagctaaaaagtcaaagtccgaaaaaccaacgaaggctaaaaaagttcaagcgatcacatatttcggtctcatatggaagaaaaataagaacgacaaggatgatggaagcgagttcagggcgaatgatgtaatccttaaaagcaaggatggtataggttcgtcaataaaaccaaaatgttgtctatgtgacaaagcatattctccggaattcctgtatgtacgctgtgagaggtgcaaaaattggtttcatggtgattccttgcaacttgaagaagataggattggtgagttggttggataccgatgctgtaggtgccggaggagggccatccccccgtgtcctcattcagataattatgtaaagcctgaacccgaatttagtgagcaaacagttgcaacatcatcggtgtcaactatgctatccagtgggaagacttctgcttcagcagatcaggacccactgcttgcttcgtatggaatagttgaaccaatcggggaagagacaggggatgttgatttatcagcgaacacggcaagcattgccccgggaagtagccagaagctgtctataagaagagcactagctaaaacttctggataccttgaccaagctggtaaatctgtgaatgagtattatgtccagaaccagaatacacctccaggcaatggaaacatcaatttcagccacacgaatgagatttccttttcggaggctgacagcgtgggcgcttcaggactactggggtgggatttttcgagaggaaccgcgtatgctgccccacctggtttcacttctaatcgccagcagaaccgcactagccgtggcagctttgtgccggacgagtgtgagcgtgagccccagacttatttctcgttcactgagctgcttgaggctgacgacgcacagcttgatgacaacgcgtttgggatagctactggtctgcaaggtgatgctaacggctccggaagctttgtccaacgaggagttggttttggtggtacgtctttcatggcagaagatggagcttcgaatatgaacgtgccaacaaatggtcccacgcctgaagaggtagcgtgccacaacggcacgaacactcagccgccacctgatcccagatgttctgtccgtgacctccgcacacaccggtagtgctctccctgggaaccgaggcgtgtagagcctgtcgagagcggcaactggagttgtggtggttgccgcgaatggtgatgatgagcctctaaacttcactgccagttgcaatggcaggtaaatccaacggcatcccatatacttaccggatttctcgttaccggtcgctgggttgctgctgtcatgatgtgctactgatttctcggatcatttcattatttgatctaatcttaaccatcatacagttagagtagcgattaccgcttggggtttacactgtacatactgaaaggatgggtcgacgacgacgtaccatttccattctttaggctatttatttttttggggtgggagttttagagctaggatgctgctagcacatagcaacatggtatatgggtcgtctggaaaaaaaaaaccatattattatgtaactgtattaaccttggttgtctcttctcgccttctgagatacaagtgtctcttggtcagagtgggtggccgtttctatgcctatgcagctatgctccagtattgtcgcatttgcctaggtaaaataactaattacatggcatgcgatttatgttccattcttcctttagatgaattactctctccagccatcaacacaagcgaactttttggatgccgtttaatctgtg

SEQ ID NO: 21194 - DNA, 5295 bp, Zea Mays
ctccctcccacccatccacccatcatcatctcgacctcttcccccaactcctcgccgccgccacttgccggctgtggagttgcccccgtcatcgggagacattcatgtgccagaagattccataagctatctcttttctgtttataacttcctgagatccttcagtgtgcagctgttcctgagtccgtttggtctggatgattttgttgcagccattaattgcactgttcagaataacttgttggatgccgtacatgtctcgctattgcgtgcactgaggcggtatcttgaatctaaatctgctcaaggatctcagatggcttcaaattgcttgaagtatttggattggacattactagatgcattgacttggccaactttcttactagagtacctgtatgtgatggggtgcattaagaacctaggggggcagagttttgctagaagccttctagccgctgaatactataaactttctgttgccacgaagttgagggtgctgcaaatactctgtgatcatgtccttgaatcacaagaatacaaaactatactggaagatcgagtaggctacaatgaggagatggaatatgagatagattctagcacctttttggaggctggttccagagcagtcttgactagagcctcaaaggcctcagcttacaaaatgctgaatgatttacagaactttgaaagtggtccaaatgtaacaaattcagatgttgctgtagcagatgtttctcaggacggtaatagtgatgattgccgaatatgtggaatggatgggactttggtatgctgtgatggctgcccatgggcatatcattcgagatgtatcggtcaaaataaagctttccttccccagggggactggttctgtccagaatgtgttgtcaacaagcttggaccaacttcatcaagaattgaacgtggtgcaagaggagctcaaatgtttggcattgatatgcacgggaggctattcttaggaacctgcaactatttactggtgatcgaaatatcttcagatgtagagtcttatgcaagatattacaatcattatgatgttgtcaaggtactccagagacttgcactctcagatgcatatgtggatatatgcaggcaaataatggaatactggaaacatttactcggtagagttcagagtgagagatcaacaatattgaaagaagttggtacaagacatactccacaatccagcatgttgagttttactccaacaatgtcaggagatggaagtggctggacaactttaaaagatggtggggacagtaaaacagtagcacttcctcaaacaaatgtgcaacagaaaattttcgctaatcagtatacagtgtgctctgctgaacaaacggagaagaatgttgatgtttgcaagcaagctctgtcagctcagaacaacatacataatgcacctagaaatggagcttctggaccatttgtggcatcccccgtttctcatcagaatggatccattggaacgggtatgtctaacatagcacaagcacagccagctcatagtatatatcgtccagacttatccactgtttctgcaaagtcagaatcatttcgttcatctttgcaaggtaaacttcaccttcagatgtgtactgaaagacctggaaacatgagttgtggcaaggcagcaaagttgtcttcttttaaaccacaagcttacatgaacctctacaatcatggcaacattgcagcatctgctgccgccaatctagctattattgcatccagtgaaggtaaggtttccacatcccaactgtccgcaaaaccaaagaagaaggtggctgcagacaatgctctacagttgaaagcattttcctcagcagtcgcacaatttgtttggccgagtactgaaaagaagcttatggaagttccaagagatagatgtggttggtgccttgcttgcagaagttcagcaagtggaaacaaaaaggcttgttttcttaacatgaccacatcaaacgctgctaaaagttctgctcgagttcttagcacaatgcgcgtaataaagatttctgacagccatttccccagtattgctgcttatttagccaacatggaggaaagtttgcgtggcctgttggttggttcactacaagacatgcagcagagagaacggtggcgtgaacaacttgaagaagcttccaactgcagaactgtaatacccctcttgcttgagttggaaagcaacatccgtggagtagcattttctgcaagctggttcaagccgatagacgattggcctgcggaatctccttgtccatcaacaggggcatctcgtcctgcacaacaccaaaaacgtggggctggcggaaggcgtggcagaagacgtttgttggtgtctgaacccggtactgttactgatgatgacaacagctggacttggtggaccggaggaaatataataaaacgtactttgcagaggggggctcttctacattcaaccataagaaaagctgctcgccaaggtggtaagaaaaggttagcaggtttatcttatcatgaaggttctaattttccaagacgatctcggcaacttttctggagagcatgtgttggactaagccagacttcgtctcaacttgctctgcaggttagatatcttgatgctcacatcagatggaaggagtttatctctccagatcaaattccttcagatggaaaaagttctgacgctgacttttctgcactcagaaatgctgtactctgtgataaaaaaataatcgacaataagataagatacgcactgaagtttcccaaccaaaagcatcttcctgtccgtctgacaaaaaatatcttggaagcagaaagtgatcaggatgaaattagaaaaatgtggttttctgaaaaccacgtgccattgtacatgttacgagaatttgagcagcatgctgaggctagctccttgcctactccaggaattccggaatgttttaccaatttatacccaaggcgagtgaaagcacctgacagagatgttttttcatatctctttcacaagggagaagtctatccctgcgcgtcatgcaagaagggtgttctctacagggatattgttaaatgcagctcttgtcaaggtaattgtcataaagagtgtacatcaagatctgttgttagcaaaggaggcagtactacttccagtttgatatgcaagttatgtctccagaagcgaaatcttatgctcactagttacaatacaaatgcaagttatatccagcatctacagaagaataatggccaacagccagtgaccgctcccagaaatgtctctaaggttagttcttcccattctgctgagcctgcccccaaagtggaagccgagccagtcacaaaggttaaggcacaacgagttggaaatgtggaagctacaacccagccagttctaaatgtgaaagcccagccacccgccaaagtggtaactcagaacatcactagtgtccaaaagacaaaagctaaaaagtcaaagtccgaaaaaccaacgaaggctaaaaaagttcaagcgatcacatatttcggtctcatatggaagaaaaataagaacgacaaggatgatggaagcgagttcagggcgaatgatgtaatccttaaaagcaaggatggtataggttcgtcaataaaaccaaaatgttgtctatgtgacaaagcatattctccggaattcctgtatgtacgctgtgagaggtgcaaaaattggtttcatggtgattccttgcaacttgaagaagataggattggtgagttggttggataccgatgctgtaggtgccggaggagggccatccccccgtgtcctcattcagataattatgtaaagcctgaacccgaatttagtgagcaaacagttgcaacatcatcggtgtcaactatgctatccagtgggaagacttctgcttcagcagatcaggacccactgcttgcttcgtatggaatagttgaaccaatcggggaagagacaggggatgttgatttatcagcgaacacggcaagcattgccccgggaagtagccagaagctgtctataagaagagcactagctaaaacttctggataccttgaccaagctggtaaatctgtgaatgagtattatgtccagaaccagaatacacctccaggcaatggaaacatcaatttcagccacacgaatgagatttccttttcggaggctgacagcgtgggcgcttcaggactactggggtgggatttttcgagaggaaccgcgtatgctgccccacctggtttcacttctaatcgccagcagaaccgcactagccgtggcagctttgtgccggacgagtgtgagcgtgagccccagacttatttctcgttcactgagctgcttgaggctgacgacgcacagcttgatgacaacgcgtttgggatagctactggtctgcaaggtgatgctaacggctccggaagctttgtccaacgaggagttggttttggtggtacgtctttcatggcagaagatggagcttcgaatatgaacgtgccaacaaatggtcccacgcctgaagaggtagcgtgccacaacggcacgaacactcagccgccacctgatcccagatgttctgtccgtgacctccgcacacaccggtagtgctctccctgggaaccgaggcgtgtagagcctgtcgagagcggcaactggagttgtggtggttgccgcgaatggtgatgatgagcctctaaacttcactgccagttgcaatggcaggtaaatccaacggcatcccatatacttaccggatttctcgttaccggtcgctgggttgctgctgtcatgatgtgctactgatttctcggatcatttcattatttgatctaatcttaaccatcatacagttagagtagcgattaccgcttggggtttacactgtacatactgaaaggatgggtcgacgacgacgtaccatttccattctttaggctatttatttttttggggtgggagttttagagctaggatgctgctagcacatagcaacatggtatatgggtcgtctggaaaaaaaaaaccatattattatgtaactgtattaaccttggttgtctcttctcgccttctgagatacaagtgtctcttggtcagagtgggtggccgtttctatgcctatgcagctatgctccagtattgtcgcatttgcctaggtaaaataactaattacatggcatgcgatttatgttccattcttcctttagatgaattactctctccagccatcaacacaagcgaactttttggatgccgtttaatctgtg

SEQ ID NO: 21195 - DNA, 6444 bp, Zea Mays
cacccatccacccatcatcatctcgacctcttcccccaactcctcgccgccgccacttgccggtagggtttgcgagcccatcccgctccaatcgcccgccgccgccgcgagatcggcggctcccatcccagattcgttcccgcccacgccagcgcgccgcatccgatacccgtcccgttggcccgcgactcgcgaacgaggatgcctcagtagggcgcgcgcgtgtcgagctagggttgtcgcgtccgaggccatggacaccgccgcgggcccggggccccgggacggccccgatcggacgccgcaggggcccggcgcctcccccgaggaggccgccgctgatggcgtgaagacggacatcgcaggtggggcggaagcgcttgcagcggcaggcgcggccggtgaggccgatccgggtggaggcgccgctgcggcggggcgtgggggtgacgcggaggcctcggcgagcgagcccacggcggaggaggttaacgaaggctgcggcggcgccgctgctgctgcgggcggagatcgccccgccgcgcccgaggcggatgcggacggcggcgcgggcaaagggcggtctgctgtgcacgcggtgagtgaggtggagcagggccaaggcattgcgggggcagcgcaggatgtggatcccgcggtgtttgaggtgaagaagatggacgtgagcgagggtggcgacgcaagcaagcagaatcagcactctccgtcttgtacggccagcgaggtggatgtggggatcgttcctgtggcagtgcgagatttggatcctgtggggtctgaagtgatgatggaggtggacgacggccatgtcagggaacaagagcgcgcgggagtggctgtggcgggcagcgagtttaagatggaggaagctgatggaagagtggtgcatcaagggtctgctgccacatctgctgggggccttcaggcgcgagccgaggaagtgggagagtgcttggtcggccgttacattggccgcaacgcgccaatgcaagcggggatccttattgggaaggttgcatcctatgatagcacagctggcatctacagcgtggtgtttgaggatggacataatgaggatttggagcttcctgagctccacgagttcctcatgcccgacaagaatggcacgttaggcatgagtgtgaactgcaggaagaggaagctgggcctgctggttttgtcggggagtgtctcggaggtgaaagagccagcaagtactagacagagggttgacggatgcgagatgcctgccaacactgatgcactgcggctgtggagttgcccccgtcatcgggagacattcatgtgccagaagattccataagctatctcttttctgtttataacttcctgagatccttcagtgtgcagctgttcctgagtccgtttggtctggatgattttgttgcagccattaattgcactgttcagaataacttgttggatgccgtacatgtctcgctattgcgtgcactgaggcggtatcttgaatctaaatctgctcaaggatctcagatggcttcaaattgcttgaagtatttggattggacattactagatgcattgacttggccaactttcttactagagtacctgtatgtgatggggtgcattaagaacctaggggggcagagttttgctagaagccttctagccgctgaatactataaactttctgttgccacgaagttgagggtgctgcaaatactctgtgatcatgtccttgaatcacaagaatacaaaactatactggaagatcgagtaggctacaatgaggagatggaatatgagatagattctagcacctttttggaggctggttccagagcagtcttgactagagcctcaaaggcctcagcttacaaaatgctgaatgatttacagaactttgaaagtggtccaaatgtaacaaattcagatgttgctgtagcagatgtttctcaggacggtaatagtgatgattgccgaatatgtggaatggatgggactttggtatgctgtgatggctgcccatgggcatatcattcgagatgtatcggtcaaaataaagctttccttccccagggggactggttctgtccagaatgtgttgtcaacaagcttggaccaacttcatcaagaattgaacgtggtgcaagaggagctcaaatgtttggcattgatatgcacgggaggctattcttaggaacctgcaactatttactggtgatcgaaatatcttcagatgtagagtcttatgcaagatattacaatcattatgatgttgtcaaggtactccagagacttgcactctcagatgcatatgtggatatatgcaggcaaataatggaatactggaaacatttactcggtagagttcagagtgagagatcaacaatattgaaagaagttggtacaagacatactccacaatccagcatgttgagttttactccaacaatgtcaggagatggaagtggctggacaactttaaaagatggtggggacagtaaaacagtagcacttcctcaaacaaatgtgcaacagaaaattttcgctaatcagtatacagtgtgctctgctgaacaaacggagaagaatgttgatgtttgcaagcaagctctgtcagctcagaacaacatacataatgcacctagaaatggagcttctggaccatttgtggcatcccccgtttctcatcagaatggatccattggaacgggtatgtctaacatagcacaagcacagccagctcatagtatatatcgtccagacttatccactgtttctgcaaagtcagaatcatttcgttcatctttgcaaggtaaacttcaccttcagatgtgtactgaaagacctggaaacatgagttgtggcaaggcagcaaagttgtcttcttttaaaccacaagcttacatgaacctctacaatcatggcaacattgcagcatctgctgccgccaatctagctattattgcatccagtgaaggtaaggtttccacatcccaactgtccgcaaaaccaaagaagaaggtggctgcagacaatgctctacagttgaaagcattttcctcagcagtcgcacaatttgtttggccgagtactgaaaagaagcttatggaagttccaagagatagatgtggttggtgccttgcttgcagaagttcagcaagtggaaacaaaaaggcttgttttcttaacatgaccacatcaaacgctgctaaaagttctgctcgagttcttagcacaatgcgcgtaataaagatttctgacagccatttccccagtattgctgcttatttagccaacatggaggaaagtttgcgtggcctgttggttggttcactacaagacatgcagcagagagaacggtggcgtgaacaacttgaagaagcttccaactgcagaactgtaatacccctcttgcttgagttggaaagcaacatccgtggagtagcattttctgcaagctggttcaagccgatagacgattggcctgcggaatctccttgtccatcaacaggggcatctcgtcctgcacaacaccaaaaacgtggggctggcggaaggcgtggcagaagacgtttgttggtgtctgaacccgaggggggctcttctacattcaaccataagaaaagctgctcgccaaggtggtaagaaaaggttagcaggtttatcttatcatgaaggttctaattttccaagacgatctcggcaacttttctggagagcatgtgttggactaagccagacttcgtctcaacttgctctgcaggttagatatcttgatgctcacatcagatggaaggagtttatctctccagatcaaattccttcagatggaaaaagttctgacgctgacttttctgcactcagaaatgctgtactctgtgataaaaaaataatcgacaataagataagatacgcactgaagtttcccaaccaaaagcatcttcctgtccgtctgacaaaaaatatcttggaagcagaaagtgatcaggatgaaattagaaaaatgtggttttctgaaaaccacgtgccattgtacatgttacgagaatttgagcagcatgctgaggctagctccttgcctactccaggaattccggaatgttttaccaatttatacccaaggcgagtgaaagcacctgacagagatgttttttcatatctctttcacaagggagaagtctatccctgcgcgtcatgcaagaagggtgttctctacagggatattgttaaatgcagctcttgtcaaggtaattgtcataaagagtgtacatcaagatctgttgttagcaaaggaggcagtactacttccagtttgatatgcaagttatgtctccagaagcgaaatcttatgctcactagttacaatacaaatgcaagttatatccagcatctacagaagaataatggccaacagccagtgaccgctcccagaaatgtctctaaggttagttcttcccattctgctgagcctgcccccaaagtggaagccgagccagtcacaaaggttaaggcacaacgagttggaaatgtggaagctacaacccagccagttctaaatgtgaaagcccagccacccgccaaagtggtaactcagaacatcactagtgtccaaaagacaaaagctaaaaagtcaaagtccgaaaaaccaacgaaggctaaaaaagttcaagcgatcacatatttcggtctcatatggaagaaaaataagaacgacaaggatgatggaagcgagttcagggcgaatgatgtaatccttaaaagcaaggatggtataggttcgtcaataaaaccaaaatgttgtctatgtgacaaagcatattctccggaattcctgtatgtacgctgtgagaggtgcaaaaattggtttcatggtgattccttgcaacttgaagaagataggattggtgagttggttggataccgatgctgtaggtgccggaggagggccatccccccgtgtcctcattcagataattatgtaaagcctgaacccgaatttagtgagcaaacagttgcaacatcatcggtgtcaactatgctatccagtgggaagacttctgcttcagcagatcaggacccactgcttgcttcgtatggaatagttgaaccaatcggggaagagacaggggatgttgatttatcagcgaacacggcaagcattgccccgggaagtagccagaagctgtctataagaagagcactagctaaaacttctggataccttgaccaagctggtaaatctgtgaatgagtattatgtccagaaccagaatacacctccaggcaatggaaacatcaatttcagccacacgaatgagatttccttttcggaggctgacagcgtgggcgcttcaggactactggggtgggatttttcgagaggaaccgcgtatgctgccccacctggtttcacttctaatcgccagcagaaccgcactagccgtggcagctttgtgccggacgagtgtgagcgtgagccccagacttatttctcgttcactgagctgcttgaggctgacgacgcacagcttgatgacaacgcgtttgggatagctactggtctgcaaggtgatgctaacggctccggaagctttgtccaacgaggagttggttttggtggtacgtctttcatggcagaagatggagcttcgaatatgaacgtgccaacaaatggtcccacgcctgaagaggtagcgtgccacaacggcacgaacactcagccgccacctgatcccagatgttctgtccgtgacctccgcacacaccggtagtgctctccctgggaaccgaggcgtgtagagcctgtcgagagcggcaactggagttgtggtggttgccgcgaatggtgatgatgagcctctaaacttcactgccagttgcaatggcaggtaaatccaacggcatcccatatacttaccggatttctcgttaccggtcgctgggttgctgctgtcatgatgtgctactgatttctcggatcatttcattatttgatctaatcttaaccatcatacagttagagtagcgattaccgcttggggtttacactgtacatactgaaaggatgggtcgacgacgacgtaccatttccattctttaggctatttatttttttggggtgggagttttagagctaggatgctgctagcacatagcaacatggtatatgggtcgtctggaaaaaaaaaaccatattattatgtaactgtattaaccttggttgtctcttctcgccttctgagatacaagtgtctcttggtcagagtgggtggccgtttctatgcctatgcagctatgctccagtattgtcgcatttgcctaggtaaaataactaattacatggcatgcgatttatgttccattcttcctttagatgaattactctctccagccatcaacacaagcgaactttttggatgccgtttaatctgtg

SEQ ID NO: 21196 - DNA, 6595 bp, Zea Mays
cacccatcatcatctcgacctcttcccccaactcctcgccgccgccacttgccggtagggtttgcgagcccatcccgctccaatcgcccgccgccgccgcgagatcggcggctcccatcccagattcgttcccgcccacgccagcgcgccgcatccgatacccgtcccgttggcccgcgactcgcgaacgaggatgcctcagtagggcgcgcgcgtgtcgagctagggttgtcgcgtccgaggccatggacaccgccgcgggcccggggccccgggacggccccgatcggacgccgcaggggcccggcgcctcccccgaggaggccgccgctgatggcgtgaagacggacatcgcaggtggggcggaagcgcttgcagcggcaggcgcggccggtgaggccgatccgggtggaggcgccgctgcggcggggcgtgggggtgacgcggaggcctcggcgagcgagcccacggcggaggaggttaacgaaggctgcggcggcgccgctgctgctgcgggcggagatcgccccgccgcgcccgaggcggatgcggacggcggcgcgggcaaagggcggtctgctgtgcacgcggtgagtgaggtggagcagggccaaggcattgcgggggcagcgcaggatgtggatcccgcggtgtttgaggtgaagaagatggacgtgagcgagggtggcgacgcaagcaagcagaatcagcactctccgtcttgtacggccagcgaggtggatgtggggatcgttcctgtggcagtgcgagatttggatcctgtggggtctgaagtgatgatggaggtggacgacggccatgtcagggaacaagagcgcgcgggagtggctgtggcgggcagcgagtttaagatggaggaagctgatggaagagtggtgcatcaagggtctgctgccacatctgctgggggccttcaggcgcgagccgaggaagtgggagagtgcttggtcggccgttacattggccgcaacgcgccaatgcaagcggggatccttattgggaaggttgcatcctatgatagcacagctggcatctacagcgtggtgtttgaggatggacataatgaggatttggagcttcctgagctccacgagttcctcatgcccgacaagaatggcacgttaggcatgagtgtgaactgcaggaagaggaagctgggcctgctggttttgtcggggagtgtctcggaggtgaaagagccagcaagtactagacagagggttgacggatgcgagatgcctgccaacactgatgcactgcggtatagtgggtctggctcggatatgtccgaggatatcgaatcttcgagtaattcatccgatttcactaaagaagaaccatctgagccgtgtcctcctgtacaggctgtggagttgcccccgtcatcgggagacattcatgtgccagaagattccataagctatctcttttctgtttataacttcctgagatccttcagtgtgcagctgttcctgagtccgtttggtctggatgattttgttgcagccattaattgcactgttcagaataacttgttggatgccgtacatgtctcgctattgcgtgcactgaggcggtatcttgaatctaaatctgctcaaggatctcagatggcttcaaattgcttgaagtatttggattggacattactagatgcattgacttggccaactttcttactagagtacctgtatgtgatggggtgcattaagaacctaggggggcagagttttgctagaagccttctagccgctgaatactataaactttctgttgccacgaagttgagggtgctgcaaatactctgtgatcatgtccttgaatcacaagaatacaaaactatactggaagatcgagtaggctacaatgaggagatggaatatgagatagattctagcacctttttggaggctggttccagagcagtcttgactagagcctcaaaggcctcagcttacaaaatgctgaatgatttacagaactttgaaagtggtccaaatgtaacaaattcagatgttgctgtagcagatgtttctcaggacggtaatagtgatgattgccgaatatgtggaatggatgggactttggtatgctgtgatggctgcccatgggcatatcattcgagatgtatcggtcaaaataaagctttccttccccagggggactggttctgtccagaatgtgttgtcaacaagcttggaccaacttcatcaagaattgaacgtggtgcaagaggagctcaaatgtttggcattgatatgcacgggaggctattcttaggaacctgcaactatttactggtgatcgaaatatcttcagatgtagagtcttatgcaagatattacaatcattatgatgttgtcaaggtactccagagacttgcactctcagatgcatatgtggatatatgcaggcaaataatggaatactggaaacatttactcggtagagttcagagtgagagatcaacaatattgaaagaagttggtacaagacatactccacaatccagcatgttgagttttactccaacaatgtcaggagatggaagtggctggacaactttaaaagatggtggggacagtaaaacagtagcacttcctcaaacaaatgtgcaacagaaaattttcgctaatcagtatacagtgtgctctgctgaacaaacggagaagaatgttgatgtttgcaagcaagctctgtcagctcagaacaacatacataatgcacctagaaatggagcttctggaccatttgtggcatcccccgtttctcatcagaatggatccattggaacgggtatgtctaacatagcacaagcacagccagctcatagtatatatcgtccagacttatccactgtttctgcaaagtcagaatcatttcgttcatctttgcaaggtaaacttcaccttcagatgtgtactgaaagacctggaaacatgagttgtggcaaggcagcaaagttgtcttcttttaaaccacaagcttacatgaacctctacaatcatggcaacattgcagcatctgctgccgccaatctagctattattgcatccagtgaaggtaaggtttccacatcccaactgtccgcaaaaccaaagaagaaggtggctgcagacaatgctctacagttgaaagcattttcctcagcagtcgcacaatttgtttggccgagtactgaaaagaagcttatggaagttccaagagatagatgtggttggtgccttgcttgcagaagttcagcaagtggaaacaaaaaggcttgttttcttaacatgaccacatcaaacgctgctaaaagttctgctcgagttcttagcacaatgcgcgtaataaagatttctgacagccatttccccagtattgctgcttatttagccaacatggaggaaagtttgcgtggcctgttggttggttcactacaagacatgcagcagagagaacggtggcgtgaacaacttgaagaagcttccaactgcagaactgtaatacccctcttgcttgagttggaaagcaacatccgtggagtagcattttctgcaagctggttcaagccgatagacgattggcctgcggaatctccttgtccatcaacaggggcatctcgtcctgcacaacaccaaaaacgtggggctggcggaaggcgtggcagaagacgtttgttggtgtctgaacccggtactgttactgatgatgacaacagctggacttggtggaccggaggaaatataataaaacgtactttgcagaggggggctcttctacattcaaccataagaaaagctgctcgccaaggtggtaagaaaaggttagcaggtttatcttatcatgaaggttctaattttccaagacgatctcggcaacttttctggagagcatgtgttggactaagccagacttcgtctcaacttgctctgcaggttagatatcttgatgctcacatcagatggaaggagtttatctctccagatcaaattccttcagatggaaaaagttctgacgctgacttttctgcactcagaaatgctgtactctgtgataaaaaaataatcgacaataagataagatacgcactgaagtttcccaaccaaaagcatcttcctgtccgtctgacaaaaaatatcttggaagcagaaagtgatcaggatgaaattagaaaaatgtggttttctgaaaaccacgtgccattgtacatgttacgagaatttgagcagcatgctgaggctagctccttgcctactccaggaattccggaatgttttaccaatttatacccaaggcgagtgaaagcacctgacagagatgttttttcatatctctttcacaagggagaagtctatccctgcgcgtcatgcaagaagggtgttctctacagggatattgttaaatgcagctcttgtcaagagtgtacatcaagatctgttgttagcaaaggaggcagtactacttccagtttgatatgcaagttatgtctccagaagcgaaatcttatgctcactagttacaatacaaatgcaagttatatccagcatctacagaagaataatggccaacagccagtgaccgctcccagaaatgtctctaaggttagttcttcccattctgctgagcctgcccccaaagtggaagccgagccagtcacaaaggttaaggcacaacgagttggaaatgtggaagctacaacccagccagttctaaatgtgaaagcccagccacccgccaaagtggtaactcagaacatcactagtgtccaaaagacaaaagctaaaaagtcaaagtccgaaaaaccaacgaaggctaaaaaagttcaagcgatcacatatttcggtctcatatggaagaaaaataagaacgacaaggatgatggaagcgagttcagggcgaatgatgtaatccttaaaagcaaggatggtataggttcgtcaataaaaccaaaatgttgtctatgtgacaaagcatattctccggaattcctgtatgtacgctgtgagaggtgcaaaaattggtttcatggtgattccttgcaacttgaagaagataggattggtgagttggttggataccgatgctgtaggtgccggaggagggccatccccccgtgtcctcattcagataattatgtaaagcctgaacccgaatttagtgagcaaacagttgcaacatcatcggtgtcaactatgctatccagtgggaagacttctgcttcagcagatcaggacccactgcttgcttcgtatggaatagttgaaccaatcggggaagagacaggggatgttgatttatcagcgaacacggcaagcattgccccgggaagtagccagaagctgtctataagaagagcactagctaaaacttctggataccttgaccaagctggtaaatctgtgaatgagtattatgtccagaaccagaatacacctccaggcaatggaaacatcaatttcagccacacgaatgagatttccttttcggaggctgacagcgtgggcgcttcaggactactggggtgggatttttcgagaggaaccgcgtatgctgccccacctggtttcacttctaatcgccagcagaaccgcactagccgtggcagctttgtgccggacgagtgtgagcgtgagccccagacttatttctcgttcactgagctgcttgaggctgacgacgcacagcttgatgacaacgcgtttgggatagctactggtctgcaaggtgatgctaacggctccggaagctttgtccaacgaggagttggttttggtggtacgtctttcatggcagaagatggagcttcgaatatgaacgtgccaacaaatggtcccacgcctgaagaggtagcgtgccacaacggcacgaacactcagccgccacctgatcccagatgttctgtccgtgacctccgcacacaccggtagtgctctccctgggaaccgaggcgtgtagagcctgtcgagagcggcaactggagttgtggtggttgccgcgaatggtgatgatgagcctctaaacttcactgccagttgcaatggcaggtaaatccaacggcatcccatatacttaccggatttctcgttaccggtcgctgggttgctgctgtcatgatgtgctactgatttctcggatcatttcattatttgatctaatcttaaccatcatacagttagagtagcgattaccgcttggggtttacactgtacatactgaaaggatgggtcgacgacgacgtaccatttccattctttaggctatttatttttttggggtgggagttttagagctaggatgctgctagcacatagcaacatggtatatgggtcgtctggaaaaaaaaaaccatattattatgtaactgtattaaccttggttgtctcttctcgccttctgagatacaagtgtctcttggtcagagtgggtggccgtttctatgcctatgcagctatgctccagtattgtcgcatttgcctaggtaaaataactaattacatggcatgcgatttatgttccattcttcctttagatgaattactctctccagccatcaacacaagcgaactttttggatgccgtttaatctgtg

SEQ ID NO: 21197 - DNA, 3173 bp, Zea Mays
ttcccagggtatctcacgaagggaagttctatggttgcttgtttctatcctcttaatgtaatacacacggtcgtgcatgttctcagaaaaaagacttggaaagcaacatccgtggagtagcattttctgcaagctggttcaagccgatagacgattggcctgcggaatctccttgtccatcaacaggggcatctcgtcctgcacaacaccaaaaacgtggggctggcggaaggcgtggcagaagacgtttgttggtgtctgaacccggtactgttactgatgatgacaacagctggacttggtggaccggaggaaatataataaaacgtactttgcagaggggggctcttctacattcaaccataagaaaagctgctcgccaaggtggtaagaaaaggttagcaggtttatcttatcatgaaggttctaattttccaagacgatctcggcaacttttctggagagcatgtgttggactaagccagacttcgtctcaacttgctctgcagatatcttgatgctcacatcagatggaaggagtttatctctccagatcaaattccttcagatggaaaaagttctgacgctgacttttctgcactcagaaatgctgtactctgtgataaaaaaataatcgacaataagataagatacgcactgaagtttcccaaccaaaagcatcttcctgtccgtctgacaaaaaatatcttggaagcagaaagtgatcaggatgaaattagaaaaatgtggttttctgaaaaccacgtgccattgtacatgttacgagaatttgagcagcatgctgaggctagctccttgcctactccaggaattccggaatgttttaccaatttatacccaaggcgagtgaaagcacctgacagagatgttttttcatatctctttcacaagggagaagtctatccctgcgcgtcatgcaagaagggtgttctctacagggatattgttaaatgcagctcttgtcaaggtaattgtcataaagagtgtacatcaagatctgttgttagcaaaggaggcagtactacttccagtttgatatgcaagttatgtctccagaagcgaaatcttatgctcactagttacaatacaaatgcaagttatatccagcatctacagaagaataatggccaacagccagtgaccgctcccagaaatgtctctaaggttagttcttcccattctgctgagcctgcccccaaagtggaagccgagccagtcacaaaggttaaggcacaacgagttggaaatgtggaagctacaacccagccagttctaaatgtgaaagcccagccacccgccaaagtggtaactcagaacatcactagtgtccaaaagacaaaagctaaaaagtcaaagtccgaaaaaccaacgaaggctaaaaaagttcaagcgatcacatatttcggtctcatatggaagaaaaataagaacgacaaggatgatggaagcgagttcagggcgaatgatgtaatccttaaaagcaaggatggtataggttcgtcaataaaaccaaaatgttgtctatgtgacaaagcatattctccggaattcctgtatgtacgctgtgagaggtgcaaaaattggtttcatggtgattccttgcaacttgaagaagataggattggtgagttggttggataccgatgctgtaggtgccggaggagggccatccccccgtgtcctcattcagataattatgtaaagcctgaacccgaatttagtgagcaaacagttgcaacatcatcggtgtcaactatgctatccagtgggaagacttctgcttcagcagatcaggacccactgcttgcttcgtatggaatagttgaaccaatcggggaagagacaggggatgttgatttatcagcgaacacggcaagcattgccccgggaagtagccagaagctgtctataagaagagcactagctaaaacttctggataccttgaccaagctggtaaatctgtgaatgagtattatgtccagaaccagaatacacctccaggcaatggaaacatcaatttcagccacacgaatgagatttccttttcggaggctgacagcgtgggcgcttcaggactactggggtgggatttttcgagaggaaccgcgtatgctgccccacctggtttcacttctaatcgccagcagaaccgcactagccgtggcagctttgtgccggacgagtgtgagcgtgagccccagacttatttctcgttcactgagctgcttgaggctgacgacgcacagcttgatgacaacgcgtttgggatagctactggtctgcaaggtgatgctaacggctccggaagctttgtccaacgaggagttggttttggtggtacgtctttcatggcagaagatggagcttcgaatatgaacgtgccaacaaatggtcccacgcctgaagaggtagcgtgccacaacggcacgaacactcagccgccacctgatcccagatgttctgtccgtgacctccgcacacaccggtagtgctctccctgggaaccgaggcgtgtagagcctgtcgagagcggcaactggagttgtggtggttgccgcgaatggtgatgatgagcctctaaacttcactgccagttgcaatggcaggtaaatccaacggcatcccatatacttaccggatttctcgttaccggtcgctgggttgctgctgtcatgatgtgctactgatttctcggatcatttcattatttgatctaatcttaaccatcatacagttagagtagcgattaccgcttggggtttacactgtacatactgaaaggatgggtcgacgacgacgtaccatttccattctttaggctatttatttttttggggtgggagttttagagctaggatgctgctagcacatagcaacatggtatatgggtcgtctggaaaaaaaaaaccatattattatgtaactgtattaaccttggttgtctcttctcgccttctgagatacaagtgtctcttggtcagagtgggtggccgtttctatgcctatgcagctatgctccagtattgtcgcatttgcctaggtaaaataactaattacatggcatgcgatttatgttccattcttcctttagatgaattactctctccagccatcaacacaagcgaactttttggatgccgtttaatctgtg

SEQ ID NO: 21198 - DNA, 1867 bp, Zea Mays
cttttttggctttccggtcttttggtggtgtactggtggctggctggctcctgaatcgtcgctgtctctctctctctctcgctttcggcagctcagctgcactccacagtctgcctccactccactctccaccttttgctgtcgccttcctccccttgccttccctgtgtcctcccctccctcgcgccgcaaaaaacgccggagggaggaagagagagagagagagagagagagagagagagagagggccaggctgagcttactggcggcgagctggagaagaaggaaggagcatggccatgccggcggcgctgcttctcttcctcctagtcctctccgccttcgaggccggggagcttccacgctgctcggctgctgctgcagtcctcgtccatgatgacttgagtccggttcaagacaccagccccatcgcaacagtcccctccacgaacccgtcgcccgccatcatcaccgtgccttccacgaatcccaccatcaccatcccttccttgaaccctctgcccacacccatcacagccccctcaacaaacatcccttctccttccaccatgctgccgccggttccggtcatatatccgctgccaacgccgtcaacatcctccccaccagctgtgccggtcaccaatcctgctgtcaccacgccttccacgtcccctccgtcgacaccaacaccattcaacaacccaccattgttgaacccaacgccgacccctgctcctacagtcacggccccagctgcttcaggccgggaggtctggtgcgtggccaaggctgctggctcaagtgaagccgcgcttcagaacgcgttggactacgcgtgcggcattggaggagtagattgttcggcgattcagccgtcagggagctgctactatccgaataccatccaagcccatgcatcctacgcgttcaacacttattaccagagaaaccctgtttcttccagctgcgactttggggggacggcaatgctcgtcactgctaatccaagctctgggagctgtgtctttgcatcatcattgccatcgtcgtcaagctctactgttggatatgatcccgcgtccacggctactccatcgtcaccgtcgtctggttccgactcgggagcacccgtgctgaatgccagtggggcaggttcttctgaatcatcagattttggctttgacatcccaggagctgtcaatttgggcagcggttggaggtcagtctcaccacccaactggccctgggcagccctggtctggattctagtagcattgtgtgtgcacaaagaagggatggtctgaaaacctgtgagagcatctgcagtattttggagacagattgcaaagtagccaggtggtgtagagaccagtagagagctacaaagctagagaatcggaccttagcatggctaagtttatcgatgtatgtatgaagtatggtgctccagttcgtagtagcaactgggaactgatgtagtcctgatggatggacttggactcaccctgatcggtcactcaggcactctgtagtgtagatgtaggcatgtagctgctgctagtagtagtagtaatgcaagtactgctttgcatcgtatgggtgagagagttgaacaactaatggaatgcaaatgtgccgttttgttttagctactggtctgcgacaccgtaacagtaagcctgtaaagtatagatcacaaggaaggaagggaggggaaatctctaacccaaggcactcgtaaaaatgttaaatatcatcaataaattaacatgtttgaatcaataaatgtttctgaacataatatacagcttattgtacacactagcatctgcaataacattttttgcataataaaaaaggaaaa

SEQ ID NO: 21199 - DNA, 1469 bp, Zea Mays
cttttttggctttccggtcttttggtggtgtactggtggctggctggctcctgaatcgtcgctgtctctctctctctctcgctttcggcagctcagctgcactccacagtctgcctccactccactctccaccttttgctgtcgccttcctccccttgccttccctgtgtcctcccctccctcgcgccgcaaaaaacgccggagggaggaagagagagagagagagagagagagagagagagagagggccaggctgagcttactggcggcgagctggagaagaaggaaggagcatggccatgccggcggcgctgcttctcttcctcctagtcctctccgccttcgaggccggggagcttccacgctgctcggctgctgctgcaggtaaaccggcagtcctcgtccatgatgacttgagtccggttcaagacaccagccccatcgcaacagtcccctccacgaacccgtcgcccgccatcatcaccgtgccttccacgaatcccaccatcaccatcccttccttgaaccctctgcccacacccatcacagccccctcaacaaacatcccttctccttccaccatgctgccgccggttccggtcatatatccgctgccaacgccgtcaacatcctccccaccagctgtgccggtcaccaatcctgctgtcaccacgccttccacgtcccctccgtcgacaccaacaccattcaacaacccaccattgttgaacccaacgccgacccctgctcctacagtcacggccccagctgcttcaggccgggaggtctggtgcgtggccaaggctgctggctcaagtgaagccgcgcttcagaacgcgttggactacgcgtgcggcattggaggagtagattgttcggcgattcagccgtcagggagctgctactatccgaataccatccaagcccatgcatcctacgcgttcaacacttattaccagagaaaccctgtttcttccagctgcgactttggggggacggcaatgctcgtcactgctaatccaagctctgggagctgtgtctttgcatcatcattgccatcgtcgtcaagctctactgttggatatgatcccgcgtccacggctactccatcgtcaccgtcgtctggttccgactcgggagcacccgtgctgaatgccagtggggcaggttcttctgaatcatcagattttggctttgacatcccaggagctgtcaatttgggcagcggttggagcagcctaacaggtgaactgagaaaataaatcaaaggacaacggtatcaagagagacaactgcaaagcatgagaaatacattttctgcctaattcaacatcagtacacaatttctgcctatgatgtataatttttccgcagtcctacttattgttgtataactaacagaattgtagaagtaatcatgttgtacacaaacctggtcacttattcaataagacataatttaccttgac

SEQ ID NO: 21200 - DNA, 1609 bp, Zea Mays
aaattaccaccactcacacagtcacattaaagtgaagggaacgcagcacccattctcttccaacctttttctcagaaatggggtgccatgataaagggacttgctatatttcaggtaaaccggcagtcctcgtccatgatgacttgagtccggttcaagacaccagccccatcgcaacagtcccctccacgaacccgtcgcccgccatcatcaccgtgccttccacgaatcccaccatcaccatcccttccttgaaccctctgcccacacccatcacagccccctcaacaaacatcccttctccttccaccatgctgccgccggttccggtcatatatccgctgccaacgccgtcaacatcctccccaccagctgtgccggtcaccaatcctgctgtcaccacgccttccacgtcccctccgtcgacaccaacaccattcaacaacccaccattgttgaacccaacgccgacccctgctcctacagtcacggccccagctgcttcaggccgggaggtctggtgcgtggccaaggctgctggctcaagtgaagccgcgcttcagaacgcgttggactacgcgtgcggcattggaggagtagattgttcggcgattcagccgtcagggagctgctactatccgaataccatccaagcccatgcatcctacgcgttcaacacttattaccagagaaaccctgtttcttccagctgcgactttggggggacggcaatgctcgtcactgctaatccaagctctgggagctgtgtctttgcatcatcattgccatcgtcgtcaagctctactgttggatatgatcccgcgtccacggctactccatcgtcaccgtcgtctggttccgactcgggagcacccgtgctgaatgccagtggggcaggttcttctgaatcatcagattttggctttgacatcccaggagctgtcaatttgggcagcggttggaggtcagtctcaccacccaactggccctgggcagccctggtctggattctagtagcattgtgtgtgcacaaagaagggatggtctgaaaacctgtgagagcatctgcagtattttggagacagattgcaaagtagccaggtggtgtagagaccagtagagagctacaaagctagagaatcggaccttagcatggctaagtttatcgatgtatgtatgaagtatggtgctccagttcgtagtagcaactgggaactgatgtagtcctgatggatggacttggactcaccctgatcggtcactcaggcactctgtagtgtagatgtaggcatgtagctgctgctagtagtagtagtaatgcaagtactgctttgcatcgtatgggtgagagagttgaacaactaatggaatgcaaatgtgccgttttgttttagctactggtctgcgacaccgtaacagtaagcctgtaaagtatagatcacaaggaaggaagggaggggaaatctctaacccaaggcactcgtaaaaatgttaaatatcatcaataaattaacatgtttgaatcaataaatgtttctgaacataatatacagcttattgtacacactagcatctgcaataacattttttgcataataaaaaaggaaaa

SEQ ID NO: 21201 - DNA, 3216 bp, Zea Mays
atggagaggagctgtttgacccgcgtgtcgcacagggctaactccaaagctcaggtcaacgagctgctgctggtctggaggacagcaactgatgcctttgccgtgccatggaaagaattgaaaaggtatcaaccatctgctggcctggaaaaagcttggagcaggaagagagaaatggtggcatggcaatatggcatgcattcccatgcgcagtgcacaacacaatgcctggactggattcaattcaacggccgaggcgctgcctccgcttccctccaaatgttgcgctcccgagctctcctcggcagcctcccacccccgagtcgccccgacaactcctcccagcctccaaccaccgagagcgtagaactcgtaatccaaggccagcgcgcgcacgccattgcctcgccccgtcccgctccggcgcccccccaccgccagcatgcacaggctcgccccgccccggtcgtgctgagacgacgtacctatactatacacatacacacggacacaccaaacgacgccaacgtggcgacgtcggcgaggaagatgagccagctccccgccccggccagccggctgtgggaagcgagcatccgcaagctccagaccatccgccgcgcgacgacagccacagggcccgcggccgacggcgccgatggcggggccgccctcacgcccagtctcctctccatcaattcctcctccgcgtccagcactatctaccagtaccaccacgaggacggcgaggacagcgacacgagcaccgatggcggcaacgattcggaagccggcgaggacgaggacgccggcgagcccacgcacgcggagcagctgctgcccagcggggacttctaccagggcgacctgcgcggggaccagccgcacggcgcgggcaagttcctctggaccgacggcagcatgtacgagggctcctggcgccgcggccgcgcgtccggccgcggcaagttctcatggacctcgggggccacctacgagggcgacttcgccggcgggtacatgcacggccagggcacctacatcggcgagttcggggacaccttcgcggggctctgggccaacaacctccgccacggccggggcacgcaggcgtacgccaacggcgacgtgtacgacggccactggcgcgacggcctgcaggacggccacgggcgctacatctggcgccacggccacgagtacatcggcacctggagggccggcgacatgcacggctgcgggaccgtgatctgggcggacggcgaccgctacgacggcgcctgggaggacaccaggcccaagggccagggcacgttccgctgggccgacggcgggatgtacatcggcacctggtgcgaggaggccggcgccgtgcacgccgacggcgtctactacccgccgtccggtggccccgcggtgcccgtgccccgcgagccctgcgaccccatcacggcgctgctccaggagctagaggtgtgcgagggcaagacggcgtcgctcatgccgtcgcagaaggtcctcacgtggcccggcgtggaggccgtgcagaagaagccggtgtggcgcccgcccaaggttagccttgaccaaggcaggaggtccagcgtgagcaggaggagcagcgcgtcgctggacctggacatgctgcagccggccgccgccgagggtggcgagaccgaggaggtgcgcgcggacaggtcgtgcctgcggacgtcgtcgtgcatgcgcacgccgccgaggccgggcaagaagcagggggagaccatctccaaggggcacaggaactacgagctcatgctcaacctgcagcttggcatcaggcacgctgttggtaggcagtcagcgccaaatacgctggatctcaagtcatcggcattcgatccaaaagagaagatatggacaaggtttcctcccgaaggatcaaagcatactcctcctcaccagtcctgcgatttccggtggaaagactactgccccctggttttcaggactctgcgcaagctcttcgacgtcgatccagcagactacatgatctccatttgcggggacgaggcgctccgggaactgtcgtctcctggtaagagcgggagcttcttctacctcacgaacgatgacaagtacatgatcaaaacgatgaagaaggcagaggttaaagtgctccttaggatgcttccagcctactacaaacacgtccgctttttcgaaaacactctgatcactaaattcttcggcctgcactgcgtcaacgtcaagcttacaggagctatccagaaaaaggtccggtttgttataatggggaaccttttctgctccagctacgcgatccacaggcgcttcgacctgaaagggtcctcgcatggtcgcatgactgacaaacccatcgatcagatcagcgagcacacaacgttgaaggatctcgatcttaatttcatcttccggctgccagggacctggtttgaggaattctgcaggcaagtggacaaagactgcgaattactggaggcggagaggatcatggattatagtcttttggtcggtattcacttcaaggacagatgcaaagacagcagcaatggtgacaatgggacgtcacagaatgctgaagattctgaagaaaacagaaaaggaccattgagactagggatctgcatgccctcgagggtggagaacgtagtgaagaaccctgagagtgaatctccgctcattggcgagcccacaggcgagttccaggacgtcatcctgttctttggaatcatcgacatcctgcaggactacgatatcagtaagaagctggagcacgcttacaaatccatgcagtacgaccccaactccatatcagctgttgacccgaagcaatactgcaagcggttcagggacttcatttttaaggctttcgccgacgatgtacagtaactagctaatttgacagaacagggagccgtttaactaaggcaattaacacttcttaatttggctggtgttcttttttcccacacaacaacagtgttccttttaggtaaaatcgttgatgcaatctgttgtagataaaaacacttcaatagtgcagcaatttcaccctttttttctttcttgtagcatttgtaaattttaaacattttttgtgtaattaaaactagaataacacttcagttttgatgttctatgattgaactggattgtttatatagtcttctaatacaacaatgctcagttttg

SEQ ID NO: 21202 - DNA, 3903 bp, Zea Mays
cgcaacttttcatttccacaggagcccaatgctaacccctcactcctaagcgccgtcgcgatctgctgcggtggccgctgccgtcgccgtccatccccaccgcctcgaccacgccaccgacgccgcctctcgctccccctcgccgcgccgcccgaacgccacgatgcgtcacctcctcctctcccgcttcctccgccgcggtggcggcagcggcatccccaacggccactaccaccacctccccctcctccgcgccctctcctcctccccctccccggtctcctcggacgcagagctccgcaagtacgcgggctacgcgctgcttcttctcggctgcggcgccgcgacctactactccttcccgttccccgccgacgcgctgcacaagaaggccgtgccattccggtacgcgccgctgccggaggacctccacgccgtctccaactggagcggcacgcacgaggtccacgcccgcgtcctgctccagccggactcgctcccggccctcgagggcgcgctcgccgccgcgcacaaggagcgccgcaagctcaggcccctcggctccggcctgtcccccaatgggatcgcgctctcccgcgctgggatggtcaacctcgcgctcatggacaaggtgctcgacgtcgacgccaagaagaagaccgtcacggtgcaggctgggatacgtgtcgcggagctcgtcgacgcgcttcgggaacatggcctcacgctgcagaactttgcgtccattcgggagcagcaggtcggagggttcactcaggttggtgcccatggcactggtgcaacattacctcctgttgatgagcaagtcattagcatgaaactggttacccctgccaaagggacaatagagctgtcgagggagaaggatcctgagttgttttatcttgctcgctgtggacttggtggcctaggtgttgttgcagaagttacccttcagtgcgtagaaagacaccagcttgtggaacacacatttgtttccaatgcagatgaagtcaagaaaaaccacaagaagtggctatccgaaaacaaacatattaagtacttgtggattccatatactgacacggttgttgttgtccaatgcaatcctccctcaaagtggataaccccaaagttggcatcaaaatatggaaaagatgaagctttacagcatgttcgggacctttatcgcgagtcactgaaaaaatatagaactgaaacagaaagtaaagacccagaaatagatacactttcatttactgagctgagggacaagctgcttgcccttgatcctctggataaagatcatgtggtgaaaatcaataaagcggaagctgagtattggaagaagtcagaagggtatcgcatgggctggagtgatgaaatactgggcttcgattgtggtgggcagcagtgggtttctgaaaactgcttccccactggaaccctagcaaagccaagtatgaaggatcttgattatatagataagctgctgcagttgattgaaaaggaggagatacccgcacctggacctatcgagcagcgttggactgcccgcagcaagagcccgatgagcccggcatcaagctctgaagaagatgatgtattttcatgggttggtattataatgtatctgccaacatctgatgctcgccaaaggaaggaaatcacagaggagttcttcagttacaggagcctggcgcgaagtctctgggatgattattccgcctatgaacactgggccaagatcgaggttccaaaagacaaggacgaacttgccgaactccaggcccggctgaggaagcgttttcctgtcgatgcatataacaaggcacgtatggagctggaccccaacaaggtgctctcaaacgccaagttggagaagatgttcccagtgttggagcctcctcaccagacaaagtaatacgtgttgaagagcgcagagcaagggcacgtacgtagaacttggttgcaggaggcttaacccatacacatttgtagcactgttagttcctgtcatgattctgggaccctaccctggctgtcaaatgtgatggcgattaagattggtcactgaaataaagttttttttgaagttcgaaatggaacccttttgaacgcgagatgtgctgccagaaggagatgagccttttgaactctctcccaaagaaaaatgagcattcaaaatactgcgactatctgaagcacaacgtagccttcggttatggcccacgggcggtagcagctagcagactagtagtaggcttcggcttgtcggcgcacccaaaaggccaaaaccacccaaaaaccccagcgcacccaacccaagagcgaaaatggatccgcaccagttcgccccctcccagcagtcggcgctgaccatggaatcggcggagagcacggccgccgccgccgcgcgggcgtccaacggcgctgcccgagctgtcgtcgaggacgacgacgaggacgacgacgtccccgaggtggccgcctgcatatcgacgatgctcgaccgcgggggtagcgtggagagccaccgcctcttcctggcgcgccgcaccgcgctggagatgctccgcgaccgcgggtacgccgttccggaggaagagctcgcccgcaccctcccggagttccgcgcctggtgggaatacaggccggagctcgaacgcctcgccttctccactaccctcacctccgacccgtccagcaaggtgaaagttgtgttctgtccacctggacctgtcaaaatcgcagctatccggctgatatataccgaagtcaaagatgagaacttgtccagactgattctgatactgcagggcaaaataatgtctacaaccagagaatccatcaaggagatctttcgatttaaagttgacacattccagatcacggaattactggtgaacatcactaagcatgtcctcaagcccaagcatgaagtgttgactgcagaggggaaagctaagctcctgaaggagtacaatgtggtggattcacagttgcctcgcatgctggagaatgatgctgttgctcgctattatgggctaggcaagggaactgttgttaaggttatatacgacagcgagcttaccgggaaccacgtgacgtaccgatgcattacctgaggggcccatgtgtttcggtggatgaagtctcgtaagcacccaattgtgcaggatgaagcttgctgtaagctattggtaaaatcatcttgcgccattgccgtaccttaagtgcttggtgttaatcttggaaacagtgagacaactaatcctgtagtgagttatctcgatcactttcagatgtctctgatggccttcgaggctgttaccttagctgtcctcttgcaggctacagctgaagtgtgttgcaaaatcacttgattcgaaccaagctgtatccagttatggattctgttaggttttgcaaatcagtgacaaacatctgtcacaaacaatagtccagaggctaagtaaggtgtcctataatatgcagctaactgtgccttggtctgtttttctggggcagaatttcttcgttgccctctgccttccactttcgtctgctgctgctcttgctcgtggggttactgcaatacttgctgttgctgtcactctgctggtgatgtactgctgttcctggtggagtggtgggagtgctccctgcatctgcttttcagtatgtgaggcttgagcttgctcatgtctgatagccggcactggttttatgaagaactcgtcagctactttctccagacatctgatctaggagatgatccagtctgaaacaaaagtatcttttgattttatttgacttcgtcaataaaccgggacaaagcctgtttcatttcatggatacggcaatatgaatggaatttaatatctacgatatcaatgtgct

SEQ ID NO: 21203 - DNA, 3110 bp, Zea Mays
ccctcactcctaagcgccgtcgcgatctgctgcggtggccgctgccgtcgccgtccatccccaccgcctcgaccacgccaccgacgccgcctctcgctccccctcgccgcgccgcccgaacgccacgatgcgtcacctcctcctctcccgcttcctccgccgcggtggcggcagcggcatccccaacggccactaccaccacctccccctcctccgcgccctctcctcctccccctccccggtctcctcggacgcagagctccgcaagtacgcgggctacgcgctgcttcttctcggctgcggcgccgcgacctactactccttcccgttccccgccgacgcgctgcacaagaaggccgtgccattccggtacgcgccgctgccggaggacctccacgccgtctccaactggagcggcacgcacgaggtccacgcccgcgtcctgctccagccggactcgctcccggccctcgagggcgcgctcgccgccgcgcacaaggagcgccgcaagctcaggcccctcggctccggcctgtcccccaatgggatcgcgctctcccgcgctgggatggtcaacctcgcgctcatggacaaggtgctcgacgtcgacgccaagaagaagaccgtcacggtgcaggctgggatacgtgtcgcggagctcgtcgacgcgcttcgggaacatggcctcacgctgcagaactttgcgtccattcgggagcagcaggtcggagggttcactcaggttggtgcccatggcactggtgcaacattacctcctgttgatgagcaagtcattagcatgaaactggttacccctgccaaagggacaatagagctgtcgagggagaaggatcctgagttgttttatcttgctcgctgtggacttggtggcctaggtgttgttgcagaagttacccttcagtgcgtagaaagacaccagcttgtggaacacacatttgtttccaatgcagatgaagtcaagaaaaaccacaagaagtggctatccgaaaacaaacatattaagtacttgtggattccatatactgacacggttgttgttgtccaatgcaatcctccctcaaagtggataaccccaaagttggcatcaaaatatggaaaagatgaagctttacagcatgttcgggacctttatcgcgagtcactgaaaaaatatagaactgaaacagaaagtaaagacccagaaatagatacactttcatttactgagctgagggacaagctgcttgcccttgatcctctggataaagatcatgtggtgaaaatcaataaagcggaagctgagtattggaagaagtcagaagggtatcgcatgggctggagtgatgaaatactgggcttcgattgtggtgggcagcagtgggtttctgaaaactgcttccccactggaaccctagcaaagccaagtatgaaggatcttgattatatagataagctgctgcagttgattgaaaaggaggagatacccgcacctggacctatcgagcagcgttggactgcccgcagcaagagcccgatgagcccggcatcaagctctgaagaagatgatgtattttcatgggttggtattataatgtatctgccaacatctgatgctcgccaaaggaaggaaatcacagaggagttcttcagttacaggagcctggcgcgaagtctctgggatgattattccgcctatgaacactgggccaagatcgaggttccaaaagacaaggacgaacttgccgaactccaggcccggctgaggaagcgttttcctgtcgatgcatataacaaggcacgtatggagctggaccccaacaaggtgctctcaaacgccaagttggagaagatgttcccagtgttggagcctcctcaccagacaaagtaatacgtgttgaagagcgcagagcaagggcacgtgaaagttgtgttctgtccacctggacctgtcaaaatcgcagctatccggctgatatataccgaagtcaaagatgagaacttgtccagactgattctgatactgcagggcaaaataatgtctacaaccagagaatccatcaaggagatctttcgatttaaagttgacacattccagatcacggaattactggtgaacatcactaagcatgtcctcaagcccaagcatgaagtgttgactgcagaggggaaagctaagctcctgaaggagtacaatgtggtggattcacagttgcctcgcatgctggagaatgatgctgttgctcgctattatgggctaggcaagggaactgttgttaaggttatatacgacagcgagcttaccgggaaccacgtgacgtaccgatgcattacctgaggggcccatgtgtttcggtggatgaagtctcgtaagcacccaattgtgcaggatgaagcttgctgtaagctattggtaaaatcatcttgcgccattgccgtaccttaagtgcttggtgttaatcttggaaacagtgagacaactaatcctgtagtgagttatctcgatcactttcagatgtctctgatggccttcgaggctgttaccttagctgtcctcttgcaggctacagctgaagtgtgttgcaaaatcacttgattcgaaccaagctgtatccagttatggattctgttaggttttgcaaatcagtgacaaacatctgtcacaaacaatagtccagaggctaagtaaggtgtcctataatatgcagctaactgtgccttggtctgtttttctggggcagaatttcttcgttgccctctgccttccactttcgtctgctgctgctcttgctcgtggggttactgcaatacttgctgttgctgtcactctgctggtgatgtactgctgttcctggtggagtggtgggagtgctccctgcatctgcttttcagtatgtgaggcttgagcttgctcatgtctgatagccggcactggttttatgaagaactcgtcagctactttctccagacatctgatctaggagatgatccagtctgaaacaaaagtatcttttgattttatttgacttcgtcaataaaccgggacaaagcctgtttcatttcatggatacggcaatatgaatggaatttaatatctacgatatcaatgtgct

SEQ ID NO: 21204 - DNA, 3759 bp, Zea Mays
ccctcactcctaagcgccgtcgcgatctgctgcggtggccgctgccgtcgccgtccatccccaccgcctcgaccacgccaccgacgccgcctctcgctccccctcgccgcgccgcccgaacgccacgatgcgtcacctcctcctctcccgcttcctccgccgcggtggcggcagcggcatccccaacggccactaccaccacctccccctcctccgcgccctctcctcctccccctccccggtctcctcggacgcagagctccgcaagtacgcgggctacgcgctgcttcttctcggctgcggcgccgcgacctactactccttcccgttccccgccgacgcgctgcacaagaaggccgtgccattccggtacgcgccgctgccggaggacctccacgccgtctccaactggagcggcacgcacgaggtccacgcccgcgtcctgctccagccggactcgctcccggccctcgagggcgcgctcgccgccgcgcacaaggagcgccgcaagctcaggcccctcggctccggcctgtcccccaatgggatcgcgctctcccgcgctgggatggtcaacctcgcgctcatggacaaggtgctcgacgtcgacgccaagaagaagaccgtcacggtgcaggctgggatacgtgtcgcggagctcgtcgacgcgcttcgggaacatggcctcacgctgcagaactttgcgtccattcgggagcagcaggtcggagggttcactcaggttggtgcccatggcactggtgcaacattacctcctgttgatgagcaagtcattagcatgaaactggttacccctgccaaagggacaatagagctgtcgagggagaaggatcctgagttgttttatcttgctcgctgtggacttggtggcctaggtgttgttgcagaagttacccttcagtgcgtagaaagacaccagcttgtggaacacacatttgtttccaatgcagatgaagtcaagaaaaaccacaagaagtggctatccgaaaacaaacatattaagtacttgtggattccatatactgacacggttgttgttgtccaatgcaatcctccctcaaagtggataaccccaaagttggcatcaaaatatggaaaagatgaagctttacagcatgttcgggacctttatcgcgagtcactgaaaaaatatagaactgaaacagaaagtaaagacccagaaatagatacactttcatttactgagctgagggacaagctgcttgcccttgatcctctggataaagatcatgtggtgaaaatcaataaagcggaagctgagtattggaagaagtcagaagggtatcgcatgggctggagtgatgaaatactgggcttcgattgtggtgggcagcagtgggtttctgaaaactgcttccccactggaaccctagcaaagccaagtatgaaggatcttgattatatagataagctgctgcagttgattgaaaaggaggagatacccgcacctggacctatcgagcagcgttggactgcccgcagcaagagcccgatgagcccggcatcaagctctgaagaagatgatgtattttcatgggttggtattataatgtatctgccaacatctgatgctcgccaaaggaaggaaatcacagaggagttcttcagttacaggagcctggcgcgaagtctctgggatgattattccgcctatgaacactgggccaagatcgaggttccaaaagacaaggacgaacttgccgaactccaggcccggctgaggaagcgttttcctgtcgatgcatataacaaggcacgtatggagctggaccccaacaaggtgctctcaaacgccaagttggagaagatgttcccagtgttggagcctcctcaccagacaaagtaatacgtgttgaagagcgcagagcaagggcacgtacgtagaacttggttgcaggaggcttaacccatacacatttgtagcactgttagttcctgtcatgattctgggaccctaccctggctgtcaaatgtgatggcgattaagattggtcactgaaataaagttttttttgaagttcgaaatggaacccttttgaacgcgagatgtgctgccagaaggagatgagccttttgaactctctcccaaagaaaaatgagcattcaaaatactgcgactatctgaagcacaacgtagccttcggttatggcccacgggcggtagcagctagcagactagtagtaggcttcggcttgtcggcgcacccaaaaggccaaaaccacccaaaaaccccagcgcacccaacccaagagcgaaaatggatccgcaccagttcgccccctcccagcagtcggcgctgaccatggaatcggcggagagcacggccgccgccgccgcgcgggcgtccaacggcgctgcccgagctgtcgtcgaggacgacgacgaggacgacgacgtccccgaggtggccgcctgcatatcgacgatgctcgaccgcgggggtagcgtggagagccaccgcctcttcctggcgcgccgcaccgcgctggagatgctccgcgaccgcgggtacgccgttccggaggaagagctcgcccgcaccctcccggagttccgcgcctggtgggaatacaggccggagctcgaacgcctcgccttctccactaccctcacctccgacccgtccagcaagggcaaaataatgtctacaaccagagaatccatcaaggagatctttcgatttaaagttgacacattccagatcacggaattactggtgaacatcactaagcatgtcctcaagcccaagcatgaagtgttgactgcagaggggaaagctaagctcctgaaggagtacaatgtggtggattcacagttgcctcgcatgctggagaatgatgctgttgctcgctattatgggctaggcaagggaactgttgttaaggttatatacgacagcgagcttaccgggaaccacgtgacgtaccgatgcattacctgaggggcccatgtgtttcggtggatgaagtctcgtaagcacccaattgtgcaggatgaagcttgctgtaagctattggtaaaatcatcttgcgccattgccgtaccttaagtgcttggtgttaatcttggaaacagtgagacaactaatcctgtagtgagttatctcgatcactttcagatgtctctgatggccttcgaggctgttaccttagctgtcctcttgcaggctacagctgaagtgtgttgcaaaatcacttgattcgaaccaagctgtatccagttatggattctgttaggttttgcaaatcagtgacaaacatctgtcacaaacaatagtccagaggctaagtaaggtgtcctataatatgcagctaactgtgccttggtctgtttttctggggcagaatttcttcgttgccctctgccttccactttcgtctgctgctgctcttgctcgtggggttactgcaatacttgctgttgctgtcactctgctggtgatgtactgctgttcctggtggagtggtgggagtgctccctgcatctgcttttcagtatgtgaggcttgagcttgctcatgtctgatagccggcactggttttatgaagaactcgtcagctactttctccagacatctgatctaggagatgatccagtctgaaacaaaagtatcttttgattttatttgacttcgtcaataaaccgggacaaagcctgtttcatttcatggatacggcaatatgaatggaatttaatatctacgatatcaatgtgct

SEQ ID NO: 21205 - DNA, 3087 bp, Zea Mays
ccctcactcctaagcgccgtcgcgatctgctgcggtggccgctgccgtcgccgtccatccccaccgcctcgaccacgccaccgacgccgcctctcgctccccctcgccgcgccgcccgaacgccacgatgcgtcacctcctcctctcccgcttcctccgccgcggtggcggcagcggcatccccaacggccactaccaccacctccccctcctccgcgccctctcctcctccccctccccggtctcctcggacgcagagctccgcaagtacgcgggctacgcgctgcttcttctcggctgcggcgccgcgacctactactccttcccgttccccgccgacgcgctgcacaagaaggccgtgccattccggtacgcgccgctgccggaggacctccacgccgtctccaactggagcggcacgcacgaggtccacgcccgcgtcctgctccagccggactcgctcccggccctcgagggcgcgctcgccgccgcgcacaaggagcgccgcaagctcaggcccctcggctccggcctgtcccccaatgggatcgcgctctcccgcgctgggatggtcaacctcgcgctcatggacaaggtgctcgacgtcgacgccaagaagaagaccgtcacggtgcaggctgggatacgtgtcgcggagctcgtcgacgcgcttcgggaacatggcctcacgctgcagaactttgcgtccattcgggagcagcaggtcggagggttcactcaggttggtgcccatggcactggtgcaacattacctcctgttgatgagcaagtcattagcatgaaactggttacccctgccaaagggacaatagagctgtcgagggagaaggatcctgagttgttttatcttgctcgctgtggacttggtggcctaggtgttgttgcagaagttacccttcagtgcgtagaaagacaccagcttgtggaacacacatttgtttccaatgcagatgaagtcaagaaaaaccacaagaagtggctatccgaaaacaaacatattaagtacttgtggattccatatactgacacggttgttgttgtccaatgcaatcctccctcaaagtggataaccccaaagttggcatcaaaatatggaaaagatgaagctttacagcatgttcgggacctttatcgcgagtcactgaaaaaatatagatgcttttcagaactgaaacagaaagtaaagacccagaaatagatacactttcatttactgagctgagggacaagctgcttgcccttgatcctctggataaagatcatgtggtgaaaatcaataaagcggaagctgagtattggaagaagtcagaagggtatcgcatgggctggagtgatgaaatactgggcttcgattgtggtgggcagcagtgggtttctgaaaactgcttccccactggaaccctagcaaagccaagtatgaaggatcttgattatatagataagctgctgcagttgattgaaaaggaggagatacccgcacctggacctatcgagcagcgttggactgcccgcagcaagagcccgatgagcccggcatcaagctctgaagaagatgatgtattttcatgggttggtattataatgtatctgccaacatctgatgctcgccaaaggaaggaaatcacagaggagttcttcagttacaggagcctggcgcgaagtctctgggatgattattccgcctatgaacactgggccaagatcgaggttccaaaagacaaggacgaacttgccgaactccaggcccggctgaggaagcgttttcctgtcgatgcatataacaaggcacgtatggagctggaccccaacaaggtgctctcaaacgccaagttggagaagatgttcccagtgttggagcctcctcaccagacaaagtgaaagttgtgttctgtccacctggacctgtcaaaatcgcagctatccggctgatatataccgaagtcaaagatgagaacttgtccagactgattctgatactgcagggcaaaataatgtctacaaccagagaatccatcaaggagatctttcgatttaaagttgacacattccagatcacggaattactggtgaacatcactaagcatgtcctcaagcccaagcatgaagtgttgactgcagaggggaaagctaagctcctgaaggagtacaatgtggtggattcacagttgcctcgcatgctggagaatgatgctgttgctcgctattatgggctaggcaagggaactgttgttaaggttatatacgacagcgagcttaccgggaaccacgtgacgtaccgatgcattacctgaggggcccatgtgtttcggtggatgaagtctcgtaagcacccaattgtgcaggatgaagcttgctgtaagctattggtaaaatcatcttgcgccattgccgtaccttaagtgcttggtgttaatcttggaaacagtgagacaactaatcctgtagtgagttatctcgatcactttcagatgtctctgatggccttcgaggctgttaccttagctgtcctcttgcaggctacagctgaagtgtgttgcaaaatcacttgattcgaaccaagctgtatccagttatggattctgttaggttttgcaaatcagtgacaaacatctgtcacaaacaatagtccagaggctaagtaaggtgtcctataatatgcagctaactgtgccttggtctgtttttctggggcagaatttcttcgttgccctctgccttccactttcgtctgctgctgctcttgctcgtggggttactgcaatacttgctgttgctgtcactctgctggtgatgtactgctgttcctggtggagtggtgggagtgctccctgcatctgcttttcagtatgtgaggcttgagcttgctcatgtctgatagccggcactggttttatgaagaactcgtcagctactttctccagacatctgatctaggagatgatccagtctgaaacaaaagtatcttttgattttatttgacttcgtcaataaaccgggacaaagcctgtttcatttcatggatacggcaatatgaatggaatttaatatctacgatatcaatgtgct

SEQ ID NO: 21206 - DNA, 3878 bp, Zea Mays
ccctcactcctaagcgccgtcgcgatctgctgcggtggccgctgccgtcgccgtccatccccaccgcctcgaccacgccaccgacgccgcctctcgctccccctcgccgcgccgcccgaacgccacgatgcgtcacctcctcctctcccgcttcctccgccgcggtggcggcagcggcatccccaacggccactaccaccacctccccctcctccgcgccctctcctcctccccctccccggtctcctcggacgcagagctccgcaagtacgcgggctacgcgctgcttcttctcggctgcggcgccgcgacctactactccttcccgttccccgccgacgcgctgcacaagaaggccgtgccattccggtacgcgccgctgccggaggacctccacgccgtctccaactggagcggcacgcacgaggtccacgcccgcgtcctgctccagccggactcgctcccggccctcgagggcgcgctcgccgccgcgcacaaggagcgccgcaagctcaggcccctcggctccggcctgtcccccaatgggatcgcgctctcccgcgctgggatggtcaacctcgcgctcatggacaaggtgctcgacgtcgacgccaagaagaagaccgtcacggtgcaggctgggatacgtgtcgcggagctcgtcgacgcgcttcgggaacatggcctcacgctgcagaactttgcgtccattcgggagcagcaggtcggagggttcactcaggttggtgcccatggcactggtgcaacattacctcctgttgatgagcaagtcattagcatgaaactggttacccctgccaaagggacaatagagctgtcgagggagaaggatcctgagttgttttatcttgctcgctgtggacttggtggcctaggtgttgttgcagaagttacccttcagtgcgtagaaagacaccagcttgtggaacacacatttgtttccaatgcagatgaagtcaagaaaaaccacaagaagtggctatccgaaaacaaacatattaagtacttgtggattccatatactgacacggttgttgttgtccaatgcaatcctccctcaaagtggataaccccaaagttggcatcaaaatatggaaaagatgaagctttacagcatgttcgggacctttatcgcgagtcactgaaaaaatatagatgcttttcagaactgaaacagaaagtaaagacccagaaatagatacactttcatttactgagctgagggacaagctgcttgcccttgatcctctggataaagatcatgtggtgaaaatcaataaagcggaagctgagtattggaagaagtcagaagggtatcgcatgggctggagtgatgaaatactgggcttcgattgtggtgggcagcagtgggtttctgaaaactgcttccccactggaaccctagcaaagccaagtatgaaggatcttgattatatagataagctgctgcagttgattgaaaaggaggagatacccgcacctggacctatcgagcagcgttggactgcccgcagcaagagcccgatgagcccggcatcaagctctgaagaagatgatgtattttcatgggttggtattataatgtatctgccaacatctgatgctcgccaaaggaaggaaatcacagaggagttcttcagttacaggagcctggcgcgaagtctctgggatgattattccgcctatgaacactgggccaagatcgaggttccaaaagacaaggacgaacttgccgaactccaggcccggctgaggaagcgttttcctgtcgatgcatataacaaggcacgtatggagctggaccccaacaaggtgctctcaaacgccaagttggagaagatgttcccagtgttggagcctcctcaccagacaaagtaatacgtgttgaagagcgcagagcaagggcacgtacgtagaacttggttgcaggaggcttaacccatacacatttgtagcactgttagttcctgtcatgattctgggaccctaccctggctgtcaaatgtgatggcgattaagattggtcactgaaataaagttttttttgaagttcgaaatggaacccttttgaacgcgagatgtgctgccagaaggagatgagccttttgaactctctcccaaagaaaaatgagcattcaaaatactgcgactatctgaagcacaacgtagccttcggttatggcccacgggcggtagcagctagcagactagtagtaggcttcggcttgtcggcgcacccaaaaggccaaaaccacccaaaaaccccagcgcacccaacccaagagcgaaaatggatccgcaccagttcgccccctcccagcagtcggcgctgaccatggaatcggcggagagcacggccgccgccgccgcgcgggcgtccaacggcgctgcccgagctgtcgtcgaggacgacgacgaggacgacgacgtccccgaggtggccgcctgcatatcgacgatgctcgaccgcgggggtagcgtggagagccaccgcctcttcctggcgcgccgcaccgcgctggagatgctccgcgaccgcgggtacgccgttccggaggaagagctcgcccgcaccctcccggagttccgcgcctggtgggaatacaggccggagctcgaacgcctcgccttctccactaccctcacctccgacccgtccagcaaggtgaaagttgtgttctgtccacctggacctgtcaaaatcgcagctatccggctgatatataccgaagtcaaagatgagaacttgtccagactgattctgatactgcagggcaaaataatgtctacaaccagagaatccatcaaggagatctttcgatttaaagttgacacattccagatcacggaattactggtgaacatcactaagcatgtcctcaagcccaagcatgaagtgttgactgcagaggggaaagctaagctcctgaaggagtacaatgtggtggattcacagttgcctcgcatgctggagaatgatgctgttgctcgctattatgggctaggcaagggaactgttgttaaggttatatacgacagcgagcttaccgggaaccacgtgacgtaccgatgcattacctgaggggcccatgtgtttcggtggatgaagtctcgtaagcacccaattgtgcaggatgaagcttgctgtaagctattggtaaaatcatcttgcgccattgccgtaccttaagtgcttggtgttaatcttggaaacagtgagacaactaatcctgtagtgagttatctcgatcactttcagatgtctctgatggccttcgaggctgttaccttagctgtcctcttgcaggctacagctgaagtgtgttgcaaaatcacttgattcgaaccaagctgtatccagttatggattctgttaggttttgcaaatcagtgacaaacatctgtcacaaacaatagtccagaggctaagtaaggtgtcctataatatgcagctaactgtgccttggtctgtttttctggggcagaatttcttcgttgccctctgccttccactttcgtctgctgctgctcttgctcgtggggttactgcaatacttgctgttgctgtcactctgctggtgatgtactgctgttcctggtggagtggtgggagtgctccctgcatctgcttttcagtatgtgaggcttgagcttgctcatgtctgatagccggcactggttttatgaagaactcgtcagctactttctccagacatctgatctaggagatgatccagtctgaaacaaaagtatcttttgattttatttgacttcgtcaataaaccgggacaaagcctgtttcatttcatggatacggcaatatgaatggaatttaatatctacgatatcaatgtgct

SEQ ID NO: 21207 - DNA, 1968 bp, Zea Mays
cttccctccattgaatctcatgcagaaataagagaactgaaacagaaagtaaagacccagaaatagatacactttcatttactgagctgagggacaagctgcttgcccttgatcctctggataaagatcatgtggtgaaaatcaataaagcggaagctgagtattggaagaagtcagaagggtatcgcatgggctggagtgatgaaatactgggcttcgattgtggtgggcagcagtgggtttctgaaaactgcttccccactggaaccctagcaaagccaagtatgaaggatcttgattatatagataagctgctgcagttgattgaaaaggaggagatacccgcacctggacctatcgagcagcgttggactgcccgcagcaagagcccgatgagcccggcatcaagctctgaagaagatgatgtattttcatgggttggtattataatgtatctgccaacatctgatgctcgccaaaggaaggaaatcacagaggagttcttcagttacaggagcctggcgcgaagtctctgggatgattattccgcctatgaacactgggccaagatcgaggttccaaaagacaaggacgaacttgccgaactccaggcccggctgaggaagcgttttcctgtcgatgcatataacaaggcacgtatggagctggaccccaacaaggtgctctcaaacgccaagttggagaagatgttcccagtgttggagcctcctcaccagacaaagtaatacgtgttgaagagcgcagagcaagggcacgtgaaagttgtgttctgtccacctggacctgtcaaaatcgcagctatccggctgatatataccgaagtcaaagatgagaacttgtccagactgattctgatactgcagggcaaaataatgtctacaaccagagaatccatcaaggagatctttcgatttaaagttgacacattccagatcacggaattactggtgaacatcactaagcatgtcctcaagcccaagcatgaagtgttgactgcagaggggaaagctaagctcctgaaggagtacaatgtggtggattcacagttgcctcgcatgctggagaatgatgctgttgctcgctattatgggctaggcaagggaactgttgttaaggttatatacgacagcgagcttaccgggaaccacgtgacgtaccgatgcattacctgaggggcccatgtgtttcggtggatgaagtctcgtaagcacccaattgtgcaggatgaagcttgctgtaagctattggtaaaatcatcttgcgccattgccgtaccttaagtgcttggtgttaatcttggaaacagtgagacaactaatcctgtagtgagttatctcgatcactttcagatgtctctgatggccttcgaggctgttaccttagctgtcctcttgcaggctacagctgaagtgtgttgcaaaatcacttgattcgaaccaagctgtatccagttatggattctgttaggttttgcaaatcagtgacaaacatctgtcacaaacaatagtccagaggctaagtaaggtgtcctataatatgcagctaactgtgccttggtctgtttttctggggcagaatttcttcgttgccctctgccttccactttcgtctgctgctgctcttgctcgtggggttactgcaatacttgctgttgctgtcactctgctggtgatgtactgctgttcctggtggagtggtgggagtgctccctgcatctgcttttcagtatgtgaggcttgagcttgctcatgtctgatagccggcactggttttatgaagaactcgtcagctactttctccagacatctgatctaggagatgatccagtctgaaacaaaagtatcttttgattttatttgacttcgtcaataaaccgggacaaagcctgtttcatttcatggatacggcaatatgaatggaatttaatatctacgatatcaatgtgct

SEQ ID NO: 21208 - DNA, 2011 bp, Zea Mays
ctatatataaataccgcccaccaacgtctggtggtatcaaagaatctcctctatctctggcagccgcatcgtctcaatctcagtcactcccggacacgcgcacgagccaccccgcagccaaccaaccaacccatggacgcgggcggaacgccgccgctgccgctgctcctcctggccgcggcggccgccctgctgggcgcggcgctcgggtggctgctcctggcctggcggtcggcggcgaggccggggcggctgccgccggcagcacggggctgccgctcatcggggagacgctgcgcctcatcgcggcgtacaagacgccgaacccggagccgttcatcgacgagcgcgtggcggcacggcagcggggtgttcacgacgcacgtgttcggcgagcgcaccgtgttctccgcggacccggccttcaaccgcctgctcctggccgccgagggccgcgccgtcagctgcagctacccgtcgtccatcgccacgctgctgggcccgcgctcgctgctcctcaccgccggccccgcgcacaagcgcctccactcgctcacgctcgcccgcctcggccgcccggcctcgccgccgctgctggcgcacatcgaccgcctcgtcctcgccaccgtgcgggactggggccggccaggcgccggcgccggccccgccgccgtcgtccgcctcctcgacgaggccaagaagatcaccttcaacctcaccgtctggcagctcgtcagcatcgagcccgggccctggaccgagagcctccgccgcgagtacgtcaagctcgtcgacggcttcttctccatccccttcccattcgcctacctcctccctttcaccgcctacggccaggccctcaaggcgaggaagaatgtggctggagctcttcgggaggtgataaggaagaggatgggcgaggaggccggaactggccctggcgccggtagaaatggggagaagaaggacatggtggaggagcttctggaagcagagggtgggagcttctcggtagaggagatggtggatttctgcctgtctctgctggtggctggctacgagaccacctccgtgctcatgacgctcgccgtcaagttcctcaccgagacgcccactgcactggcgcagctcaaggtactatggctaagaatcatgggagatttgattggcaatttgcctggttgattctctataaacatcccgcaattcgatagggtgctgatgccccctatatatctctgtacacccttattatagtagcagcgtcatagtgggacaggatccaaaatctttgtttattttttccagtactctcccaaatggtttcttctgcatttttttttttttgcaggaagagcacgacagcatcagacacaggaaaggcaaggacgagcagcctctgcaatggagcgattacaagtcgatgccgtttacacaatgcgtgatcagtgagacgctgcgcgtggctaacttgatcagcggggtgttcaggcgggcgaacgccgacatccatttcaaagattacgttatcccaaagggctgcagaatcttcgcgtcgttccgagccgtgcacctgagccccgagcactacgagaacgctcgcgccttcgacccctggagatggcagcagagcaagaaggagggagtacgagtagtaggccaggacgcgcagcaggggggcagcgtgttcactcccttcggcggggggcctcgcctgtgcccgggccacgagcttgcccgcgtggtggtctccgttttcctccaccgtctggtgacgcgcttcagctgggaagaggctgaggaggacagggtcgtcttcttccccaccacccgcaccctcaaagggtaccccatcatcctgcggcggcgaccgggttgggatgtctgacctcatcatgttacaatagagtcgatccatctatagttgttaccctcatctctctctctctctgtctgtctgtaataacactactatctaatataaacaagcatctccgctctcttctgttca

SEQ ID NO: 21209 - DNA, 1583 bp, Zea Mays
ctatatataaataccgcccaccaacgtctggtggtatcaaagaatctcctctatctctggcagccgcatcgtctcaatctcagtcactcccggacacgcgcacgagccaccccgcagccaaccaaccaacccatggacgcgggcggaacgccgccgctgccgctgctcctcctggccgcggcggccgccctgctgggcgcggcgctcgggtggctgctcctggcctggcggtcggcggcgaggccggggcggctgccgccggcagcacggggctgccgctcatcggggagacgctgcgcctcatcgcggcgtacaagacgccgaacccggagccgttcatcgacgagcgcgtggcggcacggcagcggggtgttcacgacgcacgtgttcggcgagcgcaccgtgttctccgcggacccggccttcaaccgcctgctcctggccgccgagggccgcgccgtcagctgcagctacccgtcgtccatcgccacgctgctgggcccgcgctcgctgctcctcaccgccggccccgcgcacaagcgcctccactcgctcacgctcgcccgcctcggccgcccggcctcgccgccgctgctggcgcacatcgaccgcctcgtcctcgccaccgtgcgggactggggccggccaggcgccggcgccggccccgccgccgtcgtccgcctcctcgacgaggccaagaagatcaccttcaacctcaccgtctggcagctcgtcagcatcgagcccgggccctggaccgagagcctccgccgcgagtacgtcaagctcgtcgacggcttcttctccatccccttcccattcgcctacctcctccctttcaccgcctacggccaggccctcaaggcgaggaagaatgtggctggagctcttcgggaggtgataaggaagaggatgggcgaggaggccggaactggccctggcgccggtagaaatggggagaagaaggacatggtggaggagcttctggaagcagagggtgggagcttctcggtagaggagatggtggatttctgcctgtctctgctggtggctggctacgagaccacctccgtgctcatgacgctcgccgtcaagttcctcaccgagacgcccactgcactggcgcagctcaaggaagagcacgacagcatcagacacaggaaaggcaaggacgagcagcctctgcaatggagcgattacaagtcgatgccgtttacacaatgctagtaggccaggacgcgcagcaggggggcagcgtgttcactcccttcggcggggggcctcgcctgtgcccgggccacgagcttgcccgcgtggtggtctccgttttcctccaccgtctggtgacgcgcttcagctgggaagaggctgaggaggacagggtcgtcttcttccccaccacccgcaccctcaaagggtaccccatcatcctgcggcggcgaccgggttgggatgtctgacctcatcatgttacaatagagtcgatccatctatagttgttaccctcatctctctctctctctgtctgtctgtaataacactactatctaatataaacaagcatctccgctctcttctgttca

SEQ ID NO: 21210 - DNA, 1635 bp, Zea Mays
atttaggataaaaattattacaacatattcataaacaataaaaatcactacagaaatgaattagattatagattaaaaagaccactagcaaatgttatgcaaggcctgtgataaaaaaaggaaaaaaatatcgactagtggttgtgaaaagctaaagatagatattagtgacaaattatgaaaatgaaagtaattgaaagcaaaataaaaaaaaacatgggaaaagcaagggaaaaggaaaaaggtgatggagaaagaatgagccagtttcagggtctgctttctgaaatagaaatcggcccagtagcgcgtgccgagagaacccagccccgggccacgagccgacgaccgccgccgccttgctgcgccagggcttcgtcgggcattttttccggtgccagcgacgaggacccaccgcaccagcagatgggccgacctccaggttgcccagtctcttgaatgtgggtgatggatgtagcttagttatccttgtgcagcatgtttctgcaaacatagaagctggatgattatgagttatgaagtcgcttcttttctgaagcagcatgaaagtaaaaaaagaggttataaatgacagagaggcatcgtgcatctcggcaatatcatgacgaccctcgggggtatcgtgaagctccacctcctccacttgcacgaacaaggcttctctctccgcgacgcttggaagctccacctcctccacttgcacgaacgaggcttctctctccgcgacacttggacgaggaattgtctagtcgccgtgccgagatgcgcagaatccgtggagacaatcagcgtctggcagatgaaattgtcagtctcaggcaaaccatgcctcgtttgaaagaagacctccaagtctcaagtcaagctgtaccaaagctccgggcagagaaagagcttgaatcgagggagctgactcagaggaatctgaagctggaagctgagctacgtgccttagaaccccttaggcaagatgctttgcatctgcgatctgaagcaagtaaactacaatctttgaagcaagagttggctgcaaaggttcaaggtctatcaaaagagcttgaacatcagaaatctgaaagccagaaaatgactgctatggtagctgaacgtgatgctctgtgtcaagaattgttgcaggccagggctaatcttgagtttgagaagaaggcaaaaccagagcttactgcacaggttcaggcaatggagaaggatcttgtagctatggctcaagaggctgagaagctaagggctgatatttcgaagagaaacacacctagtttcagcggccgtggagcttatggaacttctttgtcgacgcctgggatgggtttgcaaggcatgtatgatggcggctatgctacggccgggagccgctatggcagtggcgctggggcttggagctcgcatgatccccatggttacccgcatctgtaattgtgcttctgacccgtattcactcctgaacagctcctagagtactttggcaattttctgtagtagtatataacttgtgctttttggtgcaccacattgctaccctttctggtcaatgaaatgcagtgtattgtgaaagcatctaaacccttaagctttgtttgggtactttagtattaa

SEQ ID NO: 21211 - DNA, 1610 bp, Zea Mays
actgcacctgtcatcacttgtcatggatggatcgcttccaccccctgcccccctctctgactcatctttactaggaagggtcttgtcacgcccttgttcatgtctcgtgtccccttccttcttcccatccccatcccatccattgcacgcgcgcgctgcgtttcattccgtagcaattgcaatggcagtatatggattgctagggtttctcggagatcgatccgatcgatcccggtctagtccgtccaagggcaaggctcgtcacaggccctcccaaccccaattcccaacaacaagcaaacgcacgcagcagccgcgcggtgcatcatttccgaaacacacctcgctttgctgccttactgctgttcaagcagtacaacacagcgctgccatggcgatgaataagcagctggaggccatggcgaaggaggcgtccgtggacgacgtgatgaaggtgctgatggcgtcgcgcaagttcgagatgcaggagctctgggccacctgctcgcacctggtggcgcgctcgggcctctccgccgacctcctcgccaagcacctccccatcgacgtggtggccaagatcgaggagatccgcgccgccgccaataagtcccccgtgtgcgccgtctccggcggcggcgggccgcgctcgccgttcctcctcacccaccactacctccccgtcaacggcgcgtcggcgtcggcgtcggcgtcggaggccgagcgcgaccacagggtccggcgcatgcggcgcgcgctggacgccgccgacatcgagctggtgaagctgatggtgatgggcgaggggctggacctggacgcggcgctggccgtgcactacgccgtgcagcactgcggccgcgacgtcgtcaaggcgctgctggagctgggcgccgccgacgtcaactcccgcgccgggcccgcggggaagacggcgctgcacctggcggccgagatggtgtcccccgacatggtgtccgtgctcctcgaccaccacgccgaccccagcgcccggacgctggacggcgtcaccccgctcgacgtgctccgcggcctcacctccgagttcctcttcaggggcgccgtgccggggctcacgcacatcgagcccaacaagctcaggctctgcctcgagctcgtgcagtccgcggtgatggtgaccacgcgcgacgacgacgccggggcagggggaggaggaagcgatgccgccgacgacagcttggtgagcctcaccatgaattccacgctcatgtaccagggccaggagatggcggcagcggtggccggcgaggccaggaaagggagcagcggtggtggccgagggagcccgtccaacttgtacttccccactgccttcccataataagtatttagtttccttcatcaagcaagcaatgccttttgttttcatacatatatgcatccatccatccaaagatgatggatcttcaatttcgttgtattagatttttaatctgcattgtgatgtgaggatgcatgatggtggtgtggctagctagatactaatgcaagaatttcatggtatttgatgtggattaattgttccatgcatcttagtacatgtaaatgatccgtctattggtctgggc

SEQ ID NO: 21212 - DNA, 1516 bp, Zea Mays
gttgccaacggcgacacatcggacacgtcctcgcggtagtggcgcggcactcgttctgcggtcagagtcagagtggcctaggcgctagccgataagccccgcccaccgcgcgcgcgccgcggcaccataccgggatgggcgccatgggcatcgtcgtcagagcatgcgcgcctcccgctcccgccgccgcggccgcgccggcaccctccggctccagggacgccggtcaggcccagcggaggagcaagccctcgaggaccggccgtgtgcgcgtgctcggcggcactggccgtgtcggaggatccacggccaccgcactctccaaactctgccccaagctcggcatcctcgtcggtggcaggaaccgggagaaaggcgagtccattgcagccaagcttgggggccagcctgagttcgtccaggtcgacacccgcaacgcaggcatgttggaggaagcgctgcagggtcagtatcatactagcagtcatgtggtagctgttcgcggagttgccaaaccggaggcagctgcgacgccggcgaggcgctcgcgccccatccctctggcttccgtggccgtgtggagtctggttgccactggcgccgcaaatgctgccgagctatgggaccccttggccctgcacggatcatcaggactcgtcttggctgaccttggtattggagattggtttgggggtttgctgttttcagctgggcagcaggctaatgaggctgtccaagatcagttgtctgctcttagtttctctagcctagcagttatttttggtgctggacttgtaactagtttatctccttgtacactaagtgttctaccactaactctaggatatataggtgcatttggctcagggaaaggccgatccgaggttgttgggaattcaattgcattttcactaggactagcaacaaccttagccattcttggtgttgctgcttcttttgctggaaaggcttatggtcaggtaggacaagggctcccagtggctgcttccggtttggccattatcatgggattgaaccttctggaggtacttgaattgcaacttccctcatttttcagcgattttgaccctcgagctgctgcagctaacctcccttcaggtgtacaagcataccttgctggtcttacatttgcattggcagcatcaccttgcagcacacctgttcttgctacccttctgggatatgtcgccacttcaagagacccaattattggaggaagtttattgttgacatacacaacgggctatgttgcgcctcttcttattgcagcttcatttgctggagcactgcagagtttgttgtcattcagaagatattcggcatggataaacccaatcaggaggcgtggattcgagtggtcgctctacactattttttatataattactctttatttataaacactaagttacgtgtggtttaggggacgtgggttctgcattattttttatataattattttttatttctaaacactaagatatgtatgatctgg

SEQ ID NO: 21213 - DNA, 1403 bp, Zea Mays
cggacacgtcctcgcggtagtggcgcggcactcgttctgcggtcagagtcagagtggcctaggcgctagccgataagccccgcccaccgcgcgcgcgccgcggcaccataccgggatgggcgccatgggcatcgtcgtcagagcatgcgcgcctcccgctcccgccgccgcggccgcgccggcaccctccggctccagggacgccggtcaggcccagcggaggagcaagccctcgaggaccggccgtgtgcgcgtgctcggcggcactggccgtgtcggaggatccacggccaccgcactctccaaactctgccccaagctcggcatcctcgtcggtggcaggaaccgggagaaaggcgagtccattgcagccaagcttgggggccagcctgagttcgtccaggtcgacacccgcaacgcaggcatgttggaggaagcgctgcagggtcagtatcatactagcagtcatgtggtagctgttcgcggagttgccaaaccggaggcagctgcgacgccggcgaggcgctcgcgccccatccctctggcttccgtggccgtgtggagtctggttgccactggcgccgcaaatgctgccgagctatgggaccccttggccctgcacggatcatcaggactcgtcttggctgaccttggtattggagattggtttgggggtttgctgttttcagctgggcagcaggctaatgaggctgtccaagatcagttgtctgctcttagtttctctagcctagcagttatttttggtgctggacttgtaactagtttatctccttgtacactaagtgttctaccactaactctaggatatataggtgcatttggctcagggaaaggccgatccgaggttgttgggaattcaattgcattttcactaggactagcaacaaccttagccattcttggtgttgctgcttcttttgctggaaaggcttatggtcaggtaggacaagggctcccagtggctgcttccggtttggccattatcatgggattgaaccttctggaggtacttgaattgcaacttccctcatttttcagcgattttgaccctcgagctgctgcagctaacctcccttcaggtgtacaagcataccttgctggtcttacatttgcattggcagcatcaccttgcagcacacctgttcttgctacccttctgggatatgtcgccacttcaagagacccaattattggaggaagtttattgttgacatacacaacgggctatgttgcgcctcttcttattgcagcttcatttgctggagcactgcagagtttgttgtcattcagaagatattcggcatggataaacccaatcaggtcttggactttaggtacattgttatggattgtgatgggattggggaattggagagggggtt

SEQ ID NO: 21214 - DNA, 1634 bp, Zea Mays
cggacacgtcctcgcggtagtggcgcggcactcgttctgcggtcagagtcagagtggcctaggcgctagccgataagccccgcccaccgcgcgcgcgccgcggcaccataccgggatgggcgccatgggcatcgtcgtcagagcatgcgcgcctcccgctcccgccgccgcggccgcgccggcaccctccggctccagggacgccggtcaggcccagcggaggagcaagccctcgaggaccggccgtgtgcgcgtgctcggcggcactggccgtgtcggaggatccacggccaccgcactctccaaactctgccccaagctcggcatcctcgtcggtggcaggaaccgggagaaaggcgagtccattgcagccaagcttgggggccagcctgagttcgtccaggtcgacacccgcaacgcaggcatgttggaggaagcgctgcaggtggtagctgttcgcggagttgccaaaccggaggcagctgcgacgccggcgaggcgctcgcgccccatccctctggcttccgtggccgtgtggagtctggttgccactggcgccgcaaatgctgccgagctatgggaccccttggccctgcacggatcatcaggactcgtcttggctgaccttggtattggagattggtttgggggtttgctgttttcagctgggcagcaggctaatgaggctgtccaagatcagttgtctgctcttagtttctctagcctagcagttatttttggtgctggacttgtaactagtttatctccttgtacactaagtgttctaccactaactctaggatatataggtgcatttggctcagggaaaggccgatccgaggttgttgggaattcaattgcattttcactaggactagcaacaaccttagccattcttggtgttgctgcttcttttgctggaaaggcttatggtcaggtaggacaagggctcccagtggctgcttccggtttggccattatcatgggattgaaccttctggaggtacttgaattgcaacttccctcatttttcagcgattttgaccctcgagctgctgcagctaacctcccttcaggtgtacaagcataccttgctggtcttacatttgcattggcagcatcaccttgcagcacacctgttcttgctacccttctgggatatgtcgccacttcaagagacccaattattggaggaagtttattgttgacatacacaacgggctatgttgcgcctcttcttattgcagcttcatttgctggagcactgcagtggtgcatttttacttggtggaggtgtttataccctactggacagggtgtttccagcaacatcaatggtcatgtagaccatggttggacaagaattgctaggcaccagtctgtttggcgtgcgaatgatatttggatgtgaagtagtgaaatgatggcaacaaagtttagccagatctctcagcgttgtataggcacgcaggacattttgatcgggacaagcaaagcaccttgacctaagtacagtagtctgcatcactgtatctgtatgggcctcgatacttggggccggtctaccctactaaaatgtatttctgggacagattgaaagagtatgaaatttatataagaccttgttcggttaa

SEQ ID NO: 21215 - DNA, 1689 bp, Zea Mays
cggtagtggcgcggcactcgttctgcggtcagagtcagagtggcctaggcgctagccgataagccccgcccaccgcgcgcgcgccgcggcaccataccgggatgggcgccatgggcatcgtcgtcagagcatgcgcgcctcccgctcccgccgccgcggccgcgccggcaccctccggctccagggacgccggtcaggcccagcggaggagcaagccctcgaggaccggccgtgtgcgcgtgctcggcggcactggccgtgtcggaggatccacggccaccgcactctccaaactctgccccaagctcggcatcctcgtcggtggcaggaaccgggagaaaggcgagtccattgcagccaagcttgggggccagcctgagttcgtccaggtcgacacccgcaacgcaggcatgttggaggaagcgctgcaggtggtagctgttcgcggagttgccaaaccggaggcagctgcgacgccggcgaggcgctcgcgccccatccctctggcttccgtggccgtgtggagtctggttgccactggcgccgcaaatgctgccgagctatgggaccccttggccctgcacggatcatcaggactcgtcttggctgaccttggtattggagattggtttgggggtttgctgttttcagctgggcagcaggctaatgaggctgtccaagatcagttgtctgctcttagtttctctagcctagcagttatttttggtgctggacttgtaactagtttatctccttgtacactaagtgttctaccactaactctaggatatatagtgctttcttcataaacatttaggtgcatttggctcagggaaaggccgatccgaggttgttgggaattcaattgcattttcactaggactagcaacaaccttagccattcttggtgttgctgcttcttttgctggaaaggcttatggtcaggtaggacaagggctcccagtggctgcttccggtttggccattatcatgggattgaaccttctggaggtacttgaattgcaacttccctcatttttcagcgattttgaccctcgagctgctgcagctaacctcccttcaggtgtacaagcataccttgctggtcttacatttgcattggcagcatcaccttgcagcacacctgttcttgctacccttctgggatatgtcgccacttcaagagacccaattattggaggaagtttattgttgacatacacaacgggctatgttgcgcctcttcttattgcagcttcatttgctggagcactgcagagtttgttgtcattcagaagatattcggcatggataaacccaatcagtggtgcatttttacttggtggaggtgtttataccctactggacagggtgtttccagcaacatcaatggtcatgtagaccatggttggacaagaattgctaggcaccagtctgtttggcgtgcgaatgatatttggatgtgaagtagtgaaatgatggcaacaaagtttagccagatctctcagcgttgtataggcacgcaggacattttgatcgggacaagcaaagcaccttgacctaagtacagtagtctgcatcactgtatctgtatgggcctcgatacttggggccggtctaccctactaaaatgtatttctgggacagattgaaagagtatgaaatttatataagaccttgttcggttaa

SEQ ID NO: 21216 - DNA, 1266 bp, Zea Mays
cggcaccataccgggatgggcgccatgggcatcgtcgtcagagcatgcgcgcctcccgctcccgccgccgcggccgcgccggcaccctccggctccagggacgccggtcaggcccagcggaggagcaagccctcgaggaccggccgtgtgcgcgtgctcggcggcactggccgtgtcggaggatccacggccaccgcactctccaaactctgccccaagctcggcatcctcgtcggtggcaggaaccgggagaaaggcgagtccattgcagccaagcttgggggccagcctgagttcgtccaggtcgacacccgcaacgcaggcatgttggaggaagcgctgcagggtcagtatcatactagcagtcatgtggtagctgttcgcggagttgccaaaccggaggcagctgcgacgccggcgaggcgctcgcgccccatccctctggcttccgtggccgtgtggagtctggttgccactggcgccgcaaatgctgccgagctatgggaccccttggccctgcacggatcatcaggactcgtcttggctgaccttggtattggagattggtttgggggtttgctgttttcagctgggcagcaggctaatgaggctgtccaagatcagttgtctgctcttagtttctctagcctagcagttatttttggtgctggacttgtaactagtttatctccttgtacactaagtgttctaccactaactctaggatatataggtgcatttggctcagggaaaggccgatccgaggttgttgggaattcaattgcattttcactaggactagcaacaaccttagccattcttggtgttgctgcttcttttgctggaaaggcttatggtcaggtaggacaagggctcccagtggctgcttccggtttggccattatcatgggattgaaccttctggaggtacttgaattgcaacttccctcatttttcagcgattttgaccctcgagctgctgcagctaacctcccttcaggtgtacaagcataccttgctggtcttacatttgcattggcagcatcaccttgcagcacacctgttcttgctacccttctgggatatgtcgccacttcaagagacccaattattggaggaagtttattgttgacatacacaacgggctatgttgcgcctcttcttattgcagcttcatttgctggagcactgcagagtttgttgtcattcagaagatattcggcatggataaacccaatcagtaacaatgtgaacaacgtctccctg

SEQ ID NO: 21217 - DNA, 1539 bp, Zea Mays
gcgccatgggcatcgtcgtcagagcatgcgcgcctcccgctcccgccgccgcggccgcgccggcaccctccggctccagggacgccggtcaggcccagcggaggagcaagccctcgaggaccggccgtgtgcgcgtgctcggcggcactggccgtgtcggaggatccacggccaccgcactctccaaactctgccccaagctcggcatcctcgtcggtggcaggaaccgggagaaaggcgagtccattgcagccaagcttgggggccagcctgagttcgtccaggtcgacacccgcaacgcaggcatgttggaggaagcgctgcagggtcagtatcatactagcagtcatgtggtagctgttcgcggagttgccaaaccggaggcagctgcgacgccggcgaggcgctcgcgccccatccctctggcttccgtggccgtgtggagtctggttgccactggcgccgcaaatgctgccgagctatgggaccccttggccctgcacggatcatcaggactcgtcttggctgaccttggtattggagattggtttgggggtttgctgttttcagctgggcagcaggctaatgaggctgtccaagatcagttgtctgctcttagtttctctagcctagcagttatttttggtgctggacttgtaactagtttatctccttgtacactaagtgttctaccactaactctaggatatataggtgcatttggctcagggaaaggccgatccgaggttgttgggaattcaattgcattttcactaggactagcaacaaccttagccattcttggtgttgctgcttcttttgctggaaaggcttatggtcaggtaggacaagggctcccagtggctgcttccggtttggccattatcatgggattgaaccttctggaggtacttgaattgcaacttccctcatttttcagcgattttgaccctcgagctgctgcagctaacctcccttcaggtgtacaagcataccttgctggtcttacatttgcattggcagcatcaccttgcagcacacctgttcttgctacccttctgggatatgtcgccacttcaagagacccaattattggaggaagtttattgttgacatacacaacgggctatgttgcgcctcttcttattgcagcttcatttgctggagcactgcagtggtgcatttttacttggtggaggtgtttataccctactggacagggtgtttccagcaacatcaatggtcatgtagaccatggttggacaagaattgctaggcaccagtctgtttggcgtgcgaatgatatttggatgtgaagtagtgaaatgatggcaacaaagtttagccagatctctcagcgttgtataggcacgcaggacattttgatcgggacaagcaaagcaccttgacctaagtacagtagtctgcatcactgtatctgtatgggcctcgatacttggggccggtctaccctactaaaatgtatttctgggacagattgaaagagtatgaaatttatataagaccttgttcggttaa

SEQ ID NO: 21218 - DNA, 1503 bp, Zea Mays
ccgctcccgccgccgcggccgcgccggcaccctccggctccagggacgccggtcaggcccagcggaggagcaagccctcgaggaccggccgtgtgcgcgtgctcggcggcactggccgtgtcggaggatccacggccaccgcactctccaaactctgccccaagctcggcatcctcgtcggtggcaggaaccgggagaaaggcgagtccattgcagccaagcttgggggccagcctgagttcgtccaggtcgacacccgcaacgcaggcatgttggaggaagcgctgcagggtcagtatcatactagcagtcatgtggtagctgttcgcggagttgccaaaccggaggcagctgcgacgccggcgaggcgctcgcgccccatccctctggcttccgtggccgtgtggagtctggttgccactggcgccgcaaatgctgccgagctatgggaccccttggccctgcacggatcatcaggactcgtcttggctgaccttggtattggagattggtttgggggtttgctgttttcagctgggcagcaggctaatgaggctgtccaagatcagttgtctgctcttagtttctctagcctagcagttatttttggtgctggacttgtaactagtttatctccttgtacactaagtgttctaccactaactctaggatatataggtgcatttggctcagggaaaggccgatccgaggttgttgggaattcaattgcattttcactaggactagcaacaaccttagccattcttggtgttgctgcttcttttgctggaaaggcttatggtcaggtaggacaagggctcccagtggctgcttccggtttggccattatcatgggattgaaccttctggaggtacttgaattgcaacttccctcatttttcagcgattttgaccctcgagctgctgcagctaacctcccttcaggtgtacaagcataccttgctggtcttacatttgcattggcagcatcaccttgcagcacacctgttcttgctacccttctgggatatgtcgccacttcaagagacccaattattggaggaagtttattgttgacatacacaacgggctatgttgcgcctcttcttattgcagcttcatttgctggagcactgcagagtttgttgtcattcagaagatattcggcatggataaacccaatcagatcatccatgctcccaggataatgagagagtccaagcatttcctcacaagaccaccagagacaataactgaagttattctgctatgtcattgttattcacttaagtacagacagagtatttcatttgccaatagacattatctttgctagattatatttctttatgtgttttaactttggtcttactatacatgacagacttatttggtgttcacacaaatttcctcgtttcaactcttgatgctggcttaccttcgcatcatgtgcatccatttgaaaactattgtggagtgccatatgatttatcaaaattattg

SEQ ID NO: 21219 - DNA, 1202 bp, Zea Mays
gccggcaccctccggctccagggacgccggtcaggcccagcggaggagcaagccctcgaggaccggccgtgtgcgcgtgctcggcggcactggccgtgtcggaggatccacggccaccgcactctccaaactctgccccaagctcggcatcctcgtcggtggcaggaaccgggagaaaggcgagtccattgcagccaagcttgggggccagcctgagttcgtccaggtcgacacccgcaacgcaggcatgttggaggaagcgctgcaggtggtagctgttcgcggagttgccaaaccggaggcagctgcgacgccggcgaggcgctcgcgccccatccctctggcttccgtggccgtgtggagtctggttgccactggcgccgcaaatgctgccgagctatgggaccccttggccctgcacggatcatcaggactcgtcttggctgaccttggtattggagattggtttgggggtttgctgttttcagctgggcagcaggctaatgaggctgtccaagatcagttgtctgctcttagtttctctagcctagcagttatttttggtgctggacttgtaactagtttatctccttgtacactaagtgttctaccactaactctaggatatataggtgcatttggctcagggaaaggccgatccgaggttgttgggaattcaattgcattttcactaggactagcaacaaccttagccattcttggtgttgctgcttcttttgctggaaaggcttatggtcaggtaggacaagggctcccagtggctgcttccggtttggccattatcatgggattgaaccttctggaggtacttgaattgcaacttccctcatttttcagcgattttgaccctcgagctgctgcagctaacctcccttcaggtgtacaagcataccttgctggtcttacatttgcattggcagcatcaccttgcagcacacctgttcttgctacccttctgggatatgtcgccacttcaagagacccaattattggaggaagtttattgttgacatacacaacgggctatgttgcgcctcttcttattgcagcttcatttgctggagcactgcagagtttgttgtcattcagaagatattcggcatggataaacccaatcaggtcttggactttaggtacattgttatggattgtgatgggattggggaattggagagggggtt

SEQ ID NO: 21220 - DNA, 1522 bp, Zea Mays
gccggcaccctccggctccagggacgccggtcaggcccagcggaggagcaagccctcgaggaccggccgtgtgcgcgtgctcggcggcactggccgtgtcggaggatccacggccaccgcactctccaaactctgccccaagctcggcatcctcgtcggtggcaggaaccgggagaaaggcgagtccattgcagccaagcttgggggccagcctgagttcgtccaggtcgacacccgcaacgcaggcatgttggaggaagcgctgcagggtcagtatcatactagcagtcatgctgttcgcggagttgccaaaccggaggcagctgcgacgccggcgaggcgctcgcgccccatccctctggcttccgtggccgtgtggagtctggttgccactggcgccgcaaatgctgccgagctatgggaccccttggccctgcacggatcatcaggactcgtcttggctgaccttggtattggagattggtttgggggtttgctgttttcagctgggcagcaggctaatgaggctgtccaagatcagttgtctgctcttagtttctctagcctagcagttatttttggtgctggacttgtaactagtttatctccttgtacactaagtgttctaccactaactctaggatatataggtgcatttggctcagggaaaggccgatccgaggttgttgggaattcaattgcattttcactaggactagcaacaaccttagccattcttggtgttgctgcttcttttgctggaaaggcttatggtcaggtaggacaagggctcccagtggctgcttccggtttggccattatcatgggattgaaccttctggaggtacttgaattgcaacttccctcatttttcagcgattttgaccctcgagctgctgcagctaacctcccttcaggtgtacaagcataccttgctggtcttacatttgcattggcagcatcaccttgcagcacacctgttcttgctacccttctgggatatgtcgccacttcaagagacccaattattggaggaagtttattgttgacatacacaacgggctatgttgcgcctcttcttattgcagcttcatttgctggagcactgcagagtttgttgtcattcagaagatattcggcatggataaacccaatcagtggtgcatttttacttggtggaggtgtttataccctactggacagggtgtttccagcaacatcaatggtcatgtagaccatggttggacaagaattgctaggcaccagtctgtttggcgtgcgaatgatatttggatgtgaagtagtgaaatgatggcaacaaagtttagccagatctctcagcgttgtataggcacgcaggacattttgatcgggacaagcaaagcaccttgacctaagtacagtagtctgcatcactgtatctgtatgggcctcgatacttggggccggtctaccctactaaaatgtatttctgggacagattgaaagagtatgaaatttatataagaccttgttcggttaa

SEQ ID NO: 21221 - DNA, 1592 bp, Zea Mays
gccggcaccctccggctccagggacgccggtcaggcccagcggaggagcaagccctcgaggaccggccgtgtgcgcgtgctcggcggcactggccgtgtcggaggatccacggccaccgcactctccaaactctgccccaagctcggcatcctcgtcggtggcaggaaccgggagaaaggcgagtccattgcagccaagcttgggggccagcctgagttcgtccaggtcgacacccgcaacgcaggcatgttggaggaagcgctgcagggtcagtatcatactagcagtcatggtaatgcaattcaaacatcacgcgtattatgctgtgactagttcggatccgtcttcctcccctgtggtagctgttcgcggagttgccaaaccggaggcagctgcgacgccggcgaggcgctcgcgccccatccctctggcttccgtggccgtgtggagtctggttgccactggcgccgcaaatgctgccgagctatgggaccccttggccctgcacggatcatcaggactcgtcttggctgaccttggtattggagattggtttgggggtttgctgttttcagctgggcagcaggctaatgaggctgtccaagatcagttgtctgctcttagtttctctagcctagcagttatttttggtgctggacttgtaactagtttatctccttgtacactaagtgttctaccactaactctaggatatataggtgcatttggctcagggaaaggccgatccgaggttgttgggaattcaattgcattttcactaggactagcaacaaccttagccattcttggtgttgctgcttcttttgctggaaaggcttatggtcaggtaggacaagggctcccagtggctgcttccggtttggccattatcatgggattgaaccttctggaggtacttgaattgcaacttccctcatttttcagcgattttgaccctcgagctgctgcagctaacctcccttcaggtgtacaagcataccttgctggtcttacatttgcattggcagcatcaccttgcagcacacctgttcttgctacccttctgggatatgtcgccacttcaagagacccaattattggaggaagtttattgttgacatacacaacgggctatgttgcgcctcttcttattgcagcttcatttgctggagcactgcagagtttgttgtcattcagaagatattcggcatggataaacccaatcagtggtgcatttttacttggtggaggtgtttataccctactggacagggtgtttccagcaacatcaatggtcatgtagaccatggttggacaagaattgctaggcaccagtctgtttggcgtgcgaatgatatttggatgtgaagtagtgaaatgatggcaacaaagtttagccagatctctcagcgttgtataggcacgcaggacattttgatcgggacaagcaaagcaccttgacctaagtacagtagtctgcatcactgtatctgtatgggcctcgatacttggggccggtctaccctactaaaatgtatttctgggacagattgaaagagtatgaaatttatataagaccttgttcggttaa

SEQ ID NO: 21222 - DNA, 1438 bp, Zea Mays
gccggcaccctccggctccagggacgccggtcaggcccagcggaggagcaagccctcgaggaccggccgtgtgcgcgtgctcggcggcactggccgtgtcggaggatccacggccaccgcactctccaaactctgccccaagctcggcatcctcgtcggtggcaggaaccgggagaaaggcgagtccattgcagccaagcttgggggccagcctgagttcgtccaggtcgacacccgcaacgcaggcatgttggaggaagcgctgcaggtggtagctgttcgcggagttgccaaaccggaggcagctgcgacgccggcgaggcgctcgcgccccatccctctggcttccgtggccgtgtggagtctggttgccactggcgccgcaaatgctgccgagctatgggaccccttggccctgcacggatcatcaggactcgtcttggctgaccttggtattggagattggtttgggggtttgctgttttcagctgggcagcaggctaatgaggctgtccaagatcagttgtctgctcttagtttctctagcctagcagttatttttggtgctggacttgtaactagtttatctccttgtacactaagtgttctaccactaactctaggatatataggtgcatttggctcagggaaaggccgatccgaggttgttgggaattcaattgcattttcactaggactagcaacaaccttagccattcttggtgttgctgcttcttttgctggaaaggcttatggtcaggtacttgaattgcaacttccctcatttttcagcgattttgaccctcgagctgctgcagctaacctcccttcaggtgtacaagcataccttgctggtcttacatttgcattggcagcatcaccttgcagcacacctgttcttgctacccttctgggatatgtcgccacttcaagagacccaattattggaggaagtttattgttgacatacacaacgggctatgttgcgcctcttcttattgcagcttcatttgctggagcactgcagagtttgttgtcattcagaagatattcggcatggataaacccaatcagtggtgcatttttacttggtggaggtgtttataccctactggacagggtgtttccagcaacatcaatggtcatgtagaccatggttggacaagaattgctaggcaccagtctgtttggcgtgcgaatgatatttggatgtgaagtagtgaaatgatggcaacaaagtttagccagatctctcagcgttgtataggcacgcaggacattttgatcgggacaagcaaagcaccttgacctaagtacagtagtctgcatcactgtatctgtatgggcctcgatacttggggccggtctaccctactaaaatgtatttctgggacagattgaaagagtatgaaatttatataagaccttgttcggttaa

SEQ ID NO: 21223 - DNA, 2345 bp, Zea Mays
cccaaaccctaaaccccaccgccgattctccctattgcttcgctgtcgcctgggagacgccggaggcggcgatggcgaagaagctagggaagaaggcgcgcaagttcgcgcgcaagaacctgcagtctgccgccaagcgcaaccgcaagatccgcaaccagttcaagcaccgccgaggaccccgcggaggtgggagcgccggccgggaggatggggacgagcacgtgctgcagcgggtcctcgatcccaccatggttaccgacgatgctgctgctactttgatccacggtttggagtttccagaggacgatgctgaactagatgctgatctgtctgacagtgatggttatctttctgaggatcctggatgtccatactattctgacagtgaggatgagaaagctgccaaagattgtatcatggaagaaggtttggacagacagaatgatgacatgaatcgagatatcaagaagcaaaagaaaaagttgaagaagttgctggataaggaccctgaatttgcaaattttctcgaaaaatggcagtcggagttggagagctccagaagtaaaggagattctgatgaagagggtatggattctatggatgatgacgatgactccaatgatgggaatttaccaaatgctaagagatttcaaagtgccagggtgttttatcaaataataatgtttgttctttctgagtcggacaacattttccgtgctcttttggaaattcaagatgacgttaacaaaggaaaaattatgaacctgagaaattcaaagaaatggctaactgttgattctctcataaagtcctacttatcaagttctcttgatcttcttagtcaacttacagacaacaagatacttgcctttgttttgactcggttgagggtatcagtggtccttttttctgcatatccatcaacatcaagtaggcttgtcaagattttatttcgcttgtgggcaagtggtgatcggagtttgtctctgtcggcatttcttatgatccgagaagtagcttcactgttacctgactgtttggatcactgtttaactaaatcctacaatacataccttgccagtaccaatcttgtgaatgacagaaacacaaagcatatttattttctgatggactgcctggtagagctgtattctcttgatgttcagaaatcatatgagagggcaataatctccgtggagcaactgaatgctattcttagacaggcttctaaaaccaaggaaaaggaagatctcaggaagatagataactggcaatatattagttgtgtcaacctatgggttcggtttctgtgttgtcactataaggattacaatctccatcccttattttctcaagttcttcaagtaataagaggagtggctcacttattcccaggcacaaggtacttaccgttgagactgaagcttgtgcagatgctgaacgagctttccacttgcagtcagatgttctatccaattccatcgttgctctttgactgcctagaattaagagaagtttctcagaaagaacaaacacaaagaacaaagatcaacttttcgtcgttgttgaaggtgccaaagaacctgctgaaatcaagggattttcaagaggagtgtattctttcagcgattcagattctatcagcacattttgcccagtggagttaccatgtttccttcccagaagtagccaccattcctcttgtcctcttgaagaggctacatgagcagacaacagtcgaatcacttcgccgtcctattaagcgtttgatagaccaggtgacggagaacaaggattttatagaaaggaaaagagaggttgtatccttttcaccaaatgataaggcgtcagttgatagcttccttcaggaggagaaggtcagcagaaccgcttcattcactcggttctatgcatccgtagctgaaaaccgtcaaccaaaatggagaaaaacactttaaaataccaagggaatttctgagagacatctcacatctggaatcggttggtttccaagtgagggccacgaagaaccacatcaatgtagaacattttagtgcagatatacgccgaggcagctattgtgtaacctctagtgagactgattcctacgagtcctcgagtgctcaacaattttgtacgattgtaaccttaattccgaagtgagttgtcaagtgatgaatgaaatttgctgttgcttttgaatctgttgtcactgtgcccgtagtacagagtatggactgttgtcatttcctactatgggggaagggatttaatcttactcaatccactctaatccctgttttagcttatcaatttgatttgtatgggctgttaccttttcc

SEQ ID NO: 21224 - DNA, 1265 bp, Zea Mays
attatatcttctccaggcagatccttggggccttcttgattattattaggtccttcttaagtattttggagaattggagactgggacccttcatccaaataggacccaaaatgtgtccggatgcgttatattattacacttcccgatgtataatgaattccatctaggaagatctcaggaagatagataactggcaatatattagttgtgtcaacctatgggttcggtttctgtgttgtcactataaggattacaatctccatcccttattttctcaagttcttcaagtaataagaggagtggctcacttattcccaggcacaaggtacttaccgttgagactgaagcttgtgcagatgctgaacgagctttccacttgcagtcagatgttctatccaattccatcgttgctctttgactgcctagaattaagagaagtttctcagaaagaacaaacacaaagaacaaagatcaacttttcgtcgttgttgaaggtgccaaagaacctgctgaaatcaagggattttcaagaggagtgtattctttcagcgattcagattctatcagcacattttgcccagtggagttaccatgtttccttcccagaagtagccaccattcctcttgtcctcttgaagaggctacatgagcagacaacagtcgaatcacttcgccgtcctattaagcgtttgatagaccaggtgacggagaacaaggattttatagaaaggaaaagagaggttgtatccttttcaccaaatgataaggcgtcagttgatagcttccttcaggaggagaaggtcagcagaaccgcttcattcactcggttctatgcatccgtagctgaaaaccgtcaaccaaaatggagaaaaacactttaaaataccaagggaatttctgagagacatctcacatctggaatcggttggtttccaagtgagggccacgaagaaccacatcaatgtagaacattttagtgcagatatacgccgaggcagctattgtgtaacctctagtgagactgattcctacgagtcctcgagtgctcaacaattttgtacgattgtaaccttaattccgaagtgagttgtcaagtgatgaatgaaatttgctgttgcttttgaatctgttgtcactgtgcccgtagtacagagtatggactgttgtcatttcctactatgggggaagggatttaatcttactcaatccactctaatccctgttttagcttatcaatttgatttgtatgggctgttaccttttcc

SEQ ID NO: 21225 - DNA, 1154 bp, Zea Mays
cctgtcttgagaggttgaagaagatttttacagttgttacatgcttaaaacgatgggaagatctcaggaagatagataactggcaatatattagttgtgtcaacctatgggttcggtttctgtgttgtcactataaggattacaatctccatcccttattttctcaagttcttcaagtaataagaggagtggctcacttattcccaggcacaaggtacttaccgttgagactgaagcttgtgcagatgctgaacgagctttccacttgcagtcagatgttctatccaattccatcgttgctctttgactgcctagaattaagagaagtttctcagaaagaacaaacacaaagaacaaagatcaacttttcgtcgttgttgaaggtgccaaagaacctgctgaaatcaagggattttcaagaggagtgtattctttcagcgattcagattctatcagcacattttgcccagtggagttaccatgtttccttcccagaagtagccaccattcctcttgtcctcttgaagaggctacatgagcagacaacagtcgaatcacttcgccgtcctattaagcgtttgatagaccaggtgacggagaacaaggattttatagaaaggaaaagagaggttgtatccttttcaccaaatgataaggcgtcagttgatagcttccttcaggaggagaaggtcagcagaaccgcttcattcactcggttctatgcatccgtagctgaaaaccgtcaaccaaaatggagaaaaacactttaaaataccaagggaatttctgagagacatctcacatctggaatcggttggtttccaagtgagggccacgaagaaccacatcaatgtagaacattttagtgcagatatacgccgaggcagctattgtgtaacctctagtgagactgattcctacgagtcctcgagtgctcaacaattttgtacgattgtaaccttaattccgaagtgagttgtcaagtgatgaatgaaatttgctgttgcttttgaatctgttgtcactgtgcccgtagtacagagtatggactgttgtcatttcctactatgggggaagggatttaatcttactcaatccactctaatccctgttttagcttatcaatttgatttgtatgggctgttaccttttcc

SEQ ID NO: 21226 - DNA, 1639 bp, Zea Mays
gttcaattctatggagctagccaggcaggatgctacgtatagaacacgacccagcggcaaagacaagacaagaggagatttgctctatatgcaccccatgttgttagatgatgtcacgttgttgatgtcttccactcttcctccactagtctactcggcagatttcactgactctcaccggcggtctttgtgcctccaccggccgccgccatgccgtacctcgtccgcgagcggctctacttcggcggcatcaaagacgccattgccgccctcacggagtcttcctccacgccggacttcacccacgtcctctccgtggtcagctccgcctccatctccttcatcaccgattgccgcccgggcctcgagatccccaccgaggaggtcctccgcgtagtcgccggcgaggagggcgcggcaccgactgccgcggttcccccggggacgctgatgcgggtggtggagcgcgccgggcacgggctgcgggtcacgcgcatggccgtgccgctgcgggacaccgaggaggcggacctgctcgaccgcctcgagccctgccttgagttcatcgatgagggcaggaaggtcgggaatgtcctcgtccattgctttgctggggtgtcgaggagcgcttccatcattgttgcttatcttatgagagcagaacagaaatctcttgaagaagcattagaagctctgaaggagatttctgagtcggcgtgcccaaacgatggttttcttgaccagctgaaattatttgaagaaatgggcttcaaagttgatacttcaagtcctttgtacaagagattccgcttgaaattattaggccaatcctacatatctggggagaaaataagcagctatatgtttgaagatgaccctggcctttctctagagtctggctcttgtcaagattcttcaaaggttgagcaacgtaaaacagcttaccgctgcaggaaatgcaggagagttattgctgtagagggcaatgttataagtcatgttcctggtgagggtgaatcttgctttgattggaaccgaagaaagagtggtcatccatacaacaacaaagaacatggttgctcatctttgtttgtcgaacctctgaaatggatgactccagtagaagacggcgctttggagggaaagctatcatgcatccactgtggagctcggttgggatacttcaactggtcaggaatacagtgcaactgtggtagctgggttactcctgccttccaaattgttaagagcaaagttgatatcagcaccatctagacctgtgagcaaacgactggcaagtttgagggacgaggagcgcgacagcagtgacgcctgacggtttaatgttttgtgtaccatatgaacgctacgtatacaggtgaagcaatagcgtattttatgtttttccattgccgatcagaagctgtgtgtgacaaataccgtataaaatttcgcatttgctgatgtaacaagtagccgtgatgtcggccatctgtttagctggaacgggagcgaatgcagattgtgcagagaaatgaacacggttgtgtttctattctttctgtggattcaaatgtgcgcccaatatgaatactcgttcgtttctttttttcaacggtgcacatgcatcttaaggttc

SEQ ID NO: 21227 - DNA, 1673 bp, Zea Mays
ggcaggatgctacgtatagaacacgacccagcggcaaagacaagacaagaggagatttgctctatatgcaccccatgttgttagatgatgtcacgttgttgattcaaaacggctttaatccagcatcctaacagcctcaggattgttgaaaaaaaactaggtcttccactcttcctccactagtctactcggcagatttcactgactctcaccggcggtctttgtgcctccaccggccgccgccatgccgtacctcgtccgcgagcggctctacttcggcggcatcaaagacgccattgccgccctcacggagtcttcctccacgccggacttcacccacgtcctctccgtggtcagctccgcctccatctccttcatcaccgattgccgcccgggcctcgagatccccaccgaggaggtcctccgcgtagtcgccggcgaggagggcgcggcaccgactgccgcggttcccccggggacgctgatgcgggtggtggagcgcgccgggcacgggctgcgggtcacgcgcatggccgtgccgctgcgggacaccgaggaggcggacctgctcgaccgcctcgagccctgccttgagttcatcgatgagggcaggaaggtcgggaatgtcctcgtccattgctttgctggggtgtcgaggagcgcttccatcattgttgcttatcttatgagagcagaacagaaatctcttgaagaagcattagaagctctgaaggagatttctgagtcggcgtgcccaaacgatggttttcttgaccagctgaaattatttgaagaaatgggcttcaaagttgatacttcaagtcctttgtacaagagattccgcttgaaattattaggccaatcctacatatctggggagaaaataagcagctatatgtttgaagatgaccctggcctttctctagagtctggctcttgtcaagattcttcaaaggttgagcaacgtaaaacagcttaccgctgcaggaaatgcaggagagttattgctgtagagggcaatgttataagtcatgttcctggtgagggtgaatcttgctttgattggaaccgaagaaagagtggtcatccatacaacaacaaagaacatggttgctcatctttgtttgtcgaacctctgaaatggatgactccagtagaagacggcgctttggagggaaagctatcatgcatccactgtggagctcggttgggatacttcaactggtcaggaatacagtgcaactgtggtagctgggttactcctgccttccaaattgttaagagcaaagttgatatcagcaccatctagacctgtgagcaaacgactggcaagtttgagggacgaggagcgcgacagcagtgacgcctgacggtttaatgttttgtgtaccatatgaacgctacgtatacaggtgaagcaatagcgtattttatgtttttccattgccgatcagaagctgtgtgtgacaaataccgtataaaatttcgcatttgctgatgtaacaagtagccgtgatgtcggccatctgtttagctggaacgggagcgaatgcagattgtgcagagaaatgaacacggttgtgtttctattctttctgtggattcaaatgtgcgcccaatatgaatactcgttcgtttctttttttcaacggtgcacatgcatcttaaggttc

SEQ ID NO: 21228 - DNA, 1088 bp, Zea Mays
cagcggcaaagacaagacaagaggagatttgctctatatgcaccccatgttgttagatgatgtcacgttgttgatcgcttccatcattgttgcttatcttatgagagcagaacagaaatctcttgaagaagcattagaagctctgaaggagatttctgagtcggcgtgcccaaacgatggttttcttgaccagctgaaattatttgaagaaatgggcttcaaagttgatacttcaagtcctttgtacaagagattccgcttgaaattattaggccaatcctacatatctggggagaaaataagcagctatatgtttgaagatgaccctggcctttctctagagtctggctcttgtcaagattcttcaaaggttgagcaacgtaaaacagcttaccgctgcaggaaatgcaggagagttattgctgtagagggcaatgttataagtcatgttcctggtgagggtgaatcttgctttgattggaaccgaagaaagagtggtcatccatacaacaacaaagaacatggttgctcatctttgtttgtcgaacctctgaaatggatgactccagtagaagacggcgctttggagggaaagctatcatgcatccactgtggagctcggttgggatacttcaactggtcaggaatacagtgcaactgtggtagctgggttactcctgccttccaaattgttaagagcaaagttgatatcagcaccatctagacctgtgagcaaacgactggcaagtttgagggacgaggagcgcgacagcagtgacgcctgacggtttaatgttttgtgtaccatatgaacgctacgtatacaggtgaagcaatagcgtattttatgtttttccattgccgatcagaagctgtgtgtgacaaataccgtataaaatttcgcatttgctgatgtaacaagtagccgtgatgtcggccatctgtttagctggaacgggagcgaatgcagattgtgcagagaaatgaacacggttgtgtttctattctttctgtggattcaaatgtgcgcccaatatgaatactcgttcgtttctttttttcaacggtgcacatgcatcttaaggttc

SEQ ID NO: 21229 - DNA, 1655 bp, Zea Mays
gatgatgtcacgttgttgatgtaaggactcctcgtccatcggttccacacagttcgctgcgattttaattcacccgcttttgctttttctgcagtcaaaacggctttaatccagcatcctaacagcctcaggattgttgaaaaaaaactaggtcttccactcttcctccactagtctactcggcagatttcactgactctcaccggcggtctttgtgcctccaccggccgccgccatgccgtacctcgtccgcgagcggctctacttcggcggcatcaaagacgccattgccgccctcacggagtcttcctccacgccggacttcacccacgtcctctccgtggtcagctccgcctccatctccttcatcaccgattgccgcccgggcctcgagatccccaccgaggaggtcctccgcgtagtcgccggcgaggagggcgcggcaccgactgccgcggttcccccggggacgctgatgcgggtggtggagcgcgccgggcacgggctgcgggtcacgcgcatggccgtgccgctgcgggacaccgaggaggcggacctgctcgaccgcctcgagccctgccttgagttcatcgatgagggcaggaaggtcgggaatgtcctcgtccattgctttgctggggtgtcgaggagcgcttccatcattgttgcttatcttatgagagcagaacagaaatctcttgaagaagctctgaaggagatttctgagtcggcgtgcccaaacgatggttttcttgaccagctgaaattatttgaagaaatgggcttcaaagttgatacttcaagtcctttgtacaagagattccgcttgaaattattaggccaatcctacatatctggggagaaaataagcagctatatgtttgaagatgaccctggcctttctctagagtctggctcttgtcaagattcttcaaaggttgagcaacgtaaaacagcttaccgctgcaggaaatgcaggagagttattgctgtagagggcaatgttataagtcatgttcctggtgagggtgaatcttgctttgattggaaccgaagaaagagtggtcatccatacaacaacaaagaacatggttgctcatctttgtttgtcgaacctctgaaatggatgactccagtagaagacggcgctttggagggaaagctatcatgcatccactgtggagctcggttgggatacttcaactggtcaggaatacagtgcaactgtggtagctgggttactcctgccttccaaattgttaagagcaaagttgatatcagcaccatctagacctgtgagcaaacgactggcaagtttgagggacgaggagcgcgacagcagtgacgcctgacggtttaatgttttgtgtaccatatgaacgctacgtatacaggtgaagcaatagcgtattttatgtttttccattgccgatcagaagctgtgtgtgacaaataccgtataaaatttcgcatttgctgatgtaacaagtagccgtgatgtcggccatctgtttagctggaacgggagcgaatgcagattgtgcagagaaatgaacacggttgtgtttctattctttctgtggattcaaatgtgcgcccaatatgaatactcgttcgtttctttttttcaacggtgcacatgcatcttaaggttc

SEQ ID NO: 21230 - DNA, 989 bp, Zea Mays
caagatctctaccatttgtcttggtcctcatcaagtcatgaatccttccatgtccatagatatatccggttatcttctttgctttagcaatgcagccactaaactcttttatcttcccaatatcctccagcatgagatccaagcagtggacaacagaaggcgtccaaaataaggccaatcctacatatctggggagaaaataagcagctatatgtttgaagatgaccctggcctttctctagagtctggctcttgtcaagattcttcaaaggttgagcaacgtaaaacagcttaccgctgcaggaaatgcaggagagttattgctgtagagggcaatgttataagtcatgttcctggtgagggtgaatcttgctttgattggaaccgaagaaagagtggtcatccatacaacaacaaagaacatggttgctcatctttgtttgtcgaacctctgaaatggatgactccagtagaagacggcgctttggagggaaagctatcatgcatccactgtggagctcggttgggatacttcaactggtcaggaatacagtgcaactgtggtagctgggttactcctgccttccaaattgttaagagcaaagttgatatcagcaccatctagacctgtgagcaaacgactggcaagtttgagggacgaggagcgcgacagcagtgacgcctgacggtttaatgttttgtgtaccatatgaacgctacgtatacaggtgaagcaatagcgtattttatgtttttccattgccgatcagaagctgtgtgtgacaaataccgtataaaatttcgcatttgctgatgtaacaagtagccgtgatgtcggccatctgtttagctggaacgggagcgaatgcagattgtgcagagaaatgaacacggttgtgtttctattctttctgtggattcaaatgtgcgcccaatatgaatactcgttcgtttctttttttcaacggtgcacatgcatcttaaggttc

SEQ ID NO: 21231 - DNA, 1992 bp, Zea Mays
ggtaactggtacccatgccatgtctggacccttcgccgagactcgccgtcctcccgcccgtcgacccctctcctcctgccgcagcgcgcccctctccgaccacccgcctccgcattcctcccccgccaccggcgcccacttccatgaactagcatcccctttcttcgcccagtacccacctgcttcctcccccccccccccttctctttcggcttgggtgcccatggagaccagcggtgcggccgccgccgccactgaagtgggctggtacgtgctcggcccgaaccaggagagcgtcggaccctacgcgcttgctgagcttcgagagcattttgcaaacggttatctcaatgagagcacaatgctctgggcagaagggaggaaggcttggatggcactctcgtccatccctgacttacactcggcagtcacagcgaaggatcgatttgaacaagatgttgatggtgattttgagaaatttcagaaggaggttacggaagctgaggcagaggtcaaggccttgaaaggcagtgatgtggatcagcaagatgatgagcggccagcaaccccaccggacggagagtcagaatttactgatgatgatggcaccatttacaaatgggaccgtactttgagggcatgggttcctcaaaatgatgcatctggtagcaaggaaggttatgctgttgaagagatgacttttgcacttgaggaagaagtatttcaggcacctgatatcctgggtccttctgcattagaagaaatcgacactctgtctgaaagcaaaaacaaaggatcagacaaagcagaaacgagaggagacaagaaacgaaaatcttctgagaagccatctgagaaaaaggaagctaacaaacctccagacagttggtttgatctcaaagttaacacacatgtctacataactggtttacctgatgatgttacagtggaggagattgtagagacattttccaagtgtggaataataaaggaggacccagaaactaaaaagccacgggtgaagatttatactgataaggaaaccggcaggaagaagggtgatgccttggtaacatatttcaaggaaccttctgtagctttagcggttcaattgttggatgggacatcattccgttctggtggtaagactcctatgtctgtaagtccagccaaatttgagcagaaaggcgatgttttcatttcaaagaaaagtgacaagcaaaagaaaaggaagataaaaaaggttgaagacaaaatgcttggatggggtgggcatgatgataagaagctgatgattcctactacagtaattttaaggcacatgttcactcctgctgagttaagagctgatgaagagcttctttctgagcttgagactgatgttagagaggaatgcatcaagtttggtcctgtggataatgtcaaggtttgtgaaaatcatccacagggtgtcattttggtgaaattcaaagatagaaaagatggtgccaaatgcatagagaagatgaacggtagatggtttgctgggcagcaaatccatgcgagtgaagatgatggttctgttaaccatactcttatccgtgattacgatgcagaggtgtcaagactggaccgatttggagaagagttagaagaatccacataaaggatgtataaatatacctgggattgctgcctcgtatgataagatagcagcaggagcttagttgtattttgcctcattcataggttgggtctttcctttgcccgattgacatcagaaagaaaaaaagttattcgatgtcagttatgagccatgagcacgtcgtttgttgctgcaagcctgcagctgaaagaggttcattgtttccgatgctaacatgtaacacctgccatttagtacggagcagtacccagcttgttagttgattattgttttacacttttgaggaagatatcactttctttgtcatctttcattcacatattatttctttttgctttacattatca

SEQ ID NO: 21232 - DNA, 1997 bp, Zea Mays
ggtaactggtacccatgccatgtctggacccttcgccgagactcgccgtcctcccgcccgtcgacccctctcctcctgccgcagcgcgcccctctccgaccacccgcctccgcattcctcccccgccaccggcgcccacttccatgaactagcatcccctttcttcgcccagtacccacctgcttcctcccccccccccccttctctttcggcttgggtgcccatggagaccagcggtgcggccgccgccgccactgaagtgggctggtacgtgctcggcccgaaccaggagagcgtcggaccctacgcgcttgctgagcttcgagagcattttgcaaacggttatctcaatgagagcacaatgctctgggcagaagggaggaaggcttggatggcactctcgtccatccctgacttacactcggcagtcacagcgaaggatcgatttgaacaagatgctccagatgttgatggtgattttgagaaatttcagaaggaggttacggaagctgaggcagaggtcaaggccttgaaaggcagtgatgtggatcagcaagatgatgagcggccagcaaccccaccggacggagagtcagaatttactgatgatgatggcaccatttacaaatgggaccgtactttgagggcatgggttcctcaaaatgatgcatctggtagcaaggaaggttatgctgttgaagagatgacttttgcacttgaggaagaagtatttcaggcacctgatatcctgggtccttctgcattagaagaaatcgacactctgtctgaaagcaaaaacaaaggatcagacaaagcagaaacgagaggagacaagaaacgaaaatcttctgagaagccatctgagaaaaagctaacaaacctccagacagttggtttgatctcaaagttaacacacatgtctacataactggtttacctgatgatgttacagtggaggagattgtagagacattttccaagtgtggaataataaaggaggacccagaaactaaaaagccacgggtgaagatttatactgataaggaaaccggcaggaagaagggtgatgccttggtaacatatttcaaggaaccttctgtagctttagcggttcaattgttggatgggacatcattccgttctggtggtaagactcctatgtctgtaagtccagccaaatttgagcagaaaggcgatgttttcatttcaaagaaaagtgacaagcaaaagaaaaggaagataaaaaaggttgaagacaaaatgcttggatggggtgggcatgatgataagaagctgatgattcctactacagtaattttaaggcacatgttcactcctgctgagttaagagctgatgaagagcttctttctgagcttgagactgatgttagagaggaatgcatcaagtttggtcctgtggataatgtcaaggtttgtgaaaatcatccacagggtgtcattttggtgaaattcaaagatagaaaagatggtgccaaatgcatagagaagatgaacggtagatggtttgctgggcagcaaatccatgcgagtgaagatgatggttctgttaaccatactcttatccgtgattacgatgcagaggtgtcaagactggaccgatttggagaagagttagaagaatccacataaaggatgtataaatatacctgggattgctgcctcgtatgataagatagcagcaggagcttagttgtattttgcctcattcataggttgggtctttcctttgcccgattgacatcagaaagaaaaaaagttattcgatgtcagttatgagccatgagcacgtcgtttgttgctgcaagcctgcagctgaaagaggttcattgtttccgatgctaacatgtaacacctgccatttagtacggagcagtacccagcttgttagttgattattgttttacacttttgaggaagatatcactttctttgtcatctttcattcacatattatttctttttgctttacattatca

SEQ ID NO: 21233 - DNA, 2436 bp, Zea Mays
atgggccagtgctgctccaagggcgccggagaggccggcgccaccgaggcggcgccaaaggcgcaggcgccaagccgcggcgcgtccgcgaacaacgccgacggacaacgggcgtcgtcctcgtccgcggtggctgctgccgctgctgctgccggtggtggtggcggcggcacgacgaagccggcctcacccaccggcggcgccagggccagctccggcagcaaaccggcggcggccgtgggcacggtgctgggccggcccatggaggacgtgcgcgcgacctactcgatgggcaaggagctcgggcgcgggcagttcggcgtgacgcacctgtgcacgcaccggacgagcggcgagaagctggcgtgcaagacgatcgcgaagcggaagctggcggccagggaggacgtggacgacgtgcggcgggaggtgcagatcatgcaccacctctccggccagcccaacgtggtgggcctccgcggcgcgtacgaggacaagcagagcgtgcacctcgtcatggagctgtgcgcgggcggggagctcttcgaccgcatcatcgcccggggccagtacacggagcgcggcgccgcggagctgctgcgcgccatcgtgcagatcgtgcacacctgccactccatgggggtgatgcaccgggacatcaagcccgagaacttcctgctgctcagcaaggacgaggacgcgccgctcaaggccaccgacttcggcctctccgtcttcttcaaggagggcgagctgctcagggacatcgtcggcagcgcctactacatcgcgcccgaggtgctcaagaggaagtacggcccggaggccgacatctggagcgtcggcgtcatgctctacatcttcctcgccggcgtgcctcccttctgggcagagaacgagaacggcatcttcaccgccatcctgcgagggcagcttgacctctccagcgagccatggccacacatctcgccgggagccaaggatctcgtcaagaagatgctcaacatcaaccccaaggagcggctcacggcgttccaggtcctcaatcacccatggatcaaagaagacggagacgcgcctgacacgccgcttgacaacgttgttctcgacaggctcaagcagttcagggccatgaaccagttcaagaaagcagcattgaggatcatagctgggtgcctatccgaagaggagatcacagggctgaaggagatgttcaagaacattgacaaggataacagcgggaccattacactcgacgagctcaaacacgggttggcaaagcacgggcccaagctgtcagacagcgaaatggagaaactaatggaagcagctgacgctgacggcaacgggttaattgactacgacgaattcgtcaccgcaacagtgcatatgaacaaactggatagagaagagcacctttacacagcattccagtatttcgacaaggacaacagcgggtacattactaaagaagagcttgagcacgccttgaaggagcaagggttgtatgacgccgataaaatcaaagacatcatctccgatgccgactctgacaatgtaaggaacaagcattatttaaatttcagccgacaaactaaactatagaaaccacatcatcatatcaaattttgaggtggcggtgctacagaaatagaacccagtacaccaaaatgactaacttgtcatgattagttgttcctcgtaactgaacatttgtgttcttagtttcttattgttaaaccaaagacttaaattcacttttgcacatgcaggatggaaggatagattattcagagtttgtggcgatgatgaggaaagggacggctggtgccgagccaatgaacatcaagaagaggcgagacatagtcctatagtgaagtgaagcagcaagtgtgtaatgtaatgtgtatagcagctcaaacaagcaaatttgtacatctgtacacaaatgcaatggagttacttttgcaacttagttcatggatggttgtgtacgttgtgctattgattgcaagtgatttgaaagacatgcatacttaggaactgagaaagatagatctactactgctagagacacaacaataggatggcaattcagcaagtgcgtatttcagaagactacagctggcatctattattctcattgtcctcgcaaaaatactgatgatgcatttgagagaacaatatgcaacaagatctactgataaggtaattgtatgacagaacacaaaatgatgccaaattatcaagaaaaataagaaaataggatggttcaaacagacctcaaatcatcacaagatacaatgggagaatctttatctatataaaagaatggctatggcagtgagcacttccacagattgtacaaggaacatcttgatacttgagacaaccactggtaaaaagaatggtctatatggtgacggggaagaggtt

SEQ ID NO: 21234 - DNA, 1822 bp, Zea Mays
atcgccaatctcctctgtgttcttgcgtgcgcgttgacctgctggcgactctgcgctggtccctctcttcttctgtgaggagccaccagagtacgtacgtacaatggaggaggagggcggcgtcacttcgccgttgctgctgcggcaggggcaggagaaggtttaccacccgggctgcccgggctgtgccaacgaccggaggaaggagctccaggagggactgccgtacaaggagttcttgtacgtctggatcatctgcctcgcgacttctttaccggtgtcatcattattccccttcttgtatttcatgataagagacttgcacgttgcaaaaagaacagaggacatcgggttctatgccggatttgtgggcgcttcatttatgctcggtagatgcttgacctcaactgtctgggggatggcagcagatcggtttgggaggaagccagttgccatactcggcgtcttctccgtggttatattcaacactttatttggactcagtactagttactggatggcaatagccacaagatttctacttggcgctctgaatggtctgcttgggccaatcaaggcttattcgatcgaagtttgcagacctgagcacgaggcgctgggaatatcacttgtcggcacagcctggggaataggtctcatcattgggcctgctctaggaggctaccttgcacagcctgcagaaaaatttccagacctgttttcacctgactcgttcttcgggaggtttccctatttcttgccatgcttatgctcctcgctcttcgctgctgttgttcttgtcatctgcatatggatgccggagacactacacaaacacaaagctcgccatgacgaaaataaaaatgacgaagctttggaggcccaccagagtgactacaaggacaaggacgaacagattccaagtttggatgacaagaagagtttgctcaagaactggcccttcatgtcatccttaattacgtactgtgtgttttccttccatgatatggcttattcagaggtgttctctttatgggccgaaagcgataggaagtatggcggcctcagtctatcatctgaggatgtaggtcaagtgctttcagtcacaggcgtcagtcttctcatataccaactctctgtgtaccctcgtaccaacaaaatccttggacctatcaagacttctcgagttgcagctgttctgtgcatgcttattctcttgggctacccctacatgacacatctgtcaggaactgcactgtccgtcgttctcaacattgcgtcgatcttgaaaatcaatcttgcttctaccatcatctcgagcagcttcatccttcagaacaatgccgtgcctcaagatcagagaggagctgcgaacggactgtcggtgacagtgatgtccctgttcaagtcaatcgctcctgcagctgcaggcactgtgttctcttgggcacaagaacggcagcatgctttcttctttccaggtgaccagatggtgttctttcttctcaatgccatcgagctccttggacttgtcctcacgttcaagcccttcatggccgcaccagagtccagagcagcatgatgcagatggttcgtggatcactaatcgatcagaggtcgagcacacgtaaagatggcaacggtgaagattcgtcggattttgcatgccactccgaattcgccccgtccaatatttgtacccagtacaattctataccgtaccatgtgggtattctatacccgatggatatacatacccaataagaaaatatacaaatataacgaatatgaatagtattcggttttaatatatatttttaat

SEQ ID NO: 21235 - DNA, 1855 bp, Zea Mays
cttcaacaatcctccccacccccgccgccccatgcatccatccacaccgcacaaatcagctaccgcgccgcccgtgagggcgagccaaaagataaagccaagtcccctttcccaagtcccagcgcgtagctagcgagtggccggccggccggccattgggacttttcctcctctcaatgatgccctacccatctcatcgctgttccccttcttgtatttcatgataagggacctgaacgtcgctgaaagaaccgaagacatcggcttctacgccggcttcgtaggtgcctcgttcatgtttggtagatgcttgacttcaaccgcctggggaatagcggcggaccgtatcgggaggaaacctgtcgtcgtgttcggcatctcctctgtggtcgtgttcaacacgctgtttggcctgagcgtcaactactggatggcaatcgccacacggttcctgcttggtgctttgaacggcttgcttggaccaataaaggcttatgccatcgaagtctgccggcctgaacatgaagctctagcgctatcacttgtcagcacggcatgggggataggcctcatcatcggcccagctcttggaggctaccttgcactgcctgcagagaacttcccggctatcttttcacctgactcggtatttggaaggttcccgtatttcctaccatgcctttgcacgtcggtcttcgctgctgctgttctagtgagctgcatatggatgccggagactctgcacaggcacaaagttcacgagagtacgagccaggacgttgaaaaggttcaagaaagcggcattaggaagaagaagagcttattcaggaactggccgttgatgtcgtcgataattgtctactgcatcttctcgttccatgacatggcttacacagaggtgttctctctatgggctgaaagtgacaagaagtatggtggactgagcttatcatctgaggacgttggtcaagttcttgcagtcactggtgccagtcttcttgtttatcaactctttctataccctagaatcaataaggttctcgggccgatcaaatcttctcgaattgcagctatcctgtgcatacctatcctctttgcctacccctacatgacatacatctcagaaccaggactgtcaatcattttgaacattgcgtcagcgataaagaataatcttgctgttacgatcattacaggcactttcatccttcaaaacaatgcagtgcctcaggatcaacgaggagctgcgaacggactgtccatgacagggatgtccttcttcaaggcacttgctccggcaggagcgggcattgtgttctcgtgggcgcagaaacgccagcatgcctttttcttcccaggtgatcagatggtgttcttcctgctgaacgtcgttgagctggtcgggctcatcctcacattcaaaccctttctggcagtgccagagcgatgcgatagtagatagctgttctttggaggatgaactatagaagttttggaatgattcaaaatttcatcgtgtatggcagcaataccagtgagacccaggaagaagcaagagctgtgtactggtaaccgtaagcggtgtatgcagtatcgctgcattagcatttgtgcttacgaaatgcacatgtatgtaggtgataaatgactaaatgtggccagtggatcgagttgttgctgcactgtgagtagtggtagtgtaagattcagcgactcgaaattgtgtgttggaaataaaattggtaggtgttagacgcgcggtatgagcgccaatcattggaatttatgccgacacggacggtccgtggctctgggccgaacgatccgcgatttgagcgcaggagcggcgctttcc

SEQ ID NO: 21236 - DNA, 1685 bp, Zea Mays
gggacttttcctcctctcaatgatgccctacccatctcatcgctgttccccttcttgtatttcatgataagggacctgaacgtcgctgaaagaaccgaagacatcggcttctacgccggcttcgtaggtgcctcgttcatgtttggtagatgcttgacttcaaccgcctggggaatagcggcggaccgtatcgggaggaaacctgtcgtcgtgttcggcatctcctctgtggtcgtgttcaacacgctgtttggcctgagcgtcaactactggatggcaatcgccacacggttcctgcttggtgctttgaacggcttgcttggaccaataaaggcttatgccatcgaagtctgccggcctgaacatgaagctctagcgctatcacttgtcagcacggcatgggggataggcctcatcatcggcccagctcttggaggctaccttgcactgcctgcagagaacttcccggctatcttttcacctgactcggtatttggaagaatctgtcaggttcccgtatttcctaccatgcctttgcacgtcggtcttcgctgctgctgttctagtgagctgcatatggatgccggagactctgcacaggcacaaagttcacgagagtacgagccaggacgttgaaaaggttcaagaaagcggcattaggaagaagaagagcttattcaggaactggccgttgatgtcgtcgataattgtctactgcatcttctcgttccatgacatggcttacacagagtgacaagaagtatggtggactgagcttatcatctgaggacgttggtcaagttcttgcagtcactggtgccagtcttcttgtttatcaactctttctataccctagaatcaataaggttctcgggccgatcaaatcttctcgaattgcagctatcctgtgcatacctatcctctttgcctacccctacatgacatacatctcagaaccaggactgtcaatcattttgaacattgcgtcagcgataaagaataatcttgctgttacgatcattacaggcactttcatccttcaaaacaatgcagtgcctcaggatcaacgaggagctgcgaacggactgtccatgacagggatgtccttcttcaaggcacttgctccggcaggagcgggcattgtgttctcgtgggcgcagaaacgccagcatgcctttttcttcccaggtgatcagatggtgttcttcctgctgaacgtcgttgagctggtcgggctcatcctcacattcaaaccctttctggcagtgccagagcgatgcgatagtagatagctgttctttggaggatgaactatagaagttttggaatgattcaaaatttcatcgtgtatggcagcaataccagtgagacccaggaagaagcaagagctgtgtactggtaaccgtaagcggtgtatgcagtatcgctgcattagcatttgtgcttacgaaatgcacatgtatgtaggtgataaatgactaaatgtggccagtggatcgagttgttgctgcactgtgagtagtggtagtgtaagattcagcgactcgaaattgtgtgttggaaataaaattggtaggtgttagacgcgcggtatgagcgccaatcattggaatttatgccgacacggacggtccgtggctctgggccgaacgatccgcgatttgagcgcaggagcggcgctttcc

SEQ ID NO: 21237 - DNA, 1719 bp, Zea Mays
gacttttcctcctctcaatgatgccctacccatctcatcgctgttccccttcttgtatttcatgataagggacctgaacgtcgctgaaagaaccgaagacatcggcttctacgccggcttcgtaggtgcctcgttcatgtttggtagatgcttgacttcaaccgcctggggaatagcggcggaccgtatcgggaggaaacctgtcgtcgtgttcggcatctcctctgtggagagcgcttcatgtgtcccagggtcgtgttcaacacgctgtttggcctgagcgtcaactactggatggcaatcgccacacggttcctgcttggtgctttgaacggcttgcttggaccaataaaggcttatgccatcgaagtctgccggcctgaacatgaagctctagcgctatcacttgtcagcacggcatgggggataggcctcatcatcggcccagctcttggaggctaccttgcactgcctgcagagaacttcccggctatcttttcacctgactcggtatttggaaggttcccgtatttcctaccatgcctttgcacgtcggtcttcgctgctgctgttctagtgagctgcatatggatgccggagactctgcacaggcacaaagttcacgagagtacgagccaggacgttgaaaaggttcaagaaagcggcattaggaagaagaagagcttattcaggaactggccgttgatgtcgtcgataattgtctactgcatcttctcgttccatgacatggcttacacagaggtgttctctctatgggctgaaagtgacaagaagtatggtggactgagcttatcatctgaggacgttggtcaagttcttgcagtcactggtgccagtcttcttgtttatcaactctttctataccctagaatcaataaggttctcgggccgatcaaatcttctcgaattgcagctatcctgtgcatacctatcctctttgcctacccctacatgacatacatctcagaaccaggactgtcaatcattttgaacattgcgtcagcgataaagaataatcttgctgttacgatcattacaggcactttcatccttcaaaacaatgcagtgcctcaggatcaacgaggagctgcgaacggactgtccatgacagggatgtccttcttcaaggcacttgctccggcaggagcgggcattgtgttctcgtgggcgcagaaacgccagcatgcctttttcttcccaggtgatcagatggtgttcttcctgctgaacgtcgttgagctggtcgggctcatcctcacattcaaaccctttctggcagtgccagagcgatgcgatagtagatagctgttctttggaggatgaactatagaagttttggaatgattcaaaatttcatcgtgtatggcagcaataccagtgagacccaggaagaagcaagagctgtgtactggtaaccgtaagcggtgtatgcagtatcgctgcattagcatttgtgcttacgaaatgcacatgtatgtaggtgataaatgactaaatgtggccagtggatcgagttgttgctgcactgtgagtagtggtagtgtaagattcagcgactcgaaattgtgtgttggaaataaaattggtaggtgttagacgcgcggtatgagcgccaatcattggaatttatgccgacacggacggtccgtggctctgggccgaacgatccgcgatttgagcgcaggagcggcgctttcc

SEQ ID NO: 21238 - DNA, 1084 bp, Zea Mays
cgaccattcatggcatcttttgatgcatgggtgtttttggtagcaactttcatcttacaagtcctggcatccaggtttacgcatgcagactccttattttagccaacgcaagagcacgaacaaacagaggaatttcaccttggcccttcctcgtcgatcaacgcgaatccgtctccgtccgtacagaagagttgcctgtgaatctgtgattgaggacgaaccatgcgtcgtccatcgatcatgaggcggcgtctccaacggagctaaggagatcggtcggtgagcggtggattgaagaatcgggagctagcgaggagggaggaggatggaggaggtggagcagcagctgaccaagaaacagatcgaggagttccgggaggcgttcagcctcttcgacaaagatggcgacgggacgatcacgaccaaggagctgggcacggtgatgcggtcgctggggcagagcccgacggaggaggagctgcaggagatggtggacgaggtggacgcggacggcagcggcgccatcgacctgcaggagttcctgaccctgctggcgcgccagatgcgggaggcgagcggcgccgacgaggacgagctccgggaggccttccacgtcttcgaccaggaccagaacggcttcatctcccgcgacgagctccgccacgtcctccagaacctcggcgagcgcctctccgaggaggagctcgccgagatgctccgcgaggccgacgcggacggcgacggccagatcaactactccgagttcgccaaggtcatgcttgccaaacgaaggaaccaggagctggaagagcatgggagtgaatcgtctcactccaagggactctgcccctcctgtataatcctctgaaactcgactcgttctgccaccctagtttctactttctagctgccaggaggaagaaatgtactgtaactaacagcaagcaaagcagaagaatctgcatggctcacggtgtaattttttttaaaaaaactactgaaatgaatggcagatttagccattctgttcagtaaaggaaatcaacatgaataataatgttagacagaagaagaagtttacaaa

SEQ ID NO: 21239 - DNA, 2307 bp, Zea Mays
tggccgttgcaacgaaacaaaaaaagccaaagggatcccaaacgaaaacgagccagctgagcaaacacaacactcgcatcggcacccacactgccactcatcacattggcacccctccgacacgggccgggacttctcggactgcaggcagccaggcacgcaccagcaacaccccccacccgccggctcggagcggggccccacccgaatcacacagatcgggacgccggaggaggagcaacgccgtcccgcatcaccggagcaacgcgggcgcggagaggccagccagcgcaggcgcagttcaagctttggattcccggatcccacaccaccggtctctctcggggagtgtaatccagcgagcgttgagttgaaagccgcgcaagtggagatgagtactctgaagaaatccgacaagaaggctgccctcgacttcgcagcatggagtttcaatgtcaccacatcggttggactcatcatggtcaacaaggccttgatggctacgtatgggttcagtttcggtatgcctgtgctctgctcgtccagggatttatttaccatacctccgactttcaccttcggtctctacttcttgcgcttctgactgcttagcgctattatgttatggcagtgttgtatttttgttgtgcgattgctagattccaaatacctaagtaataaccagatttgctttgctaatgattgaagaattattgtgaagttatgaagtgctgcagctatttgaggtttctgcagaacctaaaacctacctggctcccctcttatggacttccttgcaaaattggtagtgtctctgctaattgagccttcatggcattagtggaagcaatcgaaacatgctagcatatgtgatttcttactgtatgttaggtggcgattgcagattctaccgtatttctggacattctcaacaaagtgtgcatcgatgtgaacttggatatatctcctgtcatgtcattaattaccttttcctcttttttttcagccacaacattaaccgggcttcattttgtgactactaccttgatgactatcttatttcgttggttaggcctgagtcagccatcccacttacccctagcagatctagttaaatttgtgatattttcgaacttgtcaattgttgggatgaatgtgagcttgatgtggaactctgttggcttttatcagatagcaaagctgtgcatgatacctgcatcatgtcttctggaggttgtatttgatcatgtacattattcccgggacacaaagctgagcataatggtcgtgcttataggagttgcagtctgcacggttactgatgtcagtgtgaatgcaagaggtctaattgctgctgttatagctgtttggagcacagctttgcaacaatactatgtccattttctccaacgcaagtactccctgaactcattcaacctcctgggccacacagctccagcccaagctgggtcactgctgctagtgggaccatttgcggattacttgttgacaggcaaaagggtggatcagttcagtttgtcatcgcttgctctgtttttcctggcactctcatgcttcatcgccattggtgttaatctgagccaattcatctgcatcgggcggttctctgccgtatccttccaagtcctaggccacatgaagaccgtacttgttctgtcccttgggttccttttctttggcaaggagggcctgaaccttcaggtagtccttgggatggtcctggccgttctcggaatgatatggtacgggaacgcgtctgctaaaccaggtggcaaagagcggcgcagcatcctgccggtgaggtctgcgagtctcaagggaagttccgaagaaaaggccggtgccgagaaatagtcttgctatatctgactgcaaactttttatttagatggggaatttttcgttccgaaggttaaatttctggtgaggtgacgcgagtatcacagattgggagctctgcattatgtctgacgcgcacaaaacaaacgcgtcccttgtagagactctggattgttatagttacaggtatactgtaaagcttcatttttttttggcgctctgaatcgtttgcagtgagggggaaagacggacatggtttacggcccgttcggttcttccggaaccgtagcctggaatggttcctagctcaattgtttacctaatttatataagttttgatcaacccgaatgattcttggatgaatccaggacaaacgaacaaggcctacggagggtttaagacagtttttttttatcttatcgaacatatagttcggtagtttgagg

SEQ ID NO: 21240 - DNA, 1601 bp, Zea Mays
tggccgttgcaacgaaacaaaaaaagccaaagggatcccaaacgaaaacgagccagctgagcaaacacaacactcgcatcggcacccacactgccactcatcacattggcacccctccgacacgggccgggacttctcggactgcaggcagccaggcacgcaccagcaacaccccccacccgccggctcggagcggggccccacccgaatcacacagatcgggacgccggaggaggagcaacgccgtcccgcatcaccggagcaacgcgggcgcggagaggccagccagcgcaggcgcagccacaacattaaccgggcttcattttgtgactactaccttgatgactatcttatttcgttggttaggcctgagtcagccatcccacttacccctagcagatctagttaaatttgtgatattttcgaacttgtcaattgttgggatgaatgtgagcttgatgtggaactctgttggcttttatcagatagcaaagctgtgcatgatacctgcatcatgtcttctggaggttgtatttgatcatgtacattattcccgggacacaaagctgagcataatggtcgtgcttataggagttgcagtctgcacggttactgatgtcagtgtgaatgcaagaggtctaattgctgctgttatagctgtttggagcacagctttgcaacaatactatgtccattttctccaacgcaagtactccctgaactcattcaacctcctgggccacacagctccagcccaagctgggtcactgctgctagtgggaccatttgcggattacttgttgacaggcaaaagggtggatcagttcagtttgtcatcgcttgctctgtttttcctggcactctcatgcttcatcgccattggtgttaatctgagccaattcatctgcatcgggcggttctctgccgtatccttccaagtcctaggccacatgaagaccgtacttgttctgtcccttgggttccttttctttggcaaggagggcctgaaccttcaggtagtccttgggatggtcctggccgttctcggaatgatatggtacgggaacgcgtctgctaaaccaggtggcaaagagcggcgcagcatcctgccggtgaggtctgcgagtctcaagggaagttccgaagaaaaggccggtgccgagaaatagtcttgctatatctgactgcaaactttttatttagatggggaatttttcgttccgaaggttaaatttctggtgaggtgacgcgagtatcacagattgggagctctgcattatgtctgacgcgcacaaaacaaacgcgtcccttgtagagactctggattgttatagttacaggtatactgtaaagcttcatttttttttggcgctctgaatcgtttgcagtgagggggaaagacggacatggtttacggcccgttcggttcttccggaaccgtagcctggaatggttcctagctcaattgtttacctaatttatataagttttgatcaacccgaatgattcttggatgaatccaggacaaacgaacaaggcctacggagggtttaagacagtttttttttatcttatcgaacatatagttcggtagtttgagg

SEQ ID NO: 21241 - DNA, 2159 bp, Zea Mays
gtcgtctccttctggggggcctcagtcagatcccgtggcctctgctctgctcgagacgtcggacgtgagcccgtgatggcgtgcggctccagtgcccggcggttgataggctcagtaggaagcaagtgcccgtttcaacctgaccagcgccgttcaagctttggattcccggatcccacaccaccggtctctctcggggagtgtaatccagcgagcgttgagttgaaagccgcgcaagtggagatgagtactctgaagaaatccgacaagaaggctgccctcgacttcgcagcatggagtttcaatgtcaccacatcggttggactcatcatggtcaacaaggccttgatggctacgtatgggttcagtttcggtatgcctgtgctctgctcgtccagggatttatttaccatacctccgactttcaccttcggtctctacttcttgcgcttctgactgcttagcgctattatgttatggcagtgttgtatttttgttgtgcgattgctagattccaaatacctaagtaataaccagatttgctttgctaatgattgaagaattattgtgaagttatgaagtgctgcagctatttgaggtttctgcagaacctaaaacctacctggctcccctcttatggacttccttgcaaaattggtagtgtctctgctaattgagccttcatggcattagtggaagcaatcgaaacatgctagcatatgtgatttcttactgtatgttaggtggcgattgcagattctaccgtatttctggacattctcaacaaagtgtgcatcgatgtgaacttggatatatctcctgtcatgtcattaattaccttttcctcttttttttcagccacaacattaaccgggcttcattttgtgactactaccttgatgactatcttatttcgttggttaggcctgagtcagccatcccacttacccctagcagatctagttaaatttgtgatattttcgaacttgtcaattgttgggatgaatgtgagcttgatgtggaactctgttggcttttatcagatagcaaagctgtgcatgatacctgcatcatgtcttctggaggttgtatttgatcatgtacattattcccgggacacaaagctgagcataatggtcgtgcttataggagttgcagtctgcacggttactgatgtcagtgtgaatgcaagaggtctaattgctgctgttatagctgtttggagcacagctttgcaacaatactatgtccattttctccaacgcaagtactccctgaactcattcaacctcctgggccacacagctccagcccaagctgggtcactgctgctagtgggaccatttgcggattacttgttgacaggcaaaagggtggatcagttcagtttgtcatcgcttgctctgtttttcctggcactctcatgcttcatcgccattggtgttaatctgagccaattcatctgcatcgggcggttctctgccgtatccttccaagtcctaggccacatgaagaccgtacttgttctgtcccttgggttccttttctttggcaaggagggcctgaaccttcaggtagtccttgggatggtcctggccgttctcggaatgatatggtacgggaacgcgtctgctaaaccaggtggcaaagagcggcgcagcatcctgccggtgaggtctgcgagtctcaagggaagttccgaagaaaaggccggtgccgagaaatagtcttgctatatctgactgcaaactttttatttagatggggaatttttcgttccgaaggttaaatttctggtgaggtgacgcgagtatcacagattgggagctctgcattatgtctgacgcgcacaaaacaaacgcgtcccttgtagagactctggattgttatagttacaggtatactgtaaagcttcatttttttttggcgctctgaatcgtttgcagtgagggggaaagacggacatggtttacggcccgttcggttcttccggaaccgtagcctggaatggttcctagctcaattgtttacctaatttatataagttttgatcaacccgaatgattcttggatgaatccaggacaaacgaacaaggcctacggagggtttaagacagtttttttttatcttatcgaacatatagttcggtagtttgagg

SEQ ID NO: 21242 - DNA, 2083 bp, Zea Mays
ctcaaagcttgtgatgagtgatgcctgatgacagctttactcctccctaatctgatattgatgcttgctttgctggttcaagctttggattcccggatcccacaccaccggtctctctcggggagtgtaatccagcgagcgttgagttgaaagccgcgcaagtggagatgagtactctgaagaaatccgacaagaaggctgccctcgacttcgcagcatggagtttcaatgtcaccacatcggttggactcatcatggtcaacaaggccttgatggctacgtatgggttcagtttcggtatgcctgtgctctgctcgtccagggatttatttaccatacctccgactttcaccttcggtctctacttcttgcgcttctgactgcttagcgctattatgttatggcagtgttgtatttttgttgtgcgattgctagattccaaatacctaagtaataaccagatttgctttgctaatgattgaagaattattgtgaagttatgaagtgctgcagctatttgaggtttctgcagaacctaaaacctacctggctcccctcttatggacttccttgcaaaattggtagtgtctctgctaattgagccttcatggcattagtggaagcaatcgaaacatgctagcatatgtgatttcttactgtatgttaggtggcgattgcagattctaccgtatttctggacattctcaacaaagtgtgcatcgatgtgaacttggatatatctcctgtcatgtcattaattaccttttcctcttttttttcagccacaacattaaccgggcttcattttgtgactactaccttgatgactatcttatttcgttggttaggcctgagtcagccatcccacttacccctagcagatctagttaaatttgtgatattttcgaacttgtcaattgttgggatgaatgtgagcttgatgtggaactctgttggcttttatcagatagcaaagctgtgcatgatacctgcatcatgtcttctggaggttgtatttgatcatgtacattattcccgggacacaaagctgagcataatggtcgtgcttataggagttgcagtctgcacggttactgatgtcagtgtgaatgcaagaggtctaattgctgctgttatagctgtttggagcacagctttgcaacaatactatgtccattttctccaacgcaagtactccctgaactcattcaacctcctgggccacacagctccagcccaagctgggtcactgctgctagtgggaccatttgcggattacttgttgacaggcaaaagggtggatcagttcagtttgtcatcgcttgctctgtttttcctggcactctcatgcttcatcgccattggtgttaatctgagccaattcatctgcatcgggcggttctctgccgtatccttccaagtcctaggccacatgaagaccgtacttgttctgtcccttgggttccttttctttggcaaggagggcctgaaccttcaggtagtccttgggatggtcctggccgttctcggaatgatatggtacgggaacgcgtctgctaaaccaggtggcaaagagcggcgcagcatcctgccggtgaggtctgcgagtctcaagggaagttccgaagaaaaggccggtgccgagaaatagtcttgctatatctgactgcaaactttttatttagatggggaatttttcgttccgaaggttaaatttctggtgaggtgacgcgagtatcacagattgggagctctgcattatgtctgacgcgcacaaaacaaacgcgtcccttgtagagactctggattgttatagttacaggtatactgtaaagcttcatttttttttggcgctctgaatcgtttgcagtgagggggaaagacggacatggtttacggcccgttcggttcttccggaaccgtagcctggaatggttcctagctcaattgtttacctaatttatataagttttgatcaacccgaatgattcttggatgaatccaggacaaacgaacaaggcctacggagggtttaagacagtttttttttatcttatcgaacatatagttcggtagtttgagg

SEQ ID NO: 21243 - DNA, 3225 bp, Zea Mays
gcagaggaaaaagcagagacacgctgcactgcggctccgtgctgtttgcttcgctttattccccttccttgttccagcaccagctctcctctcccctgtcactctccatccggccatcccgccgcccaccctttcccccatccgccgaacccttcgcctgctgcgtccgtctggtccgaggcgtttccgttcctgacgccaagaacgagctcttctacgtacgcctgcacgctgaggtggtttctttgctcctgcctgccaccgtcgtcgattcttcttcttattcttttccccttggtccgtagccattgttggttggtgtcatatactttcatgcttcgtgtcctcctgctccttccattcctctccttcccgtagccatttttagatctccgcgtccgcaggcagggccgaatccagttgaaggcaggcggcgaagagccaaagatgggactcgacgcaaccaacgccctgctgcacatcaagagcgcgttgcgttcttccgccaggcttgcctgccagtccgcgtccgagtaccccgtggcgctcggcgtcggcacgctgctgctgttcctgcacaggctctgccctgccctgctcgctctcctcctgtcctcgtcgccggtgttcctgctaaccgcgcttctgctcggggcgctgctgagctacggggagccaggtgacggcgctccagcgaccggagacggagagggcccgtccccccctgatgctgtggctgtggctgtggctgtggctgtggctgtatccacaccatccgttgctgagtcttgtccagcagttgccgtggaggttcagcgtgtcgccgccgtcgcccacatgccaaggagttcttctgcgagccccgttgtccgcgccgaggaaacaacgtccggtaccaccttcttccatgaagcccaccgtgacgagggcagtatcgtcgcatctgtctctgctgacgacgctcttcgccgcgcggaagttgttgttgtggaaagagaggagcagccggccaccaaggaaatctgcgagaatgttcagctgcggcagtttcggagcagcgctggtgaaggtgttccgatcgaagtggacagcaaagcttctggagctgtttcgcttgatgctcggtgggtggctatggagtcttctagctttcacagggacaacggtgccatcgctgaaggagagggagaggaggatgagcatgttaaggagatatgccagcaggctgagagcgccgtcgcagggaggtgtggtggctatggagtttgcagccagtatcagttcggtgagctcatgagctcgtgttggcaacctgttacgcggcaggatccttgttccgagtccgagtcggattctagtgaaagctcttcggatgcgtcgatcagtgacatcataccgatgctcgacgagctgaacccgcctgtggacttgggtgctggccacccttcctcagccttcagagagaagttgagcgccggctcatcggatgatgaagatggctcggaggaggacaataaccttagctcagatgaagatggagaagaggaagaggaggaggaagagaaaggtgatggaaacaactggaagggctctgtggatccaaactctctggaagctgaagaaaagaacgggagctcggagagtctgatggcgcggcgaagagcaaagaacgctctcgtgttcgatctcgacaggaggctaatggacctgcaggcagctgatgcagtctcgaaaatggaggcggcgtcacgcttccgcgtccaggtgccctccatctccacaccgaggcggcctggcccttcagacgatccagcagagggggacacagtggagctgccgcagatccctggctcggcgccgccgtccgttctgcttccacggaggaaaccatccgatgatgctccgttcgacgaccagatcgtggaccgcgacaggcgtctgcaggagacctggactcctcctcgctcaggctttccatcatcagcacagggtagtaggacacctgacactggcagcttgttcgtgaggccgtcttcttctccgcgacatggcagtggcgtggtagaagtagaagcagaggagcctggattgtccggtgccaaagatgccgctgacgaccactcggagtcggagagcggttccgaggaggaaccgccgcttccgcttggcagcaatggcaggctattcggctcgctggaaccgcgtattggcgacgagatcagaattctgggcgcggcggtctcagacgtgtgcgtgctagaactagaagcaaatctgggaagaagtaatggaggcagcgctggttccatcgacgccgcagattcctctcatgtccaaaagcccgtgtcgagcagcgggtcggatgatgcggacgattcagcttccgcagatgcaggcaatgcgcgatcggtagtactgcgtcctctatctgaagaagaagaagaagacggcggtgctgaggaacacgtcgtcgttgatgaagaaggagaagaaggctccatgagcgaggccacctcgctgttcaagtgccgcatggagcaagtgctggtgcagtccgtttcggaggccggcgtagggcagcccctggcggttggacccgggcgtgagcggctgagcctgagcgatgctctgttacctcctgcgacccctttggttgttactggtgaggcgagaccgtcggcaaaggagctgctgagctcacggcttgctcaggtggatggagaagaagcgctggcgccggtgatgcctgctgctgctggtagcccagagtcggagctcatgtgtgctgttggttgcggtgtgctgggtcgtgacgcagaacctgcttcggaggacgacgccaacgaccctactactactactcatgtgccgtcaagcatcggcggccgcggcggcggcgacattgctggtgatggccaagtataaccctgcttgtgcttgctcaaggtggtggtgggaatgggcgagggagacgtcatcgtcttctcggatgtgtgttttttgatcttcggagagaatggagtgcgcatgtgtatggtggtctgttcttttttttttcttttttctgtttagtttagttcgtctgttcatacttgttccttttctttttttttttattgtcgaattcggatggacaaagtagggcgacgcatgcagtttggtagcagcgtggatcgctggttgtttcgtgtaacgcgtgccgagtgcagttttttttaaaaaaaa

SEQ ID NO: 21244 - DNA, 2944 bp, Zea Mays
cccccatccgccgaacccttcgcctgctgcgtccgtctggtccgaggcgtttccgttcctgacgccaagaacgagctcttctacgtacgcctgcacgctgagtttagatctccgcgtccgcaggcagggccgaatccagttgaaggcaggcggcgaagagccaaagatgggactcgacgcaaccaacgccctgctgcacatcaagagcgcgttgcgttcttccgccaggcttgcctgccagtccgcgtccgagtaccccgtggcgctcggcgtcggcacgctgctgctgttcctgcacaggctctgccctgccctgctcgctctcctcctgtcctcgtcgccggtgttcctgctaaccgcgcttctgctcggggcgctgctgagctacggggagccaggtgacggcgctccagcgaccggagacggagagggcccgtccccccctgatgctgtggctgtggctgtggctgtggctgtggctgtatccacaccatccgttgctgagtcttgtccagcagttgccgtggaggttcagcgtgtcgccgccgtcgcccacatgccaaggagttcttctgcgagccccgttgtccgcgccgaggaaacaacgtccggtaccaccttcttccatgaagcccaccgtgacgagggcagtatcgtcgcatctgtctctgctgacgacgctcttcgccgcgcggaagttgttgttgtggaaagagaggagcagccggccaccaaggaaatctgcgagaatgttcagctgcggcagtttcggagcagcgctggtgaaggtgttccgatcgaagtggacagcaaagcttctggagctgtttcgcttgatgctcggtgggtggctatggagtcttctagctttcacagggacaacggtgccatcgctgaaggagagggagaggaggatgagcatgttaaggagatatgccagcaggctgagagcgccgtcgcagggaggtgtggtggctatggagtttgcagccagtatcagttcggtgagctcatgagctcgtgttggcaacctgttacgcggcaggatccttgttccgagtccgagtcggattctagtgaaagctcttcggatgcgtcgatcagtgacatcataccgatgctcgacgagctgaacccgcctgtggacttgggtgctggccacccttcctcagccttcagagagaagttgagcgccggctcatcggatgatgaagatggctcggaggaggacaataaccttagctcagatgaagatggagaagaggaagaggaggaggaagagaaaggtgatggaaacaactggaagggctctgtggatccaaactctctggaagctgaagaaaagaacgggagctcggagagtctgatggcgcggcgaagagcaaagaacgctctcgtgttcgatctcgacaggaggctaatggacctgcaggcagctgatgcagtctcgaaaatggaggcggcgtcacgcttccgcgtccaggtgccctccatctccacaccgaggcggcctggcccttcagacgatccagcagagggggacacagtggagctgccgcagatccctggctcggcgccgccgtccgttctgcttccacggaggaaaccatccgatgatgctccgttcgacgaccagatcgtggaccgcgacaggcgtctgcaggagacctggactcctcctcgctcaggctttccatcatcagcacagggtagtaggacacctgacactggcagcttgttcgtgaggccgtcttcttctccgcgacatggcagtggcgtggtagaagtagaagcagaggagcctggattgtccggtgccaaagatgccgctgacgaccactcggagtcggagagcggttccgaggaggaaccgccgcttccgcttggcagcaatggcaggctattcggctcgctggaaccgcgtattggcgacgagatcagaattctgggcgcggcggtctcagacgtgtgcgtgctagaactagaagcaaatctgggaagaagtaatggaggcagcgctggttccatcgacgccgcagattcctctcatgtccaaaagcccgtgtcgagcagcgggtcggatgatgcggacgattcagcttccgcagatgcaggcaatgcgcgatcggtagtactgcgtcctctatctgaagaagaagaagaagacggcggtgctgaggaacacgtcgtcgttgatgaagaaggagaagaaggctccatgagcgaggccacctcgctgttcaagtgccgcatggagcaagtgctggtgcagtccgtttcggaggccggcgtagggcagcccctggcggttggacccgggcgtgagcggctgagcctgagcgatgctctgttacctcctgcgacccctttggttgttactggtgaggcgagaccgtcggcaaaggagctgctgagctcacggcttgctcaggtggatggagaagaagcgctggcgccggtgatgcctgctgctgctggtagcccagagtcggagctcatgtgtgctgttggttgcggtgtgctgggtcgtgacgcagaacctgcttcggaggacgacgccaacgaccctactactactactcatgtgccgtcaagcatcggcggccgcggcggcggcgacattgctggtgatggccaagtataaccctgcttgtgcttgctcaaggtggtggtgggaatgggcgagggagacgtcatcgtcttctcggatgtgtgttttttgatcttcggagagaatggagtgcgcatgtgtatggtggtctgttcttttttttttcttttttctgtttagtttagttcgtctgttcatacttgttccttttctttttttttttattgtcgaattcggatggacaaagtagggcgacgcatgcagtttggtagcagcgtggatcgctggttgtttcgtgtaacgcgtgccgagtgcagttttttttaaaaaaaa

SEQ ID NO: 21245 - DNA, 2958 bp, Zea Mays
tacaccaaaaccagcagcacgccgacacgccgccgcgccgcgccgccattctcccatccgcccccgtgcccccgccgcccttccctaacctcgccgcggaagacgtcgcgccgtgcgtagctagcagttccccgtcgcacgcgcgtcggataagaattggttttggctcttcgtctccccccatccttgggtccttcccctcccactccctcttcgcctcgtccgcggcagtaggctcaagcttaggaactcgctaccgaggatcataaatttctctagggatttggcatatccgcgagtgagcagaattagttggaggcttcgtgatggcgggcgcgaaggcggatgtagacgcagaaacaggagatggcagcggggtcggcagtggcggcggcggcctctttagcgagcagatgctgattgataagctcaacaggctcaacaactcagccactagcattgagacactttcacaatggtgcatttttcaccgcaagagggccaaaagggttgtagatacatgggaaaaacagtttactagttcaagggaggagaagaaaataccattcctctatctatcaaatgatatcctgcaaaacagtaaacgcaagggggcagactatgtggatgagttctggagggttctacctagatccctgaagcatgtttatgaaaatgggggagaggaagggaggaagcaggtggcgagattgatattaatctgggaccaacgtaaagtttttgggactcgtattggaagtatgaaaaatagcattcttggtgacaaccctcctatattggataacaatgtgaatagtttaaatcctagctctaatcccacttcaaattccaaagctgcacggaaggattctggtacagtagtaaaaaaactcactgttggcgggatgcctgaaaagattgtgtctgcataccaatcagtgtttgatcaacattttgatgaagacacagctctaaacaaatgtaagagtactgtgggccttttggagagaataaataaagatattaacgatgctagcatcaacggtaatcagccagcatcatcattgatctctgaccttcaagagcaggaaatgaccttaaaacagtgcatcgaacaacttgaaagtgcaggtagggtgaggatatccctgatcaatcaattgaaagaagctctcagcgaacaggagtcgaagtcaataattctccgtgatcaattgcaagtcgctcgagcagaggctgaacatgccattcaacttagacaacaactgggtcgtgttcttgtcacgaacgatacacaatctacttctagtccgctcatgattactccaccagatcaaacagcagctatgatgcacggttcgggagtaagatcgacacctccccattcacaaccactgaaccctgcagtgtcacttccccctacagtcagtgcagtgggtgatgagtccaagagaacggcagcagctatggcagataagcttgcatctttgtcagctcctgtgcaggtgctgacctccattctctcatcttttgccgctgagcaagctgcttccataaacggcggatcaccttctggagaactctctggagtaccaccaggtttccatattgataagaggcctaggctggagaaaacagggcaggccgaggcgggcgctcctcccttttttgggcaagcgtcacaggtgcaacaacaggttggagcagtgcctacttcttttggaggcacacatccaccaactccaggcccattcccaccccctccaccgccattgccacctctattgccaccgctcatgcaacagtttggtcaaaatactggaggaatgatgggaatgcgaggacctttcgggatgatggctggctctatgccacctccgcctccattgtccaacattctgccggcaggttttccgggactaagtggaccacctcctccacctccacttccaccagctcagagccagccccagcagcagcagacctctcaggcgccacagcaatcaccaacatcagctggattctttcaatcatcaggcatggggttctttcctcctgtgcaggtgcagcaatctcagcctgcccaacgacagtgattcaactgtgtctatttgcactcatgggcttaaaggcagcaccttgcattaactttgtgcattaaacaatatctcaccgagtattgagcctaaacgttggctggtcctgcaagcgaggcacggccaatgacgacggattagaaagattgtagaataggcatgcacgttgtagaactatccccttttttgtccgagtagttttaactcttcctggttatgtgaagttgctagacttcgtttgtttttgatccagtctgcattgatcacccgaagcaaaagaaaacgactttggaaaactggggctgaaattgggacttcgccaactgacaggacagttttatggctgaaacagttgtagaacttactggtcttagtctcatagatatgatgtgaactgcatatttggcatgctgtttaaatctgtggattattattatcatcataccaccttttctgggtttgaaactgcagaattctttcacctggttcttacacaagggctagtttggacaaggaatcgtgatctggaaaagttgaaatgcatcaagttggcgtctgtgcatatgattccagacaccatctattgaggcttattgaggctcagtttggtttcattagttctaggactaaactttagcccatactctgttgggttgtagcgactaattagattctgaacactacacaaagactgaaatgcccttgccagtaaccgtttagctcatgtgtacaaaaactgggcaggaccgtgtataatctacacaaaaactgggtagtacgtttacacaaatactgaacattgcaaacattataatatgttgaaaatgttacacacaaccggtccaaaaatacttgttcaaat

SEQ ID NO: 21246 - DNA, 2352 bp, Zea Mays
ccaaaaccagcagcacgccgacacgccgccgcgccgcgccgccattctcccatccgcccccgtgcccccgccgcccttccctaacctcgccgcggaagacgtcgcgccgtgcgtagctagcagttccccgtcgcacgcgcgtcggataagaattggttttggctcttcgtctccccccatccttgggtccttcccctcccactccctcttcgcctcgtccgcggcagtaggctcaagcttaggaactcgctaccgagaattagttggaggcttcgtgatggcgggcgcgaaggcggatgtagacgcagaaacaggagatggcagcggggtcggcagtggcggcggcggcctctttagcgagcagatgctgattgataagctcaacaggctcaacaactcagccactagcattgagacactttcacaatggtgcatttttcaccgcaagagggccaaaagggttgtagatacatgggaaaaacagtttactagttcaagggaggagaagaaaataccattcctctatctatcaaatgatatcctgcaaaacagtaaacgcaagggggcagactatgtggatgagttctggagggttctacctagatccctgaagcatgtttatgaaaatgggggagaggaagggaggaagcaggtggcgagattgatattaatctgggaccaacgtaaagtttttgggactcgtattggaagtatgaaaaatagcattcttggtgacaaccctcctatattggataacaatgtgaatagtttaaatcctagctctaatcccacttcaaattccaaagctgcacggaaggattctggtacagtagtaaaaaaactcactgttggcgggatgcctgaaaagattgtgtctgcataccaatcagtgtttgatcaacattttgatgaagacacagctctaaacaaatgtaagagtactgtgggccttttggagagaataaataaagatattaacgatgctagcatcaacggtaatcagccagcatcatcattgatctctgaccttcaagagcaggaaatgaccttaaaacagtgcatcgaacaacttgaaagtgcaggagtcgaagtcaataattctccgtgatcaattgcaagtcgctcgagcagaggctgaacatgccattcaacttagacaacaactgggtcgtgttcttgtcacgaacgatacacaatctacttctagtccgctcatgattactccaccagatcaaacagcagctatgatgcacggttcgggagtaagatcgacacctccccattcacaaccactgaaccctgcagtgtcacttccccctacagtcagtgcagtgggtgatgagtccaagagaacggcagcagctatggcagataagcttgcatctttgtcagctcctgtgcaggtgctgacctccattctctcatcttttgccgctgagcaagctgcttccataaacggcggatcaccttctggagaactctctggagtaccaccaggtttccatattgataagaggcctaggctggagaaaacagggcaggccgaggcgggcgctcctcccttttttgggcaagcgtcacaggtgcaacaacaggttggagcagtgcctacttcttttggaggcacacatccaccaactccaggcccattcccaccccctccaccgccattgccacctctattgccaccgctcatgcaacagtttggtcaaaatactggaggaatgatgggaatgcgaggacctttcgggatgatggctggctctatgccacctccgcctccattgtccaacattctgccggcaggttttccgggactaagtggaccacctcctccacctccacttccaccagctcagagccagccccagcagcagcagacctctcaggcgccacagcaatcaccaacatcagctggattctttcaatcatcaggcatggggttctttcctcctgtgcagaattctttcacctggttcttacacaagggctagtttggacaaggaatcgtgatctggaaaagttgaaatgcatcaagttggcgtctgtgcatatgattccagacaccatctattgaggcttattgaggctcagtttggtttcattagttctaggactaaactttagcccatactctgttgggttgtagcgactaattagattctgaacactacacaaagactgaaatgcccttgccagtaaccgtttagctcatgtgtacaaaaactgggcaggaccgtgtataatctacacaaaaactgggtagtacgtttacacaaatactgaacattgcaaacattataatatgttgaaaatgttacacacaaccggtccaaaaatacttgttcaaat

SEQ ID NO: 21247 - DNA, 1283 bp, Zea Mays
ccaaaaccagcagcacgccgacacgccgccgcgccgcgccgccattctcccatccgcccccgtgcccccgccgcccttccctaacctcgccgcggaagacgtcgcgccgtgcgtagctagcagttccccgtcgcacgcgcgtcggataagaattggttttggctcttcgtctccccccatccttgggtccttcccctcccactccctcttcgcctcgtccgcggcagtaggctcaagcttaggaactcgctaccgagaattagttggaggcttcgtgatggcgggcgcgaaggcggatgtagacgcagaaacaggagatggcagcggggtcggcagtggcggcggcggcctctttagcgagcagatgctgattgataagctcaacaggctcaacaactcagccactagcattgagacactttcacaatggtgcatttttcaccgcaagagggccaaaagggttgtagatacatgggaaaaacagtttactagttcaagggaggagaagaaaataccattcctctatctatcaaatgatatcctgcaaaacagtaaacgcaagggggcagactatgtggatgagttctggagggttctacctagatccctgaagcatgtttatgaaaatgggggagaggaagggaggaagcaggtggcgagattgatattaatctgggaccaacgtaaagtttttgggactcgtattggaagtatgaaaaatagcattcttggtgacaaccctcctatattggataacaatgtgaatagtttaaatcctagctctaatcccacttcaaattccaaagctgcacggaaggattctggtacagtagtaaaaaaactcactgttggcgggatgcctgaaaagattgtgtctgcataccaatcagtgtttgatcaacattttgatgaagacacagctctaaacaaatgtaagagtactgtgggccttttggagagaataaataaagatattaacgatgctagcatcaacggtaatcagccagcatcatcattgatctctgaccttcaagagcaggaaatgaccttaaaacagtgcatcgaacaacttgaaagtgcaggtagggtgaggatatccctgatcaatcaattgaaagaagctctcagcgaacaggagtcgaagtcaataattctccgtgatcaattgcaattggtgaatgttcggcgccataagtgatgaaagccatgcacagattgatctgagtctgctaatagcaagcagattgaagcaacaacagatcatggtgtgcaactagctagca

SEQ ID NO: 21248 - DNA, 2814 bp, Zea Mays
ccaaaaccagcagcacgccgacacgccgccgcgccgcgccgccattctcccatccgcccccgtgcccccgccgcccttccctaacctcgccgcggaagacgtcgcgccgtgcgtagctagcagttccccgtcgcacgcgcgtcggataagaattggttttggctcttcgtctccccccatccttgggtccttcccctcccactccctcttcgcctcgtccgcggcagtaggctcaagcttaggaactcgctaccgagaattagttggaggcttcgtgatggcgggcgcgaaggcggatgtagacgcagaaacaggagatggcagcggggtcggcagtggcggcggcggcctctttagcgagcagatgctgattgataagctcaacaggctcaacaactcagccactagcattgagacactttcacaatggtgcatttttcaccgcaagagggccaaaagggttgtagatacatgggaaaaacagtttactagttcaagggaggagaagaaaataccattcctctatctatcaaatgatatcctgcaaaacagtaaacgcaagggggcagactatgtggatgagttctggagggttctacctagatccctgaagcatgtttatgaaaatgggggagaggaagggaggaagcaggtggcgagattgatattaatctgggaccaacgtaaagtttttgggactcgtattggaagtatgaaaaatagcattcttggtgacaaccctcctatattggataacaatgtgaatagtttaaatcctagctctaatcccacttcaaattccaaagctgcacggaaggattctggtacagtagtaaaaaaactcactgttggcgggatgcctgaaaagattgtgtctgcataccaatcagtgtttgatcaacattttgatgaagacacagctctaaacaaatgtaagagtactgtgggccttttggagagaataaataaagatattaacgatgctagcatcaacggtaatcagccagcatcatcattgatctctgaccttcaagagcaggaaatgaccttaaaacagtgcatcgaacaacttgaaagtgcaggtagggtgaggatatccctgatcaatcaattgaaagaagctctcagcgaacaggagtcgaagtcaataattctccgtgatcaattgcaaaccgatgcagaagccaggggtgtggcaaggaaactgcagtcatggaggagccagcattcagttccagaggggaagcgtaagggaactgatgcaagttgttcatcccaggggtcaacaaccggagcggggtgccggcaaatggatgaaactacacagtcagaatctagcactgttgtttcttcacctggccatctcgagcatcaggaccactcaactgtcccagtggatccagttctggaaattcctcctgaattcgatccagattctgctgagtttatctctgacattagtgattatgtaacagaatatggaaagaaaaatgttgtggaaatttctcttgagtccaggaacagtgcagcaaaacagcactgggagcaaatggaaatttctcttgagtttgatacagatgcttctgagctggtttcagacacatggcaccatggagcaaaccagcaacggggggaattggaagcttctcttgagtttgatcctgacacctctgagctcgctcctgacataacagaatatacattaaaactaaaacagtcacatgaacgtgctcgaaagcttagggcagatttggcagttgaagagcagcgggaacaagaactgagcagaatgctgaagggcatagtaacagatccaaactttactgagacacataaaaaacggccaagaagaaagagtagcatagaaagactgaaagtgtcaaggcgtttagctgaagaggcaatgaactattttgaggaatgcgtttcaatttcaacaatggatagcactgatttctcatcacctgaggatcctcaaccaaattcagttgtgaatgtcccaccaaagagcaatagtagatttttccacaaagggagatcaatctttcaagaaccccacactctggctgatcaacatggatatcatgtggaatctgacaagcaaactcagtgctcaattagcgcaactggatccgatgtgtctgacagtgttatctttagtcacacaaatggtgctggtttgaaaatcaggagcgtctccagcgatgatcctgatggctttgacactccgcggagcagaagttcttgtttctctttcacccacgagccagtaaaaaagctcgaaaactgcgatgttcggcaataccttgggaatttcggaagggggaacaatacagagctaaaggagacgaggtcaagttattttgccgatgactatgcctcacagaaagttgatccggacttactgaaggatatggtgacctttcagaatcggatagagtatggagggctcgttatatgtaacatcagaacattctgacagtgaacagagccactgtccgaagaagctaagtatagcattgtgcaattatccttttggcgaatgtggttttttggtgactgctataatcttttgtcatgtttctctactaattatcaatgctatgctataatctgtgtggctgtgtgcgtcgtatcttgtatgcgatccacccggattcataatccgtatttctaacgagacagaacaactcctatccagtggtatatattagttagattccttaggccgtgcttagcagatcgtgcaaaactctttttttttactatagactgtattgtttgtatgttggagttccgagttcgaaatttgga

SEQ ID NO: 21249 - DNA, 2900 bp, Zea Mays
caaaaccagcagcacgccgacacgccgccgcgccgcgccgccattctcccatccgcccccgtgcccccgccgcccttccctaacctcgccgcggaagacgtcgcgccgtgcgtagctagcagttccccgtcgcacgcgcgtcggataagaattggttttggctcttcgtctccccccatccttgggtccttcccctcccactccctcttcgcctcgtccgcggcagtaggctcaagcttaggaactcgctaccgaggatcataaatttctctagggatttggcatatccgcgagtgagcagaattagttggaggcttcgtgatggcgggcgcgaaggcggatgtagacgcagaaacaggagatggcagcggggtcggcagtggcggcggcggcctctttagcgagcagatgctgattgataagctcaacaggctcaacaactcagccactagcattgagacactttcacaatggtgcatttttcaccgcaagagggccaaaagggttgtagatacatgggaaaaacagtttactagttcaagggaggagaagaaaataccattcctctatctatcaaatgatatcctgcaaaacagtaaacgcaagggggcagactatgtggatgagttctggagggttctacctagatccctgaagcatgtttatgaaaatgggggagaggaagggaggaagcaggtggcgagattgatattaatctgggaccaacgtaaagtttttgggactcgtattggaagtatgaaaaatagcattcttggtgacaaccctcctatattggataacaatgtgaatagtttaaatcctagctctaatcccacttcaaattccaaagctgcacggaaggattctggtacagtagtaaaaaaactcactgttggcgggatgcctgaaaagattgtgtctgcataccaatcagtgtttgatcaacattttgatgaagacacagctctaaacaaatgtaagagtactgtgggccttttggagagaataaataaagatattaacgatgctagcatcaacggtaatcagccagcatcatcattgatctctgaccttcaagagcaggaaatgaccttaaaacagtgcatcgaacaacttgaaagtgcaggagtcgaagtcaataattctccgtgatcaattgcaagtcgctcgagcagaggctgaacatgccattcaacttagacaacaactgggtcgtgttcttgtcacgaacgatacacaatctacttctagtccgctcatgattactccaccagatcaaacagcagctatgatgcacggttcgggagtaagatcgacacctccccattcacaaccactgaaccctgcagtgtcacttccccctacagtcagtgcagtgggtgatgagtccaagagaacggcagcagctatggcagataagcttgcatctttgtcagctcctgtgcaggtgctgacctccattctctcatcttttgccgctgagcaagctgcttccataaacggcggatcaccttctggagaactctctggagtaccaccaggtttccatattgataagaggcctaggctggagaaaacagggcaggccgaggcgggcgctcctcccttttttgggcaagcgtcacaggtgcaacaacaggttggagcagtgcctacttcttttggaggcacacatccaccaactccaggcccattcccaccccctccaccgccattgccacctctattgccaccgctcatgcaacagtttggtcaaaatactggaggaatgatgggaatgcgaggacctttcgggatgatggctggctctatgccacctccgcctccattgtccaacattctgccggcaggttttccgggactaagtggaccacctcctccacctccacttccaccagctcagagccagccccagcagcagcagacctctcaggcgccacagcaatcaccaacatcagctggattctttcaatcatcaggcatggggttctttcctcctgtgcaggtgcagcaatctcagcctgcccaacgacagtgattcaactgtgtctatttgcactcatgggcttaaaggcagcaccttgcattaactttgtgcattaaacaatatctcaccgagtattgagcctaaacgttggctggtcctgcaagcgaggcacggccaatgacgacggattagaaagattgtagaataggcatgcacgttgtagaactatccccttttttgtccgagtagttttaactcttcctggttatgtgaagttgctagacttcgtttgtttttgatccagtctgcattgatcacccgaagcaaaagaaaacgactttggaaaactggggctgaaattgggacttcgccaactgacaggacagttttatggctgaaacagttgtagaacttactggtcttagtctcatagatatgatgtgaactgcatatttggcatgctgtttaaatctgtggattattattatcatcataccaccttttctgggtttgaaactgcagaattctttcacctggttcttacacaagggctagtttggacaaggaatcgtgatctggaaaagttgaaatgcatcaagttggcgtctgtgcatatgattccagacaccatctattgaggcttattgaggctcagtttggtttcattagttctaggactaaactttagcccatactctgttgggttgtagcgactaattagattctgaacactacacaaagactgaaatgcccttgccagtaaccgtttagctcatgtgtacaaaaactgggcaggaccgtgtataatctacacaaaaactgggtagtacgtttacacaaatactgaacattgcaaacattataatatgttgaaaatgttacacacaaccggtccaaaaatacttgttcaaat

SEQ ID NO: 21250 - DNA, 2846 bp, Zea Mays
gccgccattctcccatccgcccccgtgcccccgccgcccttccctaacctcgccgcggaagacgtcgcgccgtgcgtagctagcagttccccgtcgcacgcgcgtcggataagaattggttttggctcttcgtctccccccatccttgggtccttcccctcccactccctcttcgcctcgtccgcggcagtaggctcaagcttaggaactcgctaccgagggatttggcatatccgcgagtgagcagaattagttggaggcttcgtgatggcgggcgcgaaggcggatgtagacgcagaaacaggagatggcagcggggtcggcagtggcggcggcggcctctttagcgagcagatgctgattgataagctcaacaggctcaacaactcagccactagcattgagacactttcacaatggtgcatttttcaccgcaagagggccaaaagggttgtagatacatgggaaaaacagtttactagttcaagggaggagaagaaaataccattcctctatctatcaaatgatatcctgcaaaacagtaaacgcaagggggcagactatgtggatgagttctggagggttctacctagatccctgaagcatgtttatgaaaatgggggagaggaagggaggaagcaggtggcgagattgatattaatctgggaccaacgtaaagtttttgggactcgtattggaagtatgaaaaatagcattcttggtgacaaccctcctatattggataacaatgtgaatagtttaaatcctagctctaatcccacttcaaattccaaagctgcacggaaggattctggtacagtagtaaaaaaactcactgttggcgggatgcctgaaaagattgtgtctgcataccaatcagtgtttgatcaacattttgatgaagacacagctctaaacaaatgtaagagtactgtgggccttttggagagaataaataaagatattaacgatgctagcatcaacggtaatcagccagcatcatcattgatctctgaccttcaagagcaggaaatgaccttaaaacagtgcatcgaacaacttgaaagtgcaggagtcgaagtcaataattctccgtgatcaattgcaagtcgctcgagcagaggctgaacatgccattcaacttagacaacaactgggtcgtgttcttgtcacgaacgatacacaatctacttctagtccgctcatgattactccaccagatcaaacagcagctatgatgcacggttcgggagtaagatcgacacctccccattcacaaccactgaaccctgcagtgtcacttccccctacagtcagtgcagtgggtgatgagtccaagagaacggcagcagctatggcagataagcttgcatctttgtcagctcctgtgcaggtgctgacctccattctctcatcttttgccgctgagcaagctgcttccataaacggcggatcaccttctggagaactctctggagtaccaccaggtttccatattgataagaggcctaggctggagaaaacagggcaggccgaggcgggcgctcctcccttttttgggcaagcgtcacaggtgcaacaacaggttggagcagtgcctacttcttttggaggcacacatccaccaactccaggcccattcccaccccctccaccgccattgccacctctattgccaccgctcatgcaacagtttggtcaaaatactggaggaatgatgggaatgcgaggacctttcgggatgatggctggctctatgccacctccgcctccattgtccaacattctgccggcaggttttccgggactaagtggaccacctcctccacctccacttccaccagctcagagccagccccagcagcagcagacctctcaggcgccacagcaatcaccaacatcagctggattctttcaatcatcaggcatggggttctttcctcctgtgcaggtgcagcaatctcagcctgcccaacgacagtgattcaactgtgtctatttgcactcatgggcttaaaggcagcaccttgcattaactttgtgcattaaacaatatctcaccgagtattgagcctaaacgttggctggtcctgcaagcgaggcacggccaatgacgacggattagaaagattgtagaataggcatgcacgttgtagaactatccccttttttgtccgagtagttttaactcttcctggttatgtgaagttgctagacttcgtttgtttttgatccagtctgcattgatcacccgaagcaaaagaaaacgactttggaaaactggggctgaaattgggacttcgccaactgacaggacagttttatggctgaaacagttgtagaacttactggtcttagtctcatagatatgatgtgaactgcatatttggcatgctgtttaaatctgtggattattattatcatcataccaccttttctgggtttgaaactgcagaattctttcacctggttcttacacaagggctagtttggacaaggaatcgtgatctggaaaagttgaaatgcatcaagttggcgtctgtgcatatgattccagacaccatctattgaggcttattgaggctcagtttggtttcattagttctaggactaaactttagcccatactctgttgggttgtagcgactaattagattctgaacactacacaaagactgaaatgcccttgccagtaaccgtttagctcatgtgtacaaaaactgggcaggaccgtgtataatctacacaaaaactgggtagtacgtttacacaaatactgaacattgcaaacattataatatgttgaaaatgttacacacaaccggtccaaaaatacttgttcaaat

SEQ ID NO: 21251 - DNA, 2684 bp, Zea Mays
attctcccatccgcccccgtgcccccgccgcccttccctaacctcgccgcggaagacgtcgcgccgtgcgtagctagcagttccccgtcgcacgcgcgtcggataagaattggttttggctcttcgtctccccccatccttgggtccttcccctcccactccctcttcgcctcgtccgcggcagtaggctcaagcttaggaactcgctaccgaggatcataaatttctctagggatttggcatatccgcgagtgagcagaattagttggaggcttcgtgatggcgggcgcgaaggcggatgtagacgcagaaacaggagatggcagcggggtcggcagtggcggcggcggcctctttagcgagcagatgctgattgataagctcaacaggctcaacaactcagccactagcattgagacactttcacaatggtgcatttttcaccgcaagagggccaaaagggttgtagatacatgggaaaaacagtttactagttcaagggaggagaagaaaataccattcctctatctatcaaatgatatcctgcaaaacagtaaacgcaagggggcagactatgtggatgagttctggagggttctacctagatccctgaagcatgtttatgaaaatgggggagaggaagggaggaagcaggtggcgagattgaaactcactgttggcgggatgcctgaaaagattgtgtctgcataccaatcagtgtttgatcaacattttgatgaagacacagctctaaacaaatgtaagagtactgtgggccttttggagagaataaataaagatattaacgatgctagcatcaacggtaatcagccagcatcatcattgatctctgaccttcaagagcaggaaatgaccttaaaacagtgcatcgaacaacttgaaagtgcaggagtcgaagtcaataattctccgtgatcaattgcaagtcgctcgagcagaggctgaacatgccattcaacttagacaacaactgggtcgtgttcttgtcacgaacgatacacaatctacttctagtccgctcatgattactccaccagatcaaacagcagctatgatgcacggttcgggagtaagatcgacacctccccattcacaaccactgaaccctgcagtgtcacttccccctacagtcagtgcagtgggtgatgagtccaagagaacggcagcagctatggcagataagcttgcatctttgtcagctcctgtgcaggtgctgacctccattctctcatcttttgccgctgagcaagctgcttccataaacggcggatcaccttctggagaactctctggagtaccaccaggtttccatattgataagaggcctaggctggagaaaacagggcaggccgaggcgggcgctcctcccttttttgggcaagcgtcacaggtgcaacaacaggttggagcagtgcctacttcttttggaggcacacatccaccaactccaggcccattcccaccccctccaccgccattgccacctctattgccaccgctcatgcaacagtttggtcaaaatactggaggaatgatgggaatgcgaggacctttcgggatgatggctggctctatgccacctccgcctccattgtccaacattctgccggcaggttttccgggactaagtggaccacctcctccacctccacttccaccagctcagagccagccccagcagcagcagacctctcaggcgccacagcaatcaccaacatcagctggattctttcaatcatcaggcatggggttctttcctcctgtgcaggtgcagcaatctcagcctgcccaacgacagtgattcaactgtgtctatttgcactcatgggcttaaaggcagcaccttgcattaactttgtgcattaaacaatatctcaccgagtattgagcctaaacgttggctggtcctgcaagcgaggcacggccaatgacgacggattagaaagattgtagaataggcatgcacgttgtagaactatccccttttttgtccgagtagttttaactcttcctggttatgtgaagttgctagacttcgtttgtttttgatccagtctgcattgatcacccgaagcaaaagaaaacgactttggaaaactggggctgaaattgggacttcgccaactgacaggacagttttatggctgaaacagttgtagaacttactggtcttagtctcatagatatgatgtgaactgcatatttggcatgctgtttaaatctgtggattattattatcatcataccaccttttctgggtttgaaactgcagaattctttcacctggttcttacacaagggctagtttggacaaggaatcgtgatctggaaaagttgaaatgcatcaagttggcgtctgtgcatatgattccagacaccatctattgaggcttattgaggctcagtttggtttcattagttctaggactaaactttagcccatactctgttgggttgtagcgactaattagattctgaacactacacaaagactgaaatgcccttgccagtaaccgtttagctcatgtgtacaaaaactgggcaggaccgtgtataatctacacaaaaactgggtagtacgtttacacaaatactgaacattgcaaacattataatatgttgaaaatgttacacacaaccggtccaaaaatacttgttcaaat

SEQ ID NO: 21252 - DNA, 2313 bp, Zea Mays
cttgaccccctttcttccgctggtaacctgaccccacaggtcattctcaaaggtcaaagccagcaggcacccagcccccgcccccgccaccgccattatcagcagcttcgacttctccggccgctccgtccttttggcatttcctcccgtcttctctcgctgcttttcattacctcctcccgcgccgcccgtagtaccgattcgcactcggatggcgtcggcggcgttcaagtccaccacgcgccgcgccctccacgccaccaccacctcccgctccgacccgcccccgtgcccgcgccgcacccgctcgcgctccgtcagcgcggcgccccgcgccgcccacgaggactacgccaacacgcgcaccaacccgctcttcgactccgcggcctccccgtccgcctcgccatctccgccccccggggcggctgctgctactggtgctacctccggccgtggggatgcggcgggccgggagagggggcgtgagccgcggctcaagagcggggggcgcggcggcggtggagggagggcgcggtcggcctccgtcgcgccgccgcagcggcgccacaccgcctcggtggcggactctgctgccgatgtcggcgggaggaaggcttcgcgggcgcggtcggtggccgacgtcgcacgcacctaccggggctccgagaccgatgcagaagccaggggtgtggcaaggaaactgcagtcatggaggagccagcattcagttccagaggggaagcgtaagggaactgatgcaagttgttcatcccaggggtcaacaaccggagcggggtgccggcaaatggatgaaactacacagtcagaatctagcactgttgtttcttcacctggccatctcgagcatcaggaccactcaactgtcccagtggatccagttctggaaattcctcctgaattcgatccagattctgctgagtttatctctgacattagtgattatgtaacagaatatggaaagaaaaatgttgtggaaatttctcttgagtccaggaacagtgcagcaaaacagcactgggagcaaatggaaatttctcttgagtttgatacagatgcttctgagctggtttcagacacatggcaccatggagcaaaccagcaacggggggaattggaagcttctcttgagtttgatcctgacacctctgagctcgctcctgacataacagaatatacattaaaactaaaacagtcacatgaacgtgctcgaaagcttagggcagatttggcagttgaagagcagcgggaacaagaactgagcagaatgctgaagggcatagtaacagatccaaactttactgagacacataaaaaacggccaagaagaaagagtagcatagaaagactgaaagtgtcaaggcgtttagctgaagaggcaatgaactattttgaggaatgcgtttcaatttcaacaatggatagcactgatttctcatcacctgaggatcctcaaccaaattcagttgtgaatgtcccaccaaagagcaatagtagatttttccacaaagggagatcaatctttcaagaaccccacactctggctgatcaacatggatatcatgtggaatctgacaagcaaactcagtgctcaattagcgcaactggatccgatgtgtctgacagtgttatctttagtcacacaaatggtgctggtttgaaaatcaggagcgtctccagcgatgatcctgatggctttgacactccgcggagcagaagttcttgtttctctttcacccacgagccagtaaaaaagctcgaaaactgcgatgttcggcaataccttgggaatttcggaagggggaacaatacagagctaaaggagacgaggtcaagttattttgccgatgactatgcctcacagaaagttgatccggacttactgaaggatatggtgacctttcagaatcggatagagtatggagggctcgttatatgtaacatcagaacattctgacagtgaacagagccactgtccgaagaagctaagtatagcattgtgcaattatccttttggcgaatgtggttttttggtgactgctataatcttttgtcatgtttctctactaattatcaatgctatgctataatctgtgtggctgtgtgcgtcgtatcttgtatgcgatccacccggattcataatccgtatttctaacgagacagaacaactcctatccagtggtatatattagttagattccttaggccgtgcttagcagatcgtgcaaaactctttttttttactatagactgtattgtttgtatgttggagttccgagttcgaaatttgga

SEQ ID NO: 21253 - DNA, 2305 bp, Zea Mays
ccccctttcttccgctggtaacctgaccccacaggtcattctcaaaggtcaaagccagcaggcacccagcccccgcccccgccaccgccattatcagcagcttcgacttctccggccgctccgtccttttggcatttcctcccgtcttctctcgctgcttttcattacctcctcccgcgccgcccgtagtaccgattcgcactcggatggcgtcggcggcgttcaagtccaccacgcgccgcgccctccacgccaccaccacctcccgctccgacccgcccccgtgcccgcgccgcacccgctcgcgctccgtcagcgcggcgccccgcgccgcccacgaggactacgccaacacgcgcaccaacccgctcttcgactccgcggcctccccgtccgcctcgccatctccgccccccggggcggctgctgctactggtgctacctccggccgtggggatgcggcgggccgggagagggggcgtgagccgcggctcaagagcggggggcgcggcggcggtggagggagggcgcggtcggcctccgtcgcgccgccgcagcggcgccacaccgcctcggtggcggactctgctgccgatgtcggcgggaggaaggcttcgcgggcgcggtcggtggccgacgtcgcacgcacctaccggggctccgagaccgatgcagaagccaggggtgtggcaaggaaactgcagtcatggaggagccagcattcagttccagaggggaagcgtaagggaactgatgcaagttgttcatcccaggggtcaacaaccggagcggggtgccggcaaatggatgaaactacacagtcagaatctagcactgttgtttcttcacctggccatctcgagcatgaccactcaactgtcccagtggatccagttctggaaattcctcctgaattcgatccagattctgctgagtttatctctgacattagtgattatgtaacagaatatggaaagaaaaatgttgtggaaatttctcttgagtccaggaacagtgcagcaaaacagcactgggagcaaatggaaatttctcttgagtttgatacagatgcttctgagctggtttcagacacatggcaccatggagcaaaccagcaacggggggaattggaagcttctcttgagtttgatcctgacacctctgagctcgctcctgacataacagaatatacattaaaactaaaacagtcacatgaacgtgctcgaaagcttagggcagatttggcagttgaagagcagcgggaacaagaactgagcagaatgctgaagggcatagtaacagatccaaactttactgagacacataaaaaacggccaagaagaaagagtagcatagaaagactgaaagtgtcaaggcgtttagctgaagaggcaatgaactattttgaggaatgcgtttcaatttcaacaatggatagcactgatttctcatcacctgaggatcctcaaccaaattcagttgtgaatgtcccaccaaagagcaatagtagatttttccacaaagggagatcaatctttcaagaaccccacactctggctgatcaacatggatatcatgtggaatctgacaagcaaactcagtgctcaattagcgcaactggatccgatgtgtctgacagtgttatctttagtcacacaaatggtgctggtttgaaaatcaggagcgtctccagcgatgatcctgatggctttgacactccgcggagcagaagttcttgtttctctttcacccacgagccagtaaaaaagctcgaaaactgcgatgttcggcaataccttgggaatttcggaagggggaacaatacagagctaaaggagacgaggtcaagttattttgccgatgactatgcctcacagaaagttgatccggacttactgaaggatatggtgacctttcagaatcggatagagtatggagggctcgttatatgtaacatcagaacattctgacagtgaacagagccactgtccgaagaagctaagtatagcattgtgcaattatccttttggcgaatgtggttttttggtgactgctataatcttttgtcatgtttctctactaattatcaatgctatgctataatctgtgtggctgtgtgcgtcgtatcttgtatgcgatccacccggattcataatccgtatttctaacgagacagaacaactcctatccagtggtatatattagttagattccttaggccgtgcttagcagatcgtgcaaaactctttttttttactatagactgtattgtttgtatgttggagttccgagttcgaaatttgga

SEQ ID NO: 21254 - DNA, 1950 bp, Zea Mays
catttcctcccgtcttctctcgctgcttttcattacctcctcccgcgccgcccgtagtaccgattcgcactcggatggcgtcggcggcgttcaagtccaccacgcgccgcgccctccacgccaccaccacctcccgctccgacccgcccccgtgcccgcgccgcacccgctcgcgctccgtcagcgcggcgccccgcgccgcccacgaggactacgccaacacgcgcaccaacccgctcttcgactccgcggcctccccgtccgcctcgccatctccgccccccggggcggctgctgctactggtgctacctccggccgtggggatgcggcgggccgggagagggggcgtgagccgcggctcaagagcggggggcgcggcggcggtggagggagggcgcggtcggcctccgtcgcgccgccgcagcggcgccacaccgcctcggtggcggactctgctgccgatgtcggcgggaggaaggcttcgcgggcgcggtcggtggccgacgtcgcacgcacctaccggggctccgagaccgatgcagaagccaggggtgtggcaaggaaactgcagtcatggaggagccagcattcagttccagaggggaagcgtaagggaactgatgcaagttgttcatcccaggggtcaacaaccggagcggggtgccggcaaatggatgaaactacacagtcagaatctagcactgttgtttcttcacctggccatctcgagcatacacatggcaccatggagcaaaccagcaacggggggaattggaagcttctcttgagtttgatcctgacacctctgagctcgctcctgacataacagaatatacattaaaactaaaacagtcacatgaacgtgctcgaaagcttagggcagatttggcagttgaagagcagcgggaacaagaactgagcagaatgctgaagggcatagtaacagatccaaactttactgagacacataaaaaacggccaagaagaaagagtagcatagaaagactgaaagtgtcaaggcgtttagctgaagaggcaatgaactattttgaggaatgcgtttcaatttcaacaatggatagcactgatttctcatcacctgaggatcctcaaccaaattcagttgtgaatgtcccaccaaagagcaatagtagatttttccacaaagggagatcaatctttcaagaaccccacactctggctgatcaacatggatatcatgtggaatctgacaagcaaactcagtgctcaattagcgcaactggatccgatgtgtctgacagtgttatctttagtcacacaaatggtgctggtttgaaaatcaggagcgtctccagcgatgatcctgatggctttgacactccgcggagcagaagttcttgtttctctttcacccacgagccagtaaaaaagctcgaaaactgcgatgttcggcaataccttgggaatttcggaagggggaacaatacagagctaaaggagacgaggtcaagttattttgccgatgactatgcctcacagaaagttgatccggacttactgaaggatatggtgacctttcagaatcggatagagtatggagggctcgttatatgtaacatcagaacattctgacagtgaacagagccactgtccgaagaagctaagtatagcattgtgcaattatccttttggcgaatgtggttttttggtgactgctataatcttttgtcatgtttctctactaattatcaatgctatgctataatctgtgtggctgtgtgcgtcgtatcttgtatgcgatccacccggattcataatccgtatttctaacgagacagaacaactcctatccagtggtatatattagttagattccttaggccgtgcttagcagatcgtgcaaaactctttttttttactatagactgtattgtttgtatgttggagttccgagttcgaaatttgga

SEQ ID NO: 21255 - DNA, 1317 bp, Zea Mays
ggcacagagatggcgagatgccaggcgagcacgagcaaggcaagactgcatgagcacaacgggggggccgggccagacggacgggacgggaagcagcacgcgccacgcaacaacaatggcagttggcacagaggcgcaacgcaaaaaccccccaccgccaccgctctataaaaaccccgtcctcctcctcctcctcctcctcccccgcctcgccgccaaggcagccaaggcctatgaccttgcggccattgaataccgtggcgtcaatgctgtaaccaacttcgacatcagctgctacctggaccacccgctgttcctggcacagctccaacaggagccacaggtggtgccggcactcaaccaagaacctcaacctgatcagagcgaaaccggaactacagagcaagagccggagtcaagcgaagccaagacaccggatggcagtgcagaacccgatgagaacgcggtgcctgacgacaccgcggagcccctcaccacagtcgacgacagcatcgaagagggcttgtggagcccttgcatggattacgagctagacaccatgtcgagaccaaactttggcagctcaatcaatctgagcgagtggttcgctgacgcagacttcgactgcaacatcggatgcctgttcgatgggtgttctgcggctgacgaaggaagcaaggatggtgtaggtctggcagatttcagtctgtttgaggcaggtgatgtccagctgaaggatgttctttcggatatggaagaggggatacaacctccagcgatgatcagtgtgtgcaactaattctggaacccgaggaggttttcgctttccaggtgtcctgtcttgggtaatccttgatctgtctaatgccacagtgccactgcaccagagcagctgagaactttcttgtagaaagcccatggcagtttggcgttagacaagtgtgtcgatgttctttaattctttgaatttgcccctaggctgcttggctaacgttaagggtttgtcattgtctcacttagcctagattcaactaatcacatcctgaatctgaagtggttgtgcttgtgcagtttatcactgagtttacatggcatgatcatggtaacgcagccagtgcagcatagatttgttcgtttgaacagtttaccaaggctgtaaccctagtaagctccagattaaggaacctttgttttcaccattctatatttactagatgaatgcccgtatgttgcaacgggaatatataatattagtatactacaataacttatatacaaaatgtgtgttataccattatgagaaaatgtttcaaaatc

SEQ ID NO: 21256 - DNA, 1754 bp, Zea Mays
cccagctaccgccacagctgcgggggcaatctcgtccgatccactgtcatcgcgttcaaccacgcatgccacacctaccccggccgcgacggacccatgtcagctcctcattgcttattgtggcatccaacgcccgtgtgctactgccctactgctacctcctcttgattcctaagcagacagagacagagccccggcgacggcgagatggaagaggagcagagcagcggcggatggggcgaggaggcgacgaacaaggcgccgctgctggagccacgggcggcgtcggaccaccagcaccgcaacggaacatcagcaggagacggggctggcgccggcaaggcggaggcggagtggtcggcgctgccgctgcggcggcgcgtgtgggaggagaacaagaggctgtgggtggtggcggggccgtccatcttcacgcgcttctcctccttcggcgtcaccgtcatcagccaggccttcatcggccacatcggcgccacggagctggccgcctacgcgctcgtctccaccgtgctcatgaggttcagcaacggcatcctggcgcagagcaagaacgcggtgatcacgtacctggccatgctgaacctcggcctccacctgctcctgtcctggctggccaccgccaggctccgcctcggcctcgccggcgtcatgggctccatggttgtcgccatgtggatccccgtgctcggccagctcgccttcgtcttcttcggcgggtgcccgcgcacctggaccggcttctcctccgccgccttcgccgacctcgccgccatcgtcaggctgtcgctgtcgtctggcgtcatgctctgtttggagctgtggtacaacaccatactggtgctgctcactgggtacatgaagaacgcagaggttgcgctggacgccctctcaatatgcctcaacatcaacggctgggagatgatgatttccatcggctttctggcggcaaccggagtacgggtggcgaacgagctgggagccgggagcgcgaggagggccaagttcgccatctacaacgtggtggccacctcctccatcatcgggtccgtgctgttcgtgctgttcctcctcttccgcggaggcctcgcctacatattcaccgacagccaggcggtggcggacgcagtcgccggcctctcgcccctgctggccttctccatactgctcaacagcgtccagccagtgctgtcaggcgtcgctgtcggcgcgggctggcagagcgtcgtcgcctacgttaacatcacttcgtactacctcatcggcatccctcttggagccgtgctgggctacgcgctggggcttcatgtgaagggcatctggatcggcatgctgctcggaacgctggtccagactgttgtgcttctcttcataacgttgaagaccgactgggaaaaacaggtggaggttgctcaagagaggctgaagagatggtacatggaagagaacagaagactccaggggtccagacgaaacccttaggccggccctcagctccactgtgtatctctagttttccactcaccacgagaacaaaacgagggagacgactgctccacgtacaggccgatcgaggctgaaggatcatctctgggctgtatggtattgtagacacaaataatcatctgggctgggctgggcatgcaggtaatagtggtgtgcactagttctgaggttatatctctgccttgttcatcttaattcgatctgccggtgtcttgttgatcaaaaaaaaa

SEQ ID NO: 21257 - DNA, 2000 bp, Zea Mays
ggcaatctcgtccgatccactgtcatcgcgttcaaccacgcatgccacacctaccccggccgcgacggacccatgtcagctcctcattgcttattgtggcatccaacgcccgtgtgctactgccctactgctacctcctcttgattcctaagcagacagagacagagccccggcgacggcgagatggaagaggagcagagcagcggcggatggggcgaggaggcgacgaacaaggcgccgctgctggagccacgggcggcgtcggaccaccagcaccgcaacggaacatcagcaggagacggggctggcgccggcaaggcggaggcggagtggtcggcgctgccgctgcggcggcgcgtgtgggaggagaacaagaggctgtgggtggtggcggggccgtccatcttcacgcgcttctcctccttcggcgtcaccgtcatcagccaggccttcatcggccacatcggcgccacggagctggccgcctacgcgctcgtctccaccgtgctcatgaggttcagcaacggcatcctgctgggcatggcgagcgcgctggagacgttgtgcgggcagtcgtacggcgcgaggcagtaccacatgctgggcatctacctgcagcggtcgtggatcatcctgttcgcgtgcgccgtggcgctgctccccgtgtacctgttcacggagccgctgctggtggcgctggggcaggacccggctatcgcggcggtggccgggaccatctcgcgctggtacatccccgtgatgttctcctacgtgtggtccttcacgctgcagatgtacctgcaggcgcagagcaagaacgcggtgatcacgtacctggccatgctgaacctcggcctccacctgctcctgtcctggctggccaccgccaggctccgcctcggcctcgccggcgtcatgggctccatggttgtcgccatgtggatccccgtgctcggccagctcgccttcgtcttcttcggcgggtgcccgcgcacctggaccggcttctcctccgccgccttcgccgacctcgccgccatcgtcaggctgtcgctgtcgtctggcgtcatgctctgtttggagctgtggtacaacaccatactggtgctgctcactgggtacatgaagaacgcagaggttgcgctggacgccctctcaatatgcctcaacatcaacggctgggagatgatgatttccatcggctttctggcggcaaccggagtacgggtggcgaacgagctgggagccgggagcgcgaggagggccaagttcgccatctacaacgtggtggccacctcctccatcatcgggtccgtgctgttcgtgctgttcctcctcttccgcggaggcctcgcctacatattcaccgacagccaggcggtggcggacgcagtcgccggcctctcgcccctgctggccttctccatactgctcaacagcgtccagccagtgctgtcaggcgtcgctgtcggcgcgggctggcagagcgtcgtcgcctacgttaacatcacttcgtactacctcatcggcatccctcttggagccgtgctgggctacgcgctggggcttcatgtgaagggcatctggatcggcatgctgctcggaacgctggtccagactgttgtgcttctcttcataacgttgaagaccgactgggaaaaacaggtggaggttgctcaagagaggctgaagagatggtacatggaagagaacagaagactccaggggtccagacgaaacccttaggccggccctcagctccactgtgtatctctagttttccactcaccacgagaacaaaacgagggagacgactgctccacgtacaggccgatcgaggctgaaggatcatctctgggctgtatggtattgtagacacaaataatcatctgggctgggctgggcatgcaggtaatagtggtgtgcactagttctgaggttatatctctgccttgttcatcttaattcgatctgccggtgtcttgttgatcaaaaaaaaa

SEQ ID NO: 21258 - DNA, 1792 bp, Zea Mays
gttcaaccacgcatgccacacctaccccggccgcgacggacccatgtcagctcctcattgcttattgtggcatccaacgcccgtgtgctactgccctactgctacctcctcttgattcctaagcagacagagacagagccccggcgacggcgagatggaagaggagcagagcagcggcggatggggcgaggaggcgacgaacaaggcgccgctgctggagccacgggcggcgtcggaccaccagcaccgcaacggaacatcagcaggagacggggctggcgccggcaaggcggaggcggagtggtcggcgctgccgctgcggcggcgcgtgtgggaggagaacaagaggctgtgggtggtggcggggccgtccatcttcacgcgcttctcctccttcggcgtcaccgtcatcagccaggccttcatcggccacatcggcgccacggagctggccgcctacgcgctcgtctccaccgtgctcatgaggttcagcaacggcatcctgatgtacctgcaggcgcagagcaagaacgcggtgatcacgtacctggccatgctgaacctcggcctccacctgctcctgtcctggctggccaccgccaggctccgcctcggcctcgccggcgtcatgggctccatggttgtcgccatgtggatccccgtgctcggccagctcgccttcgtcttcttcggcgggtgcccgcgcacctggaccggcttctcctccgccgccttcgccgacctcgccgccatcgtcaggctgtcgctgtcgtctggcgtcatgctctgtttggagctgtggtacaacaccatactggtgctgctcactgggtacatgaagaacgcagaggttgcgctggacgccctctcaatatgcctcaacatcaacggctgggagatgatgatttccatcggctttctggcggcaaccggagtacgggtggcgaacgagctgggagccgggagcgcgaggagggccaagttcgccatctacaacgtggtggccacctcctccatcatcgggtccgtgctgttcgtgctgttcctcctcttccgcggaggcctcgcctacatattcaccgacagccaggcggtggcggacgcagtcgccggcctctcgcccctgctggccttctccatactgctcaacagcgtccagccagtgctgtcaggcgtcgctgtcggcgcgggctggcagagcgtcgtcgcctacgttaacatcacttcgtactacctcatcggcatccctcttggagccgtgctgggctacgcgctggggcttcatgtgaagggcatctggatcggcatgctgctcggaacgctggtccagactgttgtgcttctcttcataacgttgaagaccgactgggaaaaacaggtggaggttgctcaagagaggctgaagagatggtacatggaagagaacagaagactccaggggtccagacgaaacccttaggccggccctcagctccactgtgtatctctagttttccactcaccacgagaacaaaacgagggagacgactgctccacgtacaggccgatcgaggctgaaggatcatctctgggctgtatggtattgtagacacaaataatcatctgggctgggctgggcatgcaggtaatagtggtgtgcactagttctgaggttatatctctgccttgttcatcttaattcgatctgccggtgtcttgttgatcagtgcaatcctagctagttgttactgcattgcaatctgggaactcgggtgttgtttttccgagcgaaaccgggtcgatttcccgcgat

SEQ ID NO: 21259 - DNA, 1488 bp, Zea Mays
catgtcagctcctcattgcttattgtggcatccaacgcccgtgtgctactgccctactgctacctcctcttgattcctaagcagacagagacagagccccggcgacggcgagatggaagaggagcagagcagcggcggatggggcgaggaggcgacgaacaaggcgccgctgctggagccacgggcggcgtcggaccaccagcaccgcaacggaacatcagcaggagacggggctggcgccggcaaggcggaggcggagtggtcggcgctgccgctgcggcggcgcgtgtgggaggagaacaagaggctgtgggtggtggcggggccgtccatcttcacgcgcttctcctccttcggcgtcaccgtcatcagccaggccttcatcggccacatcggcgccacggagctggccgcctacgcgctcgtctccaccgtgctcatgaggttcagcaacggcatcctgattcaattgcgctgctttacagtttggagctgtggtacaacaccatactggtgctgctcactgggtacatgaagaacgcagaggttgcgctggacgccctctcaatatgcctcaacatcaacggctgggagatgatgatttccatcggctttctggcggcaaccggagtacgggtggcgaacgagctgggagccgggagcgcgaggagggccaagttcgccatctacaacgtggtggccacctcctccatcatcgggtccgtgctgttcgtgctgttcctcctcttccgcggaggcctcgcctacatattcaccgacagccaggcggtggcggacgcagtcgccggcctctcgcccctgctggccttctccatactgctcaacagcgtccagccagtgctgtcaggcgtcgctgtcggcgcgggctggcagagcgtcgtcgcctacgttaacatcacttcgtactacctcatcggcatccctcttggagccgtgctgggctacgcgctggggcttcatgtgaagggcatctggatcggcatgctgctcggaacgctggtccagactgttgtgcttctcttcataacgttgaagaccgactgggaaaaacaggtggaggttgctcaagagaggctgaagagatggtacatggaagagaacagaagactccaggggtccagacgaaacccttaggccggccctcagctccactgtgtatctctagttttccactcaccacgagaacaaaacgagggagacgactgctccacgtacaggccgatcgaggctgaaggatcatctctgggctgtatggtattgtagacacaaataatcatctgggctgggctgggcatgcaggtaatagtggtgtgcactagttctgaggttatatctctgccttgttcatcttaattcgatctgccggtgtcttgttgatcagtgcaatcctagctagttgttactgcattgcaatctgggaactcgggtgttgtttttccgagcgaaaccgggtcgatttcccgcgat

SEQ ID NO: 21260 - DNA, 744 bp, Zea Mays
gtggctataaaggccaatccactctctctccaggcaccccgagccgccaaaaccctaccgccgccgcgaatcccgcacgaccccaaccatgaccgtgctgagccgccctaccccgggcacggcccagtgcttcgggcggaagaagaccgccgtcgcggtcgcgtacacgaagccggggcgcggcctgatcaaggtgaacggcgtcccgattgagctgatccgaccggagatgctccgcctcaaggccttcgagcccatcctgctggcggggcggtcccggttcaaggacatcgacatgcggatccgcgtccgcggcggcgggaagacgtcgcagatctacgccatccgccaggccgtcgccaaggggctcgtcgcctactaccagaagtacgtcgacgaggccgccaagaaggagatcaaggacatctttacccgctacgatcgcaccctcctcgtcgctgacccccggcgctgcgagccgaagaagttcggcggacgtggtgcccgcgccaggttccagaagtcgtaccgttgagcggctgcctgctccatctcgatttttcagatcgttgttgtgcaccttgtccgagaaccgagttcggcgtctttgttcagttcataaaatggtacagttttatttagtttttcaaaatgttctagttatgatgcgtatatattacgtattttccgctatgatttgatgcatcctgggactggaggcaattcctaggatcaattcagcaa

SEQ ID NO: 21261 - DNA, 830 bp, Zea Mays
gttttcactctccatttgctagcttgagtttatgttaaatgtgacaattgagtggtaagtcaatattgctcatctattcatcgatcagcctgtcttatggtatgaacctgcatatactctctgttttgttaccaaagtttagttgctttggtgattatggaagttcattttggtagcgaggttggtgatgcaaggttcttaaaaccactgattctaaaacatgtactgtcacaaccgtagaatcttaactttcaatttgcaaaaccatatgttttgtagataaaaaatgcagaatcaaccctattaatttagatcatgtaaacataaagtcagaatgatataatcttggcagacatggctgtgatgcgtttcatatgatatttgattggaatagctagttttagtttatggattatgctctgtttgaggggacaccatttatttcttcacatagtagtattattagagatgtgctgccatgtttttctcttgcagtgacaagtcgttgttcactggagagaagagagaatttggctgcactccgcttctcattagagctagggagtactcttttgtgcgcataatttagttctgttttgttggctgtttgttacataatgatgttttcctgatggtgtgtgttctcttgtactcaaggttgtgcaccttgtccgagaaccgagttcggcgtctttgttcagttcataaaatggtacagttttatttagtttttcaaaatgttctagttatgatgcgtatatattacgtattttccgctatgatttgatgcatcctgggactggaggcaattcctaggatcaattcagcaa

SEQ ID NO: 21262 - DNA, 1607 bp, Zea Mays
atgcccgtttacctgggaggtgtttgtgttctgctccccacgactccccagtccccatccagacaagggaagggaatacaggcctgctccgccctgcctcccctctcctcttcttctctccccgcgcccaacaccacgccggcctcgatccaggctgccgcagcccgcaggtgtcctggacgccgcccttcccgtccgccggcggttgattccttctctccttcctcagagatcgagcggcagatgtatatttcatcggaaaaacttgagaacgccgctgagctgctcggcacggcgccttcccgtgtgcaggttcctggcctgatcacaaagcaggcggcgacggcgcggatggagctcccggtggcggagcccggcacggagcgaggcgagggcccgctgatccagtgcccgtactgcgactcggaggcgatgcacaagctagcgcagatcctgctaccggggctcgccgccgtgtgcgtggacggcacgacgggggacccgttccacagcccgtcggtggtggccgtggacctgcgcagggagatggtggactacatcacgcagcggagcgagagcttcatcgcggacgcgctgatcgagtcggaggccaatcaggaggggcccgacgcggcggtccccgacgacccgttcgaggccgtgtccgtgttcatggacgacttcggcagcacgaagcgcaacatcatcggccacgtctccgggtggctgctgagcgacagccgcgacgacaagatcgacgacttggtgcaggagatggaggcgacccggttctggccgctggagcggcgggaggccgtcgccgagacgctgctcaagaacgtggacctcaggacccggttccactgccccgagaagtacgagagcgaggcgcgcctggcggaccacaagcagcagtgcagcttccgccccgtcgcctgccccaacgacggatgccgcgccagggtctccgtccgctgcgcgcgggaccacgacgccgcctgcccgtacaagccgctccagtgcgagcagggctgcgagaagcggctgctcaggcgcgacatggacaggcactgcgtcaccgtctgccccatgaggcccatgaagtgccccttcggatgcgactcctccttccccgaccgtgacctcgagaagcactgcgcccagttccttcggccgcatttgatcaaggtgctcaaggcgattcataagaaggcgcgttcggaagatgagctcaaggacctcgctctgaagctggaaaagtacgatggagatggtaaactggctaaagctctggatgcaaggcctctcactaacgctgtcaaggacctcgaggccaagatgaaagctgaacactcgagtcgaagggctgttttacactgacagactttacagaatggataatgccattgtttagtatgaagggatgacgcagcttgtatacagagaagaatataagttttgttttcgttttttttttgcttcactttctcctccctcacgatcaaatcaactgtcagtatgaatattccactattgctctgtacgagtatattgtttgttttagcgtatgaatgaaggaatgaagagggggaaccattaaatccatc

SEQ ID NO: 21263 - DNA, 1513 bp, Zea Mays
aagacatcagcctctgttatcctggcccacacatcagcctccctggagtaagcgtggtagttgccactgccgtcccctccagaagtgcgatacagttcggattcagatcgcggccggtgcgaacccacgaaggcacgaacggtagaacccgaccgagcgcggcagcgcaaacctccgatccctgctgcgagcaagggattccgctctgatgatgctaaggaggtagtccattatcaaacaatctcaccaaagaacttagctaaatctgttcttgaggaaggtggctggtcaacctttatgtgttcaagggaggatactgagaagcatgttgatgttgccattgtttttattggctcaaagctacaatcatcagacatatcgaaagataagcaagttgatccagctttagcagatacattgaagctctccttcacagaatcagagttttctatggcattcccctacgtttccacatcagacgatgagaaactggaggagtcattgctatcaggcttcactgagaactgtaaaagtggttttggaagaaaccgtatcacctacacagacacgtgcgccgtgagtggccaagatctgaagacgtatcacaacatggatgctatcaatgacttggtagtgtcaggaagaaccaacccgagtggacagactgatgtaatcgtcttctgcagcggcgggttcgagaagttaggcaccacggaatcggaaggggagctgctttcccagcttgtcgacttgctgaagctgtctggggctagacacacgattctctacgcttcccagccatctggttatctactggagaacccttccggctcgccagtggctaggcaccttgcggagaggactaacggtacaaaaactggcctactgagcaaatgtgacggagagtgcctagtcaaatcaactcttcttgaaggaacctttgtcggaatagtgctccttatcatcttgatatcagggctcatgtgtatgatgggaatcgatactccctccaagtttgaagctccccaggagtcttgatctcccttcgaagcagaacccttgttttgttggtctgcactgtggatagatattattcagtttccccctttgaaagcgcctttcgtataattattattatttttttactgagccatctgttatttacgatgtgctcaaacttttgacaccaaacgaatgcatgtgtgtgaggcttgtgctgtgaccagacatagcattgcctccaggtgttttctgtgaataacctggaatttcaggtgggtactgtgcatcaaataaaaaagatgaaatcttgctgttgcaccttgtgcctcaaccaaaaactgtaaaatgtcatggtcgatgttgtcagcatccatgattaggacagaaacaaaagccaacttttgtagctttcactgcttgcgcggttacggtcactgcgcagccttaccgcgcaagcaagtgatcaagtcaggagccatgcatcgattatgatctgcttctaaaagaaatg

SEQ ID NO: 21264 - DNA, 1607 bp, Zea Mays
aagacatcagcctctgttatcctggcccacacatcagcctccctggagtaagcgtggtagttgccactgccgtcccctccagaagtgcgatacagttcggattcagatcgcggccggtgcgaacccacgaaggcacgaacggtagaacccgaccgagcgcggcagcgcaaacctccgatccctgctgcgagcaagggatggcggcggcatgggcagtgctggcggcggtcctcgtcgcggcgcaggtggcgtctgcggcgccggtcacggcgccagcgttcctctgggcgcctaagaactacggattccgctctgatgatgctaaggaggtagtccattatcaaacaatctcaccaaagaacttagctaaatctgttcttgaggaaggtggctggtcaacctttatgtgttcaagggaggatactgagaagcatgttgatgttgccattgtttttattggctcaaagacatatcgaaagataagcaagttgatccagctttagcagatacattgaagctctccttcacagaatcagagttttctatggcattcccctacgtttccacatcagacgatgagaaactggaggagtcattgctatcaggcttcactgagaactgtaaaagtggttttggaagaaaccgtatcacctacacagacacgtgcgccgtgagtggccaagatctgaagacgtatcacaacatggatgctatcaatgacttggtagtgtcaggaagaaccaacccgagtggacagactgatgtaatcgtcttctgcagcggcgggttcgagaagttaggcaccacggaatcggaaggggagctgctttcccagcttgtcgacttgctgaagctgtctggggctagacacacgattctctacgcttcccagccatctggttatctactggagaacccttccggctcgccagtggctaggcaccttgcggagaggactaacggtacaaaaactggcctactgagcaaatgtgacggagagtgcctagtcaaatcaactcttcttgaaggaacctttgtcggaatagtgctccttatcatcttgatatcagggctcatgtgtatgatgggaatcgatactccctccaagtttgaagctccccaggagtcttgatctcccttcgaagcagaacccttgttttgttggtctgcactgtggatagatattattcagtttccccctttgaaagcgcctttcgtataattattattatttttttactgagccatctgttatttacgatgtgctcaaacttttgacaccaaacgaatgcatgtgtgtgaggcttgtgctgtgaccagacatagcattgcctccaggtgttttctgtgaataacctggaatttcaggtgggtactgtgcatcaaataaaaaagatgaaatcttgctgttgcaccttgtgcctcaaccaaaaactgtaaaatgtcatggtcgatgttgtcagcatccatgattaggacagaaacaaaagccaacttttgtagctttcactgcttgcgcggttacggtcactgcgcagccttaccgcgcaagcaagtgatcaagtcaggagccatgcatcgattatgatctgcttctaaaagaaatg

SEQ ID NO: 21265 - DNA, 1796 bp, Zea Mays
atgaagtctatgaaagggcaaatacaacttgatgaagtccatgatcttgttggtctccagatcgatcttgatggtgtcgttggccttgatgagagggtcggggtagcggatggtgcggtcgtcgtaggtgttcaggtaggggatgactttctggccaaactgaacagacctcaccttgcagagcttgaactgcacacaaaccaatacataagtgtggttcttgaaagacaattgatccttgaaagacaattgaccgcaacagccatttcatccatcatatcatgccattctcgcttgtgggaaattggaggatacatgctttatagaatacttggatccactgtacagattgatacttttctcctatgctcaggggatagatccaattgagcactatgaaaagccatgtcgcgcaaacctgcgccatttcaaaattaagcaaggtagaagcaagcatacgaaaaactgaaaattggagcattgctactatttgcacatagtaataagtcaagagaataacagaggtaaatattcgtctgcagttcgtgtagtaagcaagaatattttcttgagaccaagggataatgtcatctttttgatgtaatctgaagaatgacaaccaccaagagtaaccaaaaaaaggatgattgaaccatctctttcaacaacatagaatgattctaacgcttcaagaaactgaattattgcagtcatgaaaccttccattacaaccttgtttctgcacaaacatgacatcaacttttatctattctttggcagcaaagagatggaaaagcaggtttcccccacccccatagctttctgttttgtcccttgtcctagtaattcggtatactttcgtacacctttcctaaaacaccaaaactattattgaacctgttaaactgcacaggttggtactatatgcatatcatttttagagagttgacacatcatgaattctgctatctactatcttacatcattgcaaataaaatacatactgggtgtttctaattccttgtagaagggaacatgacaacccttaagctgaaagagcccaacatcttaaacaaattcatgatctccaggaacatacaactgagaaaaataaagccagctcattgcaatagaggaacaagtattatttgataatcatttctgttccacttttttatatagtctatgtcatgtctccatgcttatactgtcagtgccaaatcgaattttataaggtaagttagcattttatttcaaacccaacattatatggtaagtgtactgtcttaattggcacgacctctctgataaaagcttgtgtaccttttaattttcaaatcactggcaatgcaagctgcctgaatgccagaaagcatgggaagtcaaaaagcattttatctgttttattttagcacaatgcattcaagttagaagaacaaagaaagcataatttcccaattatgaagtcattagtctgatctcattacacagcattggcatggttttcctcagtatttcaatacataatggagcatacctttaaggtgtagaccgaggtggtcgttgtttcgcaacaatcacgcgctcagggtcacgtacctgttaatgagataaatcatattgctagttaatttttttcatatgcagaggaagctggtagctactgtcattgtttctgcattagccaacaataacattggttctctcttttgttgtatcataccgtagttgctaagatgattaaacctcagtttgcaatgctgtgtctagactccagacctcatgctgatgcaaag

SEQ ID NO: 21266 - DNA, 1743 bp, Zea Mays
cctccctctccctctcgctctcgctcgctcgtttgtttccttccttctttgccccggaggcgtcaccagagcattcgtcctcctccgcctccgcctcgccgccaccacgcccccgccgccctatcccattccaccctccccccccccactctctcctcgcatggcgacagccccttgccggtagccctagatccagacatccctcgcccacgcagcaacagccctcctccctcccacctccatccatgcccatggacgcggggaatggctgcagtgcccgggcgctggtggcgtgcgtcatcggcagcatcgtgctgggcgcctcggtgctcgcgctccacctcgcgggcgggcctgccgccatcccgcacctgcccctgcctccgcttttcggcacgctccgccgccgccgccgccgccccgtgcgggtctacatggacggctgcttcgacatgatgcactacggacactgcaacgcgctgcgccaggcgcgcgcgctcggggacgagctcgtcgtcggcgtcatcagcgacgacgagatcaaggccaacaaggggccccccgttacgccgctccacgagagaatgataatggtccgtgctgtgaaatgggtagatgacatcattccagatgcaccttatgccataactgaagaattcatgaacaagctgttcaatgagtataacatagattacatcatccatggagacgatccttgtttgctaccagacggtactgatgcatatgctcttgccaaaaaggctggtcgatacaagcagattaagagaaccgagggagtgtcaacaacagacattgttgggtccaggtccagattctcgaatagtttacatggatggtgcttttgatctgttccatgctggacacgtcgagatattacgacttgctcgagaacttggagattttttgcttgtggggattcacacagatcagaccataagtgcaacacgaggacgacatcgcccaatcatgaatctccatgagcgaagtttgagtgttttggcttgtcgttatgttgatgaggtgatcattggtgctccatgggatgtttcaaaagacatgattaccacattcaatatttcgttagttgttcatggaactattgctgaaaacatggactttacggaggatgatttacacccatatgctgttccaatggctatgggcatttaccgccgactggagagtcccttggatatcactacaagtactatcatcaggaggattgttgctaaccacgaagcctaccagaagcggaacgagaagaaggaagcaagcgagaagaagtactacgagagtaaaagcttcgtcaacggggagtgaagttacgagtagcagaacttggatgaagattgctgcctagaccgtttagcaactgcaacagttgggcgatctacagactacagccgtaccttttcttcggtatctttgatgttccgctgacatagcttaggaagcatgagcaaaaatgactaggcagaggagatggcgagtctaggagcatttccatcgtttccctagcgtcttcagccaattccctgcccccgctgtattgtatgtatatgcgccttccagctgagttgcatttgagatctataggcttttccacccattgaaactatgcgccacagtatgaaaaccctgaatgttagcgtggttgacaactattcgctgctggtgtttctttcccgtatgcgctggcaggcagtcattttcttgaaaatc

SEQ ID NO: 21267 - DNA, 1918 bp, Zea Mays
cctccctctccctctcgctctcgctcgctcgtttgtttccttccttctttgccccggaggcgtcaccagagcattcgtcctcctccgcctccgcctcgccgccaccacgcccccgccgccctatcccattccaccctccccccccccactctctcctcgcatggcgacagccccttgccggtagccctagatccagacatccctcgcccacgcagcaacagccctcctccctcccacctccatccatgcccatggacgcggggaatggctgcagtgcccgggcgctggtggcgtgcgtcatcggcagcatcgtgctgggcgcctcggtgctcgcgctccacctcgcgggcgggcctgccgccatcccgcacctgcccctgcctccgcttttcggcacgctccgccgccgccgccgccgccccgtgcgggtctacatggacggctgcttcgacatgatgcactacggacactgcaacgcgctgcgccaggcgcgcgcgctcggggacgagctcgtcgtcggcgtcatcagcgacgacgagatcaaggccaacaaggggccccccgttacgccgctccacgagagaatgataatggtccgtgctgtgaaatgggtagatgacatcattccagatgcaccttatgccataactgaagaattcatgaacaagctgttcaatgagtataacatagattacatcatccatggagacgatccttgtttgctaccagacggtactgatgcatatgctcttgccaaaaaggctggtcgatacaagcagattaagagaaccgagggagtgtcaacaacagacattgacggatgcttctttgtgttagagagagatcatctgatgcacataatcattcttcactacaaaggcagttcagtagcggacatggtcagaaagtcgatgatactggatctggaactggtacaagagtatctcatttccttcccacatctaggcgaatagttcagttctcaaatagcaggggtccaggtccagattctcgaatagtttacatggatggtgcttttgatctgttccatgctggacacgtcgagatattacgacttgctcgagaacttggagattttttgcttgtggggattcacacagatcagaccataagtgcaacacgaggacgacatcgcccaatcatgaatctccatgagcgaagtttgagtgttttggcttgtcgttatgttgatgaggtgatcattggtgctccatgggatgtttcaaaagacatgattaccacattcaatatttcgttagttgttcatggaactattgctgaaaacatggactttacggaggatgatttacacccatatgctgttccaatggctatgggcatttaccgccgactggagagtcccttggatatcactacaagtactatcatcaggaggattgttgctaaccacgaagcctaccagaagcggaacgagaagaaggaagcaagcgagaagaagtactacgagagtaaaagcttcgtcaacggggagtgaagttacgagtagcagaacttggatgaagattgctgcctagaccgtttagcaactgcaacagttgggcgatctacagactacagccgtaccttttcttcggtatctttgatgttccgctgacatagcttaggaagcatgagcaaaaatgactaggcagaggagatggcgagtctaggagcatttccatcgtttccctagcgtcttcagccaattccctgcccccgctgtattgtatgtatatgcgccttccagctgagttgcatttgagatctataggcttttccacccattgaaactatgcgccacagtatgaaaaccctgaatgttagcgtggttgacaactattcgctgctggtgtttctttcccgtatgcgctggcaggcagtcattttcttgaaaatc

SEQ ID NO: 21268 - DNA, 711 bp, Zea Mays
ccgaagtccaacaaaagctagaaagagagcaacacaaacgacttccagattaccacattcaatatttcgttagttgttcatggaactattgctgaaaacatggactttacggaggatgatttacacccatatgctgttccaatggctatgggcatttaccgccgactggagagtcccttggatatcactacaagtactatcatcaggaggattgttgctaaccacgaagcctaccagaagcggaacgagaagaaggaagcaagcgagaagaagtactacgagagtaaaagcttcgtcaacggggagtgaagttacgagtagcagaacttggatgaagattgctgcctagaccgtttagcaactgcaacagttgggcgatctacagactacagccgtaccttttcttcggtatctttgatgttccgctgacatagcttaggaagcatgagcaaaaatgactaggcagaggagatggcgagtctaggagcatttccatcgtttccctagcgtcttcagccaattccctgcccccgctgtattgtatgtatatgcgccttccagctgagttgcatttgagatctataggcttttccacccattgaaactatgcgccacagtatgaaaaccctgaatgttagcgtggttgacaactattcgctgctggtgtttctttcccgtatgcgctggcaggcagtcattttcttgaaaatc

SEQ ID NO: 21269 - DNA, 721 bp, Zea Mays
cgcattagcgctaacctgttccattttggatgctacattggactgaaatgaccatagaattaccacattcaatatttcgttagttgttcatggaactattgctgaaaacatggactttacggaggatgatttacacccatatgctgttccaatggctatgggcatttaccgccgactggagagtcccttggatatcactacaagtactatcatcaggaggattgttgctaaccacgaagcctaccagaagcggaacgagaagaaggaagcaagcgagaagaagtactacgagagtaaaagcttcgtcaacggggagtgaagttacgagtagcagaacttggatgaagattgctgcctagaccgtttagcaactgcaacagttgggcgatctacagactacagccgtaccttttcttcggtatctttgatgttccgctgacatagcttaggaagcatgagcaaaaatgactaggcagaggagatggcgagtctaggagcatttccatcgtttccctagcgtcttcagccaattccctgcccccgctgtattgtatgtatatgcgccttccagctgagttgcatttgagatctataggcttttccacccattgaaactatgcgccacagtatgaaaaccctgaatgttagcgtggttgacaactattcgctgctggtgtttctttcccgtatgcgctggcaggcagtcattttcttgaaaatc

SEQ ID NO: 21270 - DNA, 713 bp, Zea Mays
ggcagtgaagcaaaggcggtggcgttgagcagggcgcacaccgcgtacagattaccacattcaatatttcgttagttgttcatggaactattgctgaaaacatggactttacggaggatgatttacacccatatgctgttccaatggctatgggcatttaccgccgactggagagtcccttggatatcactacaagtactatcatcaggaggattgttgctaaccacgaagcctaccagaagcggaacgagaagaaggaagcaagcgagaagaagtactacgagagtaaaagcttcgtcaacggggagtgaagttacgagtagcagaacttggatgaagattgctgcctagaccgtttagcaactgcaacagttgggcgatctacagactacagccgtaccttttcttcggtatctttgatgttccgctgacatagcttaggaagcatgagcaaaaatgactaggcagaggagatggcgagtctaggagcatttccatcgtttccctagcgtcttcagccaattccctgcccccgctgtattgtatgtatatgcgccttccagctgagttgcatttgagatctataggcttttccacccattgaaactatgcgccacagtatgaaaaccctgaatgttagcgtggttgacaactattcgctgctggtgtttctttcccgtatgcgctggcaggcagtcattttcttgaaaatc

SEQ ID NO: 21271 - DNA, 778 bp, Zea Mays
ctgtcatctgcaccatcgcggtcacctcgcccagatctgtttcggcgacgtggtcctctccgatcagtcaaggattcgcctgcctcttgtgctgtcctcaagaatatttgaagagattaccacattcaatatttcgttagttgttcatggaactattgctgaaaacatggactttacggaggatgatttacacccatatgctgttccaatggctatgggcatttaccgccgactggagagtcccttggatatcactacaagtactatcatcaggaggattgttgctaaccacgaagcctaccagaagcggaacgagaagaaggaagcaagcgagaagaagtactacgagagtaaaagcttcgtcaacggggagtgaagttacgagtagcagaacttggatgaagattgctgcctagaccgtttagcaactgcaacagttgggcgatctacagactacagccgtaccttttcttcggtatctttgatgttccgctgacatagcttaggaagcatgagcaaaaatgactaggcagaggagatggcgagtctaggagcatttccatcgtttccctagcgtcttcagccaattccctgcccccgctgtattgtatgtatatgcgccttccagctgagttgcatttgagatctataggcttttccacccattgaaactatgcgccacagtatgaaaaccctgaatgttagcgtggttgacaactattcgctgctggtgtttctttcccgtatgcgctggcaggcagtcattttcttgaaaatc

SEQ ID NO: 21272 - DNA, 2393 bp, Zea Mays
ctctcccccaccgttccttttctccaccagtgaagcacgctccgacctgaccctctctctctgtaacacacacagggcgtgttcggctggctgcaagccgacactgttgcagctgtttggattgctgcagctgcaatccatagagagaaaaatactgtagaagccgcagccgcagcaagccgcagcgaactgacagacacacaactcgtccgcagaagctcggctgctgctccttcagtcagtctagcaacggttgaggcgttgctggtgctcctgccgcttaccctgccctgttcactgttctgttccgcgtatcccacaggaagggaaggggaggaagcagcagcagcacacagctttgctctcgctctcggctccccgtccaccaaaggaggaaacgcgcagcccgcagcgctagccgtcgtctatctcgtctcctagtccaaggaaggaaagaggcgcttggcatgaagcgacctaccaagaatgagacgctgggctacccctggcacaagtagagcaagagccccagcaaccgagccacagtgaggaggactcgagggaagagatgggcaactgcggcacgcgggaggagaatgccgtcgtcgctgcgcacgcacaagttcaacagctccacttgttacaaaatcctgccaagaatgccattggagataggaagcacaaccgcacctcatcagatataagtgatccttccacacctaggaaagctgaagatgccaagaacatttccatatacaacgatgtgattgtcttcacattgtttgagctagagacaatcacaaagagcttccgtgccgattatgttctcggcgaaggaggatttgggaccgtttacaagggctacatagatgaaaatgtcagggtggggctgaagtcactgcctgttgcagtcaaggtgctcaacaaagatggacaccaagggcacagagaatgaccgaagttaactgcctggggcagttaaggcatccaaacttggtgaagttgatcggatattgctgcgaagatgaccatcggctgcttgtctacgagttcatgtttcgaggaagcctagaaaaccacctattccgaaagacagctacaccattaccctggggtactaggatgtcaatcgcactgggagctgctaaagggcttgcttgcctccacaatgctcaaaggcctgtcatctacagagatttcaagacatcaaatattctactggactctgattatactgctaagctgtctgactttggcctggcaaaagctggccctgaaggtgatcagacccatgtatcaacacgggtgatgggaacctacggttatgctgcccctgaatatgtgatgaccggccacttgactgctagaagtgatgtctacagcttcggtgtggtccttctggagctcttgacagggcgcaagtcaatcgacaagtcgcggcccagcagggagcagagcctggttgactgggccctccccaagctgaacgacaagaggcggcttctccagatcatcgacccgagactggaggggcagtactcggccagagccgcccacaaagcctgcagccttgcgttctactgcctgagccagaaccccaaggccaggccactcatgagcgacgtcgtcgagaccctcgaaccgttgcagggcagcggtggaggcgatggacgcggccagccttctggccttcctgactataggggtcgccgcaggataaccgggaacagcgtccacttcagggccatcccgaaccccaagtgctcccctgccgtcccggccacggcttgccgagtgcggtgatgggtgctgtgtttcggttggagctgccggggtaggttccgttgtgtatattgcggccgtgggcagtggtgtgtgtgtgggtgcatgtgtgtgcttggcggcggcggggtttcggtttcttctcgggttttggcctgcgttttgatgtgtaaatttgatctgcgtgctgcattgctgctgctgcttttgtaaggccctctaattttcactgtggtcttatgtatccttcgactgagcgagccctgctgaaactggcgggttcgggattaaccctagaaatgaaatgaaaggctgaaccgagagcggttggatggctgatatggcatatgctgctgttgtgttgtgttgtatctgaggaatcaatcagtctgtatcgagtctcttggcaagttttctcttgtttggggcatcctggtatagtagggaagaacaatcgtgtgaccacatgatgcgcgatggtaaactgacaatgtttggaaatgtaattggtgatgtttttttttggatcaaatcgatctggacacatacatttctccatctgcagaacaagttagacgctgggaagttctccgggggtgattcttgagcgt

SEQ ID NO: 21273 - DNA, 2366 bp, Zea Mays
ctctcccccaccgttccttttctccaccagtgaagcacgctccgacctgaccctctctctctgtaacacacacagggcgtgttcggctggctgcaagccgacactgttgcagctgtttggattgctgcagctgcaatccatagagagaaaaatactgtagaagccgcagccgcagcaagccgcagcgaactgacagacacacaactcgtccgcagaagctcggctgctgctccttcagtcagtctagcaacggttgaggcgttgctggtgctcctgccgcttaccctgccctgttcactgttctgttccgcgtatcccacaggaagggaaggggaggaagcagcagcagcacacagctttgctctcgctctcggctccccgtccaccaaaggaggaaacgcgcagcccgcagcgctagccgtcgtctatctcgtctcctagtccaaggaaggaaagaggcgcttggcatgaagcgacctaccaagaatgagacgctgggctacccctggcacaagtagagcaagagccccagcaaccgagccacagtgaggaggactcgagggaagagatgggcaactgcggcacgcgggaggagaatgccgtcgtcgctgcgcacgcacaagttcaacagctccacttgttacaaaatcctgccaagaatgccattggagataggaagcacaaccgcacctcatcagatataagtgatccttccacacctaggaaagctgaagatgccaagaacatttccatatacaacgatgtgattgtcttcacattgtttgagctagagacaatcacaaagagcttccgtgccgattatgttctcggcgaaggaggatttgggaccgtttacaagggctacatagatgaaaatgtcagggtggggctgaagtcactgcctgttgcagtcaaggtgctcaacaaagatggacaccaagggcacagagaatggcttaccgaagttaactgcctggggcagttaaggcatccaaacttggtgaagttgatcggatattgctgcgaagatgaccatcggctgcttgtctacgagttcatgtttcgaggaagcctagaaaaccacctattccgaaagacagctacaccattaccctggggtactaggatgtcaatcgcactgggagctgctaaagggcttgcttgcctccacaatgctcaaaggcctgtcatctacagagatttcaagacatcaaatattctactggactctgattatactgctaagctgtctgactttggcctggcaaaagctggccctgaaggtgatcagacccatgtatcaacacgggtgatgggaacctacggttatgctgcccctgaatatgtgatgaccgcttcggtgtggtccttctggagctcttgacagggcgcaagtcaatcgacaagtcgcggcccagcagggagcagagcctggttgactgggccctccccaagctgaacgacaagaggcggcttctccagatcatcgacccgagactggaggggcagtactcggccagagccgcccacaaagcctgcagccttgcgttctactgcctgagccagaaccccaaggccaggccactcatgagcgacgtcgtcgagaccctcgaaccgttgcagggcagcggtggaggcgatggacgcggccagccttctggccttcctgactataggggtcgccgcaggataaccgggaacagcgtccacttcagggccatcccgaaccccaagtgctcccctgccgtcccggccacggcttgccgagtgcggtgatgggtgctgtgtttcggttggagctgccggggtaggttccgttgtgtatattgcggccgtgggcagtggtgtgtgtgtgggtgcatgtgtgtgcttggcggcggcggggtttcggtttcttctcgggttttggcctgcgttttgatgtgtaaatttgatctgcgtgctgcattgctgctgctgcttttgtaaggccctctaattttcactgtggtcttatgtatccttcgactgagcgagccctgctgaaactggcgggttcgggattaaccctagaaatgaaatgaaaggctgaaccgagagcggttggatggctgatatggcatatgctgctgttgtgttgtgttgtatctgaggaatcaatcagtctgtatcgagtctcttggcaagttttctcttgtttggggcatcctggtatagtagggaagaacaatcgtgtgaccacatgatgcgcgatggtaaactgacaatgtttggaaatgtaattggtgatgtttttttttggatcaaatcgatctggacacatacatttctccatctgcagaacaagttagacgctgggaagttctccgggggtgattcttgagcgt

SEQ ID NO: 21274 - DNA, 1103 bp, Zea Mays
attcttgttttatggtagcgtctgcacgcacggagatgtcttttagctgcgtacccgtggagcctggccgcgcccctcgttttccgttcatgcagcctgtaggtgacggaaacccaattatacaaccgaacaatccgcaacgacgatgcatctgttgacgagaggccaaagccttataagaagacagacgagtccatcgatcggtgaaggcaaaacccacagctccaaaaatgcatcgacggcagcatcccgttggtggcactcctgacagactctccgaaataggaaagaaagcttttaagcggggagatttagcagcatcgccctgcaagaggcactgatctccgaatccgttaggaacataagcaagttctctgaaatccgcgcttcggcagaggtctccgacccgcttccaaccgtcgaccgcttcctgggtgtctacgagggtgctctcaagtctcaagtggaagagcatcgctgcggagccggagaccgtggtgaccaatggtgcagctgaactgaagaggaggaatccttgcagaagtcagctaagctttgggcgggggctgcactagccaccgaccttgaactgaagtcctcaagctgctggacagtggtggcagtggcactactggctccttctctcgcacgtacgaggagcagcaccaacaagccaaatgcgtcttgggtggaaccagcaaggctgacgaagaggcaggaagcgcatggagcttcagcagcgtctaataaggtggaggtggtctcgtcaaagtgacaccgggatgaggaagaggagaggagcatgggtgtgagacagctgagcttgccaaggccctgtggcgctagatgcacacgtggttcctgccttcctggccttcgtgaactgtctgcaacctgggcaaggaaggtgaaggcgtgacgtgactgatagcgcgggagagagctgaagatgcatgaaggaaagacagaaggtcactacagcccagacgtagtacccgagcgcggcggcccaatgtctgtgactgtgagatggctttagtggcttgtaatagatatataaatagatttttacttgcgagaggggaggatcgaactggaaccag

SEQ ID NO: 21275 - DNA, 1825 bp, Zea Mays
tatgtatagctctttgtgaacctgtaaattaatgcgggtgtatgatctactaccatcttctaggcaaggtcaatctgacagctaccaactactgtacttccctgcgctgcctcgctccgtccaacggtcagccggtggtcgtcgccgggttcgggtaagggtcggtccagcaccagtcctctgccacggccttcttccatctcctgttgaacagctgcggctcggtgtaggaccgctacctgaccgctaaccggtctgccgtccccaatgccgacgtggcagccgcgctgctcccggccgccgacgagctcggcgtcgcgcgccgcgccgcggacgccgtcgcgctcggggtctgcaacgaggcgctgttcccgacgccgcgggcgccgcccgggtggtgggcggccgagctggcggcgctgtcgccggcgtcgttccggagggtggtcgcggcgctgcggtgccgccgggccgggcccgaggtggtggccgccgcggccgccgcgtacgcggagcgcgtcctggccggggtcctcgcggcgcccggccgccgggacgcggaccagcgcgcgctgctggaggccgtcgtggacgcgctgcctcccgccgccgacgcgcccctcccggccgccttcctctgccgcctcctccgcgccgcggtcaccgccgaggcgtccgccaagacgtgccgcgacatggagctccgcgtcgcggccgtgctggaccaggccaccgcgggggacctgctgggcgtcgcgctcgacggcgccggggagcgcgtcgtcaacgcggacaccgtccgccgcgtcgtcgccgcgtgcgtcgagcgccagcagacgcagcagggccggcgggcgtccctggccggaggtccggcaggtgagctcagcgcgctggagaaggtggcgaagacggtggatgaggtggcggcggagatggcgtcgcacgagtcgctgcctatctccaagttcgtgggcgtggcgggcgcggtgcccagggacgcgcgcccgtcgcacgactgcctgtaccgcgccgtggacatctacctcaagacacacccggggctggacgagatcgagcgggagaaggtgtgcagcgtcatggacccgctcaggctgtcgtaccaggcgcggatgcacgcgtcgcagaacaagcggctgccgctgcaggccgtgctcagcgtgctctactacgaccagctgaagatccgtagcgcggacggcagcggcggcacggaggaagggtgggagacacagtcggccgccgggaaggcccgtgcgcaggcgcgggcggacgtgtcgctggcaagggagaacgaggcgctgcggttggagctggcgcggatgcgagcgtacgtgtcagggatgcagcagagcagcaaggggagcgggtcgaggccatcgtcgtcatcgctggtaccaggcccagcgacggcgacggggaagaaggcaagcttcttagggtcggtgtcgcggacgttgagccggctgaacccgtttaagggcgggtgggccaaggacacgaccagcattgccgatgggcgtgacaggacttccatgcatgtggtgaagcccaagaggaggaggttctccatcggctaattcttttgtgatatatcgatatgatcgtgtcatcgtgtgtgtgacttatattaaatcactgtgattagaggctagaacaaggggtgtggatgtttgtactttctctgtcaatgaaaaaacaatatgcactacaaaggcaaaagtgtaggttaaaatagtggactaaggagtaaatattaatagtactgttggggtcgtgcttcggtgcgccgaaggtctcacac

SEQ ID NO: 21276 - DNA, 2384 bp, Zea Mays
atttaattccataatttactgatgtcagggtctaggtcgctcttgaccatagacacgactgatatataatttttcactttgtagaggtcacatatgtttactcataagtcgtgtaaaagttcaaagaactttacatccaaccacgctatgttgatcagacacaataccataatttcgagatgtgattacataaggacgttacaagacttttacgatgttcgatgctatgttgatcaggcacaatgtttgattgccttgaacagagtcccgcttggacagagatctctctgactctctccatggtccgcacggagcccaccagcaagacatgacatcatcagtgatcgaaaagaaaacaaacatgaaatcatacatcctggagggatagctattgcagttctatcgaaattgagatattatgggtgtgaaacagctctaacagacattgaagctcaaaggcttacaattgactaaactgtaagagcatctccaagagactctttattttttactctttatttgactctttatttgtctctccataaatattaaactctacatataacatctcattccgacagactctccaaaatacaatttagcttggctagcaagagttgctagccaaatttagctagtgagggagttaatttagagagccagatagcttagcaagttaaatggctactctgttggagagctattatgttattaattagctaaaatttagcttgacaaactatgtagctagtggagatgctctaacccgagcaaaacagcagataaaacgggcgtaggcagcacgatagacctggtgaaggacgggccggggacgtgaagtcgacgtggttcggttggactttctttttgccgctgctcggtaggccccacgtgtcagcctccaaacaagagcaagcttcgagatgcccccgttgggggcgggcgttgacccgccgaccggacccaccccacacagtccacacccagacccatggaatcgacgtgggagtggaacagccagacgtgccctcgcctggcggcgccaccgctccgagcgacgccgcgcgtgccgctcctccgctgcgtcctcctcgttgcctcctgcatcccccccgccatgccgccggtcgccgacgagggcgagtgggcggcggtggagcgccggggcccgcacctttgggcgtcggggcggcccttcgtcgtccacggcttcaacacctactggctcatgtacttcgcggccgaccccgcaacgcgcgccgccgtcaccgccgccctcgcggacgccgcccactcggggctcaacgtgtgccgcacctgggccttcaacgacggggggcaccgcgcgctgcagctcaagcccttctcctacgacgaggaggtcttccaggcattagatttcgtgatcagcgaggcaagaaaccataagatgagactgatactgtcactgtgtaataactgggaagattacggaggtaaggcacagtatgtaaggtggggaaaggaggctggcctggatcttacttccgatgacgacgctttcttctctcacgccacaatcaagagctactataaagcttttgttaaggctgttttgacaagaaaaaacacaatcacaaatgtcgcctacatggatgaccctacgattcttgcctgggagctgattaatgagccacactgccattccgatccatcaggcgacacattgcaggcatggatagaagagatggcgtcttatgtgaaggatatagaccctgtgcaccttttagagatcggtgttgaagggttttatggtccgtcgactccagaacttctgcacgtgaacccagatgcttattctggaactattgggacagattttatcaggaaccatcatgcactgggaattgatttggcttctgttcatatttattctgacaattggttgactcactctgaagaggtcagtcacctccattttgtgaaaacctggatgcaacagcatattgatgatgcagccaacttgcttgggatgccaattctgatcggggagtttggggtatcgcttaaggatggaaagtttggccataagtttcgtgaagctttcatggatacagtctacaacatttttttgcgctcttggaagactggggtgattggaggaggctgccttgtttggcagcttttccctgaaagcgctgagcacatggatgatggttatgcagttatttttgcaaaatcaccagaaaccacattaaaattacttgcagatcactcgagaagtctggaatcttgacaatctgttgcctccctaattacacaagtatatgacagaatccatgctataagggtttgcaaaccaaaaacatgtctcagaaagttcagtttgtaaattgcaagagaag

SEQ ID NO: 21277 - DNA, 1020 bp, Zea Mays
atggccgttgccttctccctgctcggatcccagctcgcggagctccctcctctcagcgcgcgcgtctgctccctcagctcgtacccgacttcagctcactggacctcccggccccgagctcgcccccatggcgcccggtcgagctcctccctcgccatgccgcgcggacccttctcttccctgcttcccagcttgccaaatcgcgtccttgctcctccctgctgagctccagccatggttaccgtgccctgctcgcccccttgcttctccctccctcctcccaatcttccatggccgagcgccgctgttctccctgcgcgcagccgcgctccctgccaagcccctccatggtcgtgcccctcttctcgctcgcgctcgtctccctgagttccgtgcgcgggcaccctgacccagctcggatcctcgtcgtcgcgcccagcccggattccagcgccccttcgtgctctggttttctctctttgcgtcgatgttcaagcgcctccgtgcttgcatccgttgggcccgtttcgcctttgcgcgacatcggctgcgagctgagtttaatttcgccgggtactcggattaagtctgatcggtgttgagagttcgtcatgtggtgtgtggcgtgaagatacagaaggaaaggtcatagccagttatggagaaatttgttgaatgttggatggtggtgtgcgtgaagttcgtttagtacctgccaagcgatcgacaaattgaccggatcggaaaatcattaccaatctcgcagattcgagtcagatattggaacggtgagctgatttgctattcttattgactggtttgatggatggattgataggtatgtatgtcgtgacgattattccgcttgtagcttaggcacgtatttatttgacgcttgtaggaatacggggctacatgtatcatggtaattgtgtccacggttgcgaagtcgtcgtgctacgtagctaagtttaggtttaacgacataggttgaacgggaaggattaaatcagtgtttct

SEQ ID NO: 21278 - DNA, 1843 bp, Zea Mays
tcttatccacgctgcccattatttcttagaagctacggacctcatttctccttcatcctcgtctcttcctcaagctccagccgaactccctcacgccatcctcttccctggcgttcatccctacggcagccaccacttgggcgctcctctccctgccctcccatggcggctccccctggatccctccctgcgaggaccctctcccgtggatggtgtcgtcccttcctgcagcacaccgtgctccctcccatggccgatgcccctctctggagctcgcccctgccctctgtccagcgccctccctgcttgccgttcctatccccctgcaatggagttcgtcgtcagtccgagctcgcccatcctctgctcggtttcaacttggtcgtgcctgcagaccgctccctttactgctgcagcaggtcagcgcccctctgttttttttttccatagttgcgcacctatctgtagcagcccctcgctgccggacatcatccggtagtcccgcaccatccgcacccgtatggtgtttgataaaatgttcaagtggagtgttgtgtcatggacaactctattagcggcgtgggatgtttggtattttcgcagcctatctgcgacaccgtcgacccccgttaaccgataaagaagcgaggtccgtgcgatgtttgccaagtgtttgatggaaggtccgaaccgggaacctcgcctttctcgcgcatcttctggtcggtttgtgaattggtacgctagatgattatgcgatatgaagggcatggactagactggaccacaagatgatattgacggaccaacctcaagatggatgatctgacccagtgccaggataggaggtgctcgccaagcgagtatcatctaacaacactgacgtagtgttattctaggcaagccccggtgcatttgccaccttccttgtgttttcaaaattttatcacttatatgttgcattaggtgatagaagttgagtgattaaacacttgatgcattaccatccttgaaaggttgattaccacaccttgtcatccgttttataaaagctagagatgcttagtcttgctgatagattaagaaacatatttttgatctatgactcatgttttttacaaaaaagaaaatgggcttgggataatgaaggcatcaagacattgataaattcattatccaggcatggcccctctgtcaggcgccaaatttttgaaatagtttaaaatgggaccagacgttgagcagaaaaggtcgcccgtctatgtcgattaaggaccgtactgattgttggtctgatgatctaggaccttttaactggccacatacatcgtcatgggtaaacctgaacccgactattccatacgtgaaaagacagccgcgcactgggtgtgggagatggtgggagtagcagttaccctcctggcaagaggctggatggtagggtaatgtgctcccgggtagcgcaaaccggttcatgtagtgaaggatccgtgggaatggttgacatatgcaagggttaagtgctacatatgtcgtgtggttggagatccccagctaggtattaatcgatttggatcgccgttacttctcggatatgaagactggatcgctgcccttcatcgtagataacaagcgaaacaaaaatttgattttaaaagaaagctagtataggacaagtgaaagctctagatcaggcaaatctagaattagaaaagaactcaacttgctaaataaaattttggcttaaggatccagtattagtagtattagtaagctcttctgcaaaaatgagtctttgaacttgataagctataccttgaatccttttaacccagcatgccct

SEQ ID NO: 21279 - DNA, 1700 bp, Zea Mays
tcttatccacgctgcccattatttcttagaagctacggacctcatttctccttcatcctcgtctcttcctcaagctccagccgaactccctcacgccatcctcttccctggcgttcatccctacggcagccaccacttgggcgctcctctccctgccctcccatggcggctccccctggatccctccctgcgaggaccctctcccgtggatggtgtcgtcccttcctgcagcacaccgtgctccctcccatggccgatgcccctctctggagctcgcccctgccctctgtccagcgccctccctgcttgccgttcctatccccctgcaatggagttcgtcgtcagtccgagctcgcccatcctctgctcggtttcaacttggtcgtgcctgcagaccgctccctttactgctgcagcagtgttgtgtcatggacaactctattagcggcgtgggatgtttggtattttcgcagcctatctgcgacaccgtcgacccccgaagcgaggtccgtgcgatgtttgccaagtgtttgatggaaggtccgaaccgggaacctcgcctttctcgcgcatcttctggtcggtttgtgaattggtacgctagatgattatgcgatatgaagggcatggactagactggaccacaagatgatattgacggaccaacctcaagatggatgatctgacccagtgccaggataggaggtgctcgccaagcgagtatcatctaacaacactgacgtagtgttattctaggcaagccccggtgcatttgccaccttccttgtgttttcaaaattttatcacttatatgttgcattaggtgatagaagttgagtgattaaacacttgatgcattaccatccttgaaaggttgattaccacaccttgtcatccgttttataaaagctagagatgcttagtcttgctgatagattaagaaacatatttttgatctatgactcatgttttttacaaaaaagaaaatgggcttgggataatgaaggcatcaagacattgataaattcattatccaggcatggcccctctgtcaggcgccaaatttttgaaatagtttaaaatgggaccagacgttgagcagaaaaggtcgcccgtctatgtcgattaaggaccgtactgattgttggtctgatgatctaggaccttttaactggccacatacatcgtcatgggtaaacctgaacccgactattccatacgtgaaaagacagccgcgcactgggtgtgggagatggtgggagtagcagttaccctcctggcaagaggctggatggtagggtaatgtgctcccgggtagcgcaaaccggttcatgtagtgaaggatccgtgggaatggttgacatatgcaagggttaagtgctacatatgtcgtgtggttggagatccccagctaggtattaatcgatttggatcgccgttacttctcggatatgaagactggatcgctgcccttcatcgtagataacaagcgaaacaaaaatttgattttaaaagaaagctagtataggacaagtgaaagctctagatcaggcaaatctagaattagaaaagaactcaacttgctaaataaaattttggcttaaggatccagtattagtagtattagtaagctcttctgcaaaaatgagtctttgaacttgataagctataccttgaatccttttaacccagcatgccct

SEQ ID NO: 21280 - DNA, 1444 bp, Zea Mays
tggatccctccctgcgaggaccctctcccgtggatggtgtcgtcccttcctgcagcacaccgtgctccctcccatggccgatgcccctctctggagctcgcccctgccctctgtccagcgccctccctgcttgccgttcctatccccctgcaatggagttcgtcgtcagtccgagctcgcccatcctctgctcggtttcaacttggtcgtgcctgcagaccgctccctttactgctgcagcagaagcgaggtccgtgcgatgtttgccaagtgtttgatggaaggtccgaaccgggaacctcgcctttctcgcgcatcttctggtcggtttgtgaattggtacgctagatgattatgcgatatgaagggcatggactagactggaccacaagatgatattgacggaccaacctcaagatggatgatctgacccagtgccaggataggaggtgctcgccaagcgagtatcatctaacaacactgacgtagtgttattctaggcaagccccggtgcatttgccaccttccttgtgttttcaaaattttatcacttatatgttgcattaggtgatagaagttgagtgattaaacacttgatgcattaccatccttgaaaggttgattaccacaccttgtcatccgttttataaaagctagagatgcttagtcttgctgatagattaagaaacatatttttgatctatgactcatgttttttacaaaaaagaaaatgggcttgggataatgaaggcatcaagacattgataaattcattatccaggcatggcccctctgtcaggcgccaaatttttgaaatagtttaaaatgggaccagacgttgagcagaaaaggtcgcccgtctatgtcgattaaggaccgtactgattgttggtctgatgatctaggaccttttaactggccacatacatcgtcatgggtaaacctgaacccgactattccatacgtgaaaagacagccgcgcactgggtgtgggagatggtgggagtagcagttaccctcctggcaagaggctggatggtagggtaatgtgctcccgggtagcgcaaaccggttcatgtagtgaaggatccgtgggaatggttgacatatgcaagggttaagtgctacatatgtcgtgtggttggagatccccagctaggtattaatcgatttggatcgccgttacttctcggatatgaagactggatcgctgcccttcatcgtagataacaagcgaaacaaaaatttgattttaaaagaaagctagtataggacaagtgaaagctctagatcaggcaaatctagaattagaaaagaactcaacttgctaaataaaattttggcttaaggatccagtattagtagtattagtaagctcttctgcaaaaatgagtctttgaacttgataagctataccttgaatccttttaacccagcatgccct

SEQ ID NO: 21281 - DNA, 1431 bp, Zea Mays
cccgtggatggtgtcgtcccttcctgcagcacaccgtgctccctcccatggccgatgcccctctctggagctcgcccctgccctctgtccagcgccctccctgcttgccgttcctatccccctgcaatggagttcgtcgtcagtccgagctcgcccatcctctgctcggtttcaacttggtcgtgcctgcagaccgctccctttactgctgcagcagttaaccgataaagaagcgaggtccgtgcgatgtttgccaagtgtttgatggaaggtccgaaccgggaacctcgcctttctcgcgcatcttctggtcggtttgtgaattggtacgctagatgattatgcgatatgaagggcatggactagactggaccacaagatgatattgacggaccaacctcaagatggatgatctgacccagtgccaggataggaggtgctcgccaagcgagtatcatctaacaacactgacgtagtgttattctaggcaagccccggtgcatttgccaccttccttgtgttttcaaaattttatcacttatatgttgcattaggtgatagaagttgagtgattaaacacttgatgcattaccatccttgaaaggttgattaccacaccttgtcatccgttttataaaagctagagatgcttagtcttgctgatagattaagaaacatatttttgatctatgactcatgttttttacaaaaaagaaaatgggcttgggataatgaaggcatcaagacattgataaattcattatccaggcatggcccctctgtcaggcgccaaatttttgaaatagtttaaaatgggaccagacgttgagcagaaaaggtcgcccgtctatgtcgattaaggaccgtactgattgttggtctgatgatctaggaccttttaactggccacatacatcgtcatgggtaaacctgaacccgactattccatacgtgaaaagacagccgcgcactgggtgtgggagatggtgggagtagcagttaccctcctggcaagaggctggatggtagggtaatgtgctcccgggtagcgcaaaccggttcatgtagtgaaggatccgtgggaatggttgacatatgcaagggttaagtgctacatatgtcgtgtggttggagatccccagctaggtattaatcgatttggatcgccgttacttctcggatatgaagactggatcgctgcccttcatcgtagataacaagcgaaacaaaaatttgattttaaaagaaagctagtataggacaagtgaaagctctagatcaggcaaatctagaattagaaaagaactcaacttgctaaataaaattttggcttaaggatccagtattagtagtattagtaagctcttctgcaaaaatgagtctttgaacttgataagctataccttgaatccttttaacccagcatgccct

SEQ ID NO: 21282 - DNA, 229 bp, Zea Mays
tggatggtgtcgtcccttcctgcagcacaccgtgctccctcccatggccgatgcccctctctggagctcgcccctgccctctgtccagcgccctccctgcttgccgttcctatccccctgcaatggagttcgtcgtcagtccgagctcgcccatcctctgctcggtttcaacttggtcgtgcctgcagaccgctccctttactgctgcagcaggttgtaattttgttct

SEQ ID NO: 21283 - DNA, 6422 bp, Zea Mays
gtcgtcaatcgctctccttgctcggcgtcgcctgcttcctcccgcaccgagagtccgagacgccgcttctcctcccacctacctacaccccccctctctccatcctcccagccgcatctaaaccctaaccctaaacccctcccccaccaacccagcaaacgtcgatggcattgggagatctcatggcgtccaggttcggccactcctcgtcctcgccgtcgccgtcattggccccggtgccgccgctaccccatcaccaccacaaccaccaccagaaccacgtcgcggatgacctccccgtcgccagcgggccggagcccaagaacgggttggaggtccccgaggtggagaagccggcgtccgaggcgtacctgccccaggtggtcgtgctgtgcgactatcgccacgaggggatcgacgaagctaccaccgccgcgctctctaccagcggcctcgtctccaactggcgacccaaggaccggacgaagactggatgtggtgcacttgtattatgtttgaacataagtgttgatccacctgatgtaattaaaatttccccttgtgcaagaatggagtgctggatagatcctttctctatggcacctcctaaagcccttgaaagtattggaaaaacattgcattcccagtatgagcgcttgcaacctaaggctcgatacaagcttcagctggatccaacagtggaggaagttaagaagctttctaatacttgccgcaaatatgccagagaagagagagtccttttccattataatggccatggtgtaccaaagcctacatcaaatggtgagatttgggtgtttaacaagagttacacacagtatatcccactttcaattactgatcttgattcatggctgaagacaccttccatttatgtttttgattgctcagctgctggaattattgtgaaagcctttctagagcgcctagactggagttctacctcctcggcatcttcgcagaaggatttcattcttcttgctgcctgtgaagcacatcagacgcttccccagagtgcagaatttcctgctgatgtgtttacggcttgcctcacaacgcccatcaaaatggctttgcactggttttgtaagcgaacatcactccatggtcctctggatcgttctcttattgaccaaattcctggaaggcaaaatgaccgtaaaacacttcttggagagctcaattggatttttactgctataacagatactatcgcatggaatgttcttccacgtgatctgttccaaaggcttttcaggcaggaccttcttgttgccggtctcttccgtaacttcttgcttgctgagagaatcatgcgatctgcaaactgttctccagtttcttatccgttgttacccccaacacatcaacaccatatgtgggatgcatgggacatggctgctgagatttgcctttccaagcttcctcagttaattgctgatccaaacacagagtttcagccaagtcctttttttatggaacaattgatggctttcgaagtttggcttgatcatggctctaaggacaagaaacctcctgaattgttacccatagttcttcaggtcctgcttagtcaaccacacagatctagagtgcttgttctgcttggaagatttcttgatatgggaccatgggcagttgatttggccctgtctgttggaatatttccttgtgtgctcaaactgcttcaatcaagtgctatggatatacgtcaaaatctagtgtttatatggacaaaaattctctcccttgataagtcatgtcaggttgaattggttaaagatggaggacatgcatattttattaagtttcttgacagtttggatgctttcccagaacagcgtgcaatggccgcttttgttatagcagtcattgtggatgggtataggatgggtcaagaggcttgtatgaatgctgggcttatggatgtttgcctgagacatctgcaacctgagaattctcatgcacaaacagaacctttgcttttgcagtggctttgtttatgccttgggaaactatgggaagatttccctgaggctcagttacttggtctgcaaacaaatggaccagaaattgtaatatgcttattgtcggagcctcaacctgaggtcagagctgctgctgtttttgcacttgggaatctccttgatactacatcaaatagtcatgatgatggttccgatgatgatgaaaaggtgaaagctgaaataaatgtagttcgaagccttctgcagatctcttcagatggcagtccccttgttagatctgaggttgctatagcgcttactcgctttgcgttgggtcacaacaaacatctcaaatctgttgcttccgagtattggaaacctcaacccaattcattgctgaaatcactaccatcgttggcaaatataagtaatccaagcaatgtttacagtcccaacaatattctacaaggcaggattggtcctgtgttgagggttgccagtgatagcggtgccgctggtcgtgatggaagaatttctacaagcaacccaattgcaacaagtagtatcatgcatggctctcctgagtcagatgattcttcccaacactcagattcaggcatattactgagggggaatgcaagtaatggtggtttcagctacactagatcgaggcctgttgataatgtcatttattctcaatttatatcaactatgtattctgtttctaaagatcctgacccaacaattgcaactattggtcggagagcactgtcccttattggtgttgaacaagtggttatgaaaaatactaggtttaacagtggcggttcacatcgaggagagacatctgcgtcaaattttggaatggcacgatcttcttcctggcgtgatatgaagtctggaagcatcttgatgaaatttatgacccctcctgttagcccccctcagcatgattatcttccaggattacgccgagtgtgttctatggagtttggacaacatcctataaatccccccaatggcttagctgatcgccttttaagctctgctgcaggtcccagtaatgcagaaccacttccccaatcaacaatttacaactggagttgtgttcaattctctaggccagttttaactgtctctgatgataatgaagaaaccaatgctagaagagaagagagagaacaaatcgcactagattacatcactaagtgtcagcgctcctcttgcaagatgacaagccagattgctagttgggatacaaagtttgagttgggaacaaaagcagctttattgttgccattttctccgattgtcgtcgcagctgatgaaaatgaacaaataagagtgtggaactacgacgatgcactaccagtgaactcttttcaaaaccataagttatctggcagagggctatctaaacttttgcttataaatgagcttgatgagagcttgcttttggctgcctcaagtgatggaaatgtacgtatatggaaaaattttgctcaaaagggtggagagaaacttgtaactgctttgtcatcagttcagggacatcgagctgctggtcgcagtattgtgattgactggcagcagcaatctggttatctgtatgcatctggtgacatgtcttccatcttggtatgggatcttgacaaggaacaacttctcagcaccattcagtcaactgctgatactgccatttcttccctgtctacatctcaggttcgctccggacactttgctgctggttttgctgatggttctgtcaggatatatgatgttcgctctcctgataggttcgtctatgtggccaggccacatgccccaagaacagaaaaggttgtgagcataggatttcaacctgggtttgatccatacaagattgtaagtgcatctcaagctggagacatccagtttcttgatgttagaagggcagcagaaccctacctgactattgaggcacacaggggttcacttacagcattagtggttcatcgttatgccccagttgttgctagtggctcagccaagcaaatgattaaagtgtttagtcttggtggggagcagttgacgataattgggtacctgccatcttttatgggccaaagaataggcagtgtaaattgcctttcttttcacccatacaagtcactcctggctgctggtgctggtgacaatgctctggtctctatctatgctgaggaaaattacaaacatgcagtagctggtctggtgcattattttacagcgacggtgtctagggtgaggaattttctttgggaaatcaaggatcaggtccatattgtcatctctagtccttgcgagaggccctcaccggcggcggcgagtcaccgccttctgaggaagaagccactgtcagacacaggcgagggagtaaggattccccaaccccaaccccaaccccaaccccccaagaagcaccgcacagaaccctctgctcctctcaccctcacgctccaaggcggcggcgccatgcacggcggaggcgcggcctcgcccgatgccgccatatgcatctccccagaagctgggcccatcgtcggggtcgcccccgccgggatcagggtcgaaaactgctacgtgttcaagagccggctgcaggagtatgctcagagggttggcattccaaccccggagtaccacacgctgaaagaaggcccatctcatgaacctgtcttcaagtccacagtgttcgttaataataccaagtatgagtcgctgcctgggttcttcagccggaaggctgcagaacagtctgccgcggaagttgcgctcatggagatagccatgtccgctccggtgaccgaaattaggaacatgccagcagttcaagaaactggcctgtgcaagaatctccttcaggagtatgctcagaagatgaattacgccattccatcttatatttgcactaaacaagcttcgggtgtagctcctttcgtatgcagtgttgagattggtggcatcctatacattggtgctgcagctaggacaaagaaggaggcagagataaaagctgcccgaactgctcttcttgcaatccaaagtcaatcagaaggtggtgcaaatggtgccaaaaagtacattgttgttcctgggcaaaggccagataaggagacgaataaaaatccaactgaaacccccataccacttagagtcaagaagcgtggttccaggaagaaatggaacaagaggaaattcaggaggatggctgaccgaattgttgatgctggaaaggatgcagaggggcttggaacgcttctacatgatgactatgaggaagctagaagaataggatatgagttacctacagatactgctatggttcaatttaacaaggaagttgtaatgacacaacctggtgaaggagataggatagtacaattggagccacccagagatcctgcagaggtccaatataacaaggaagctagaagtgttgaacaggacccacccagagatcctgcagaggtccaacataacaaggaagctagaagtgttgaacaggacccacccagagatcctgcagaggtccaacataacaaggaagctagaactgtcgaacaggacccacccagcaacacagaagtgtggaagcctgacaataaggctacaactacagagcaggagtcggtgagcgctttcatagcattgagatctaatggggattctacagatgtggaggcggcaccaggcgataccttgatgatgcagggccaggagtcggaagccacaatgcaagaagcatctcacgctggtgaacaggcccagcctaactaggaacctgaaagcaaaaaaaacttcctgaacaggaagaccgaaatgtaggtcgaatgcatgcattgctgtaggagaataagtccactggaggtacatgagcctaaaataatttgtggagtggtggttgactccagtggtaagtgccttccagagtgtaccggcatgcccaaaactgaaatttccggtttagatagaattgggggcgcggaagagggtgccatgtgtgtgtttgtgtgtgttgcctgtggatggaggaattgatgggagtatgtgaactgatgtagctagtctatgtttgttaccattgagggcttgttcggttagctctcaatccatgtggattgagcgggattggatgggtttgaatcccaaacagctcaaacttcttcacaattttttccaatcccatccaatccatgtgtattgggaataaccgaacaagccctgatgatgattgtgtttggccatgttttcactgtcatattggttggcgaccgctacttgcatgcacaatgcattcgaggtagccggtccaagcctccatttggtcactggatgattgcttaaatgatgtttgagttctcttgtgttaaattattaatgcacaaggaaaataaaaacaattgcaaactggag

SEQ ID NO: 21284 - DNA, 6386 bp, Zea Mays
ctccttgctcggcgtcgcctgcttcctcccgcaccgagagtccgagacgccgcttctcctcccacctacctacaccccccctctctccatcctcccagccgcatctaaaccctaaccctaaacccctcccccaccaacccagcaaacgtcgatggcattgggagatctcatggcgtccaggttcggccactcctcgtcctcgccgtcgccgtcattggccccggtgccgccgctaccccatcaccaccacaaccaccaccagaaccacgtcgcggatgacctccccgtcgccagcgggccggagcccaagaacgggttggaggtccccgaggtggagaagccggcgtccgaggcgtacctgccccaggtggtcgtgctgtgcgactatcgccacgaggggatcgacgaagctaccaccgccgcgctctctaccagcggcctcgtctccaactggcgacccaaggaccggacgaagactggatgtggtgcacttgtattatgtttgaacataagtgttgatccacctgatgtaattaaaatttccccttgtgcaagaatggagtgctggatagatcctttctctatggcacctcctaaagcccttgaaagtattggaaaaacattgcattcccagtatgagcgcttgcaacctaaggctcgatacaagcttcagctggatccaacagtggaggaagttaagaagctttctaatacttgccgcaaatatgccagagaagagagagtccttttccattataatggccatggtgtaccaaagcctacatcaaatgagttacacacagtatatcccactttcaattactgatcttgattcatggctgaagacaccttccatttatgtttttgattgctcagctgctggaattattgtgaaagcctttctagagcgcctagactggagttctacctcctcggcatcttcgcagaaggatttcattcttcttgctgcctgtgaagcacatcagacgcttccccagagtgcagaatttcctgctgatgtgtttacggcttgcctcacaacgcccatcaaaatggctttgcactggttttgtaagcgaacatcactccatggtcctctggatcgttctcttattgaccaaattcctggaaggcaaaatgaccgtaaaacacttcttggagagctcaattggatttttactgctataacagatactatcgcatggaatgttcttccacgtgatctgttccaaaggcttttcaggcaggaccttcttgttgccggtctcttccgtaacttcttgcttgctgagagaatcatgcgatctgcaaactgttctccagtttcttatccgttgttacccccaacacatcaacaccatatgtgggatgcatgggacatggctgctgagatttgcctttccaagcttcctcagttaattgctgatccaaacacagagtttcagccaagtcctttttttatggaacaattgatggctttcgaagtttggcttgatcatggctctaaggacaagaaacctcctgaattgttacccatagttcttcaggtcctgcttagtcaaccacacagatctagagtgcttgttctgcttggaagatttcttgatatgggaccatgggcagttgatttggccctgtctgttggaatatttccttgtgtgctcaaactgcttcaatcaagtgctatggatatacgtcaaaatctagtgtttatatggacaaaaattctctcccttgataagtcatgtcaggttgaattggttaaagatggaggacatgcatattttattaagtttcttgacagtttggatgctttcccagaacagcgtgcaatggccgcttttgttatagcagtcattgtggatgggtataggatgggtcaagaggcttgtatgaatgctgggcttatggatgtttgcctgagacatctgcaacctgagaattctcatgcacaaacagaacctttgcttttgcagtggctttgtttatgccttgggaaactatgggaagatttccctgaggctcagttacttggtctgcaaacaaatggaccagaaattgtaatatgcttattgtcggagcctcaacctgaggtcagagctgctgctgtttttgcacttgggaatctccttgatactacatcaaatagtcatgatgatggttccgatgatgatgaaaaggtgaaagctgaaataaatgtagttcgaagccttctgcagatctcttcagatggcagtccccttgttagatctgaggttgctatagcgcttactcgctttgcgttgggtcacaacaaacatctcaaatctgttgcttccgagtattggaaacctcaacccaattcattgctgaaatcactaccatcgttggcaaatataagtaatccaagcaatgtttacagtcccaacaatattctacaaggcaggattggtcctgtgttgagggttgccagtgatagcggtgccgctggtcgtgatggaagaatttctacaagcaacccaattgcaacaagtagtatcatgcatggctctcctgagtcagatgattcttcccaacactcagattcaggcatattactgagggggaatgcaagtaatggtggtttcagctacactagatcgaggcctgttgataatgtcatttattctcaatttatatcaactatgtattctgtttctaaagatcctgacccaacaattgcaactattggtcggagagcactgtcccttattggtgttgaacaagtggttatgaaaaatactaggtttaacagtggcggttcacatcgaggagagacatctgcgtcaaattttggaatggcacgatcttcttcctggcgtgatatgaagtctggaagcatcttgatgaaatttatgacccctcctgttagcccccctcagcatgattatcttccaggattacgccgagtgtgttctatggagtttggacaacatcctataaatccccccaatggcttagctgatcgccttttaagctctgctgcaggtcccagtaatgcagaaccacttccccaatcaacaatttacaactggagttgtgttcaattctctaggccagttttaactgtctctgatgataatgaagaaaccaatgctagaagagaagagagagaacaaatcgcactagattacatcactaagtgtcagcgctcctcttgcaagatgacaagccagattgctagttgggatacaaagtttgagttgggaacaaaagcagctttattgttgccattttctccgattgtcgtcgcagctgatgaaaatgaacaaataagagtgtggaactacgacgatgcactaccagtgaactcttttcaaaaccataagttatctggcagagggctatctaaacttttgcttataaatgagcttgatgagagcttgcttttggctgcctcaagtgatggaaatgtacgtatatggaaaaattttgctcaaaagggtggagagaaacttgtaactgctttgtcatcagttcagggacatcgagctgctggtcgcagtattgtgattgactggcagcagcaatctggttatctgtatgcatctggtgacatgtcttccatcttggtatgggatcttgacaaggaacaacttctcagcaccattcagtcaactgctgatactgccatttcttccctgtctacatctcaggttcgctccggacactttgctgctggttttgctgatggttctgtcaggatatatgatgttcgctctcctgataggttcgtctatgtggccaggccacatgccccaagaacagaaaaggttgtgagcataggatttcaacctgggtttgatccatacaagattgtaagtgcatctcaagctggagacatccagtttcttgatgttagaagggcagcagaaccctacctgactattgaggcacacaggggttcacttacagcattagtggttcatcgttatgccccagttgttgctagtggctcagccaagcaaatgattaaagtgtttagtcttggtggggagcagttgacgataattgggtacctgccatcttttatgggccaaagaataggcagtgtaaattgcctttcttttcacccatacaagtcactcctggctgctggtgctggtgacaatgctctggtctctatctatgctgaggaaaattacaaacatgcagtagctggtctggtgcattattttacagcgacggtgtctagggtgaggaattttctttgggaaatcaaggatcaggtccatattgtcatctctagtccttgcgagaggccctcaccggcggcggcgagtcaccgccttctgaggaagaagccactgtcagacacaggcgagggagtaaggattccccaaccccaaccccaaccccaaccccccaagaagcaccgcacagaaccctctgctcctctcaccctcacgctccaaggcggcggcgccatgcacggcggaggcgcggcctcgcccgatgccgccatatgcatctccccagaagctgggcccatcgtcggggtcgcccccgccgggatcagggtcgaaaactgctacgtgttcaagagccggctgcaggagtatgctcagagggttggcattccaaccccggagtaccacacgctgaaagaaggcccatctcatgaacctgtcttcaagtccacagtgttcgttaataataccaagtatgagtcgctgcctgggttcttcagccggaaggctgcagaacagtctgccgcggaagttgcgctcatggagatagccatgtccgctccggtgaccgaaattaggaacatgccagcagttcaagaaactggcctgtgcaagaatctccttcaggagtatgctcagaagatgaattacgccattccatcttatatttgcactaaacaagcttcgggtgtagctcctttcgtatgcagtgttgagattggtggcatcctatacattggtgctgcagctaggacaaagaaggaggcagagataaaagctgcccgaactgctcttcttgcaatccaaagtcaatcagaaggtggtgcaaatggtgccaaaaagtacattgttgttcctgggcaaaggccagataaggagacgaataaaaatccaactgaaacccccataccacttagagtcaagaagcgtggttccaggaagaaatggaacaagaggaaattcaggaggatggctgaccgaattgttgatgctggaaaggatgcagaggggcttggaacgcttctacatgatgactatgaggaagctagaagaataggatatgagttacctacagatactgctatggttcaatttaacaaggaagttgtaatgacacaacctggtgaaggagataggatagtacaattggagccacccagagatcctgcagaggtccaatataacaaggaagctagaagtgttgaacaggacccacccagagatcctgcagaggtccaacataacaaggaagctagaagtgttgaacaggacccacccagagatcctgcagaggtccaacataacaaggaagctagaactgtcgaacaggacccacccagcaacacagaagtgtggaagcctgacaataaggctacaactacagagcaggagtcggtgagcgctttcatagcattgagatctaatggggattctacagatgtggaggcggcaccaggcgataccttgatgatgcagggccaggagtcggaagccacaatgcaagaagcatctcacgctggtgaacaggcccagcctaactaggaacctgaaagcaaaaaaaacttcctgaacaggaagaccgaaatgtaggtcgaatgcatgcattgctgtaggagaataagtccactggaggtacatgagcctaaaataatttgtggagtggtggttgactccagtggtaagtgccttccagagtgtaccggcatgcccaaaactgaaatttccggtttagatagaattgggggcgcggaagagggtgccatgtgtgtgtttgtgtgtgttgcctgtggatggaggaattgatgggagtatgtgaactgatgtagctagtctatgtttgttaccattgagggcttgttcggttagctctcaatccatgtggattgagcgggattggatgggtttgaatcccaaacagctcaaacttcttcacaattttttccaatcccatccaatccatgtgtattgggaataaccgaacaagccctgatgatgattgtgtttggccatgttttcactgtcatattggttggcgaccgctacttgcatgcacaatgcattcgaggtagccggtccaagcctccatttggtcactggatgattgcttaaatgatgtttgagttctcttgtgttaaattattaatgcacaaggaaaataaaaacaattgcaaactggag

SEQ ID NO: 21285 - DNA, 7289 bp, Zea Mays
ctccttgctcggcgtcgcctgcttcctcccgcaccgagagtccgagacgccgcttctcctcccacctacctacaccccccctctctccatcctcccagccgcatctaaaccctaaccctaaacccctcccccaccaacccagcaaacgtcgatggcattgggagatctcatggcgtccaggttcggccactcctcgtcctcgccgtcgccgtcattggccccggtgccgccgctaccccatcaccaccacaaccaccaccagaaccacgtcgcggatgacctccccgtcgccagcgggccggagcccaagaacgggttggaggtccccgaggtggagaagccggcgtccgaggcgtacctgccccaggtggtcgtgctgtgcgactatcgccacgaggggatcgacgaagctaccaccgccgcgctctctaccagcggcctcgtctccaactggcgacccaaggaccggacgaagactggatgtggtgcacttgtattatgtttgaacataagtgttgatccacctgatgtaattaaaatttccccttgtgcaagaatggagtgctggatagatcctttctctatggcacctcctaaagcccttgaaagtattggaaaaacattgcattcccagtatgagcgcttgcaacctaaggctcgatacaagcttcagctggatccaacagtggaggaagttaagaagctttctaatacttgccgcaaatatgccagagaagagagagtccttttccattataatggccatggtgtaccaaagcctacatcaaatggtgagatttgggtgtttaacaagagttacacacagtatatcccactttcaattactgatcttgattcatggctgaagacaccttccatttatgtttttgattgctcagctgctggaattattgtgaaagcctttctagagcgcctagactggagttctacctcctcggcatcttcgcagaaggatttcattcttcttgctgcctgtgaagcacatcagacgcttccccagagtgcagaatttcctgctgatgtgtttacggcttgcctcacaacgcccatcaaaatggctttgcactggttttgtaagcgaacatcactccatggtcctctggatcgttctcttattgaccaaattcctggaaggcaaaatgaccgtaaaacacttcttggagagctcaattggatttttactgctataacagatactatcgcatggaatgttcttccacgtgatctgttccaaaggcttttcaggcaggaccttcttgttgccggtctcttccgtaacttcttgcttgctgagagaatcatgcgatctgcaaactgttctccagtttcttatccgttgttacccccaacacatcaacaccatatgtgggatgcatgggacatggctgctgagatttgcctttccaagcttcctcagttaattgctgatccaaacacagagtttcagccaagtcctttttttatggaacaattgatggctttcgaagtttggcttgatcatggctctaaggacaagaaacctcctgaattgttacccatagttcttcaggtcctgcttagtcaaccacacagatctagagtgcttgttctgcttggaagatttcttgatatgggaccatgggcagttgatttggccctgtctgttggaatatttccttgtgtgctcaaactgcttcaatcaagtgctatggatatacgtcaaaatctagtgtttatatggacaaaaattctctcccttgataagtcatgtcaggttgaattggttaaagatggaggacatgcatattttattaagtttcttgacagtttggatgctttcccagaacagcgtgcaatggccgcttttgttatagcagtcattgtggatgggtataggatgggtcaagaggcttgtatgaatgctgggcttatggatgtttgcctgagacatctgcaacctgagaattctcatgcacaaacagaacctttgcttttgcagtggctttgtttatgccttgggaaactatgggaagatttccctgaggctcagttacttggtctgcaaacaaatggaccagaaattgtaatatgcttattgtcggagcctcaacctgaggtcagagctgctgctgtttttgcacttgggaatctccttgatactacatcaaatagtcatgatgatggttccgatgatgatgaaaaggtgaaagctgaaataaatgtagttcgaagccttctgcagatctcttcagatggcagtccccttgttagatctgaggttgctatagcgcttactcgctttgcgttgggtcacaacaaacatctcaaatctgttgcttccgagtattggaaacctcaacccaattcattgctgaaatcactaccatcgttggcaaatataagtaatccaagcaatgtttacagtcccaacaatattctacaaggcaggattggtcctgtgttgagggttgccagtgatagcggtgccgctggtcgtgatggaagaatttctacaagcaacccaattgcaacaagtagtatcatgcatggctctcctgagtcagatgattcttcccaacactcagattcaggcatattactgagggggaatgcaagtaatggtggtttcagctacactagatcgaggcctgttgataatgtcatttattctcaatttatatcaactatgtattctgtttctaaagatcctgacccaacaattgcaactattggtcggagagcactgtcccttattggtgttgaacaagtggttatgaaaaatactaggtttaacagtggcggttcacatcgaggagagacatctgcgtcaaattttggaatggcacgatcttcttcctggcgtgatatgaagtctggaagcatcttgatgaaatttatgacccctcctgttagcccccctcagcatgattatcttccaggattacgccgagtgtgttctatggagtttggacaacatcctataaatccccccaatggcttagctgatcgccttttaagctctgctgcaggtcccagtaatgcagaaccacttccccaatcaacaatttacaactggagttgtgttcaattctctaggccagttttaactgtctctgatgataatgaagaaaccaatgctagaagagaagagagagaacaaatcgcactagattacatcactaagtgtcagcgctcctcttgcaagatgacaagccagattgctagttgggatacaaagtttgagttgggaacaaaagcagctttattgttgccattttctccgattgtcgtcgcagctgatgaaaatgaacaaataagagtgtggaactacgacgatgcactaccagtgaactcttttcaaaaccataagttatctggcagagggctatctaaacttttgcttataaatgagcttgatgagagcttgcttttggctgcctcaagtgatggaaatgtacgtatatggaaaaattttgctcaaaagggtggagagaaacttgtaactgctttgtcatcagttcagggacatcgagctgctggtcgcagtattgtgattgactggcagcagcaatctggttatctgtatgcatctggtgacatgtcttccatcttggtatgggatcttgacaaggaacaacttctcagcaccattcagtcaactgctgatactgccatttcttccctgtctacatctcaggttcgctccggacactttgctgctggttttgctgatggttctgtcaggatatatgatgttcgctctcctgataggttcgtctatgtggccaggccacatgccccaagaacagaaaaggttgtgagcataggatttcaacctgggtttgatccatacaagattgtaagtgcatctcaagctggagacatccagtttcttgatgttagaagggcagcagaaccctacctgactattgaggcacacaggggttcacttacagcattagtggttcatcgttatgccccagttgttgctagtggctcagccaagcaaatgattaaagtgtttagtcttggtggggagcagttgacgataattgggtacctgccatcttttatgggccaaagaataggcagtgtaaattgcctttcttttcacccatacaagtcactcctggctgctggtgctggtgacaatgctctggtctctatctatgctgaggaaaattacaagtaagatgaggccttatatctcatgacaatgcagccacagtgcaatcggtaggccttacattttttcggccaagtgatgctccacagcatggttcagcttcaagatccaagatgacggtaagccttgtcacggagatgtcgacggtaccgtggctctcggtgcatattggctgttggacggcgtgtgcggtttgtaagatacagtcaagattcattagcctccttgcagaaggtttgtgaaccctaacctgatcctgtcattgaactcggaggctccccccagcccacccaaataattagccatacctaggctataaccaaaatgtaaatagccagcgcattcgggttgtactttgccagcattcaagtgtaaaaaggtctgaagatggttgatgtgataaacagggcttggtaggggctgctgcctgggcaagtggggttgtgcatatgggcccaggtagtagaatggttgcagaagtctgcccacagatgttgaagagaaaagtgtatttgtccagctaaaatatggcgttagatgggggtagtattggcctgcatgaatgaatgaatgaatgttgagtcatttgcattgtaattgtaacccttggatagatgactgcccgcttgtatatatgagtcgtgtttgtacagttgtctgctttctgtccccaagttgtaatccgtccaatgatgtgttttatgctggtgcattccggtagagatgaaccggaggtgctggaacatataggtggtcttgtggtctgtaactgtaatggatatgtgaatcttaatatgagtaattgattaccgccgcgtcctggacatggacaatacctgcatgcaaatgatcagtagctgatttacggcatactgtatgcagacatgcagtagctggtctggtgcattattttacagcgacggtgtctagggtgaggaattttctttgggaaatcaaggatcaggtccatattgtcatctctagtccttgcgagaggccctcaccggcggcggcgagtcaccgccttctgaggaagaagccactgtcagacacaggcgagggagtaaggattccccaaccccaaccccaaccccaaccccccaagaagcaccgcacagaaccctctgctcctctcaccctcacgctccaaggcggcggcgccatgcacggcggaggcgcggcctcgcccgatgccgccatatgcatctccccagaagctgggcccatcgtcggggtcgcccccgccgggatcagggtcgaaaactgctacgtgttcaagagccggctgcaggagtatgctcagagggttggcattccaaccccggagtaccacacgctgaaagaaggcccatctcatgaacctgtcttcaagtccacagtgttcgttaataataccaagtatgagtcgctgcctgggttcttcagccggaaggctgcagaacagtctgccgcggaagttgcgctcatggagatagccatgtccgctccggtgaccgaaattaggaacatgccagcagttcaagaaactggcctgtgcaagaatctccttcaggagtatgctcagaagatgaattacgccattccatcttatatttgcactaaacaagcttcgggtgtagctcctttcgtatgcagtgttgagattggtggcatcctatacattggtgctgcagctaggacaaagaaggaggcagagataaaagctgcccgaactgctcttcttgcaatccaaagtcaatcagaaggtggtgcaaatggtgccaaaaagtacattgttgttcctgggcaaaggccagataaggagacgaataaaaatccaactgaaacccccataccacttagagtcaagaagcgtggttccaggaagaaatggaacaagaggaaattcaggaggatggctgaccgaattgttgatgctggaaaggatgcagaggggcttggaacgcttctacatgatgactatgaggaagctagaagaataggatatgagttacctacagatactgctatggttcaatttaacaaggaagttgtaatgacacaacctggtgaaggagataggatagtacaattggagccacccagagatcctgcagaggtccaatataacaaggaagctagaagtgttgaacaggacccacccagagatcctgcagaggtccaacataacaaggaagctagaagtgttgaacaggacccacccagagatcctgcagaggtccaacataacaaggaagctagaactgtcgaacaggacccacccagcaacacagaagtgtggaagcctgacaataaggctacaactacagagcaggagtcggtgagcgctttcatagcattgagatctaatggggattctacagatgtggaggcggcaccaggcgataccttgatgatgcagggccaggagtcggaagccacaatgcaagaagcatctcacgctggtgaacaggcccagcctaactaggaacctgaaagcaaaaaaaacttcctgaacaggaagaccgaaatgtaggtcgaatgcatgcattgctgtaggagaataagtccactggaggtacatgagcctaaaataatttgtggagtggtggttgactccagtggtaagtgccttccagagtgtaccggcatgcccaaaactgaaatttccggtttagatagaattgggggcgcggaagagggtgccatgtgtgtgtttgtgtgtgttgcctgtggatggaggaattgatgggagtatgtgaactgatgtagctagtctatgtttgttaccattgagggcttgttcggttagctctcaatccatgtggattgagcgggattggatgggtttgaatcccaaacagctcaaacttcttcacaattttttccaatcccatccaatccatgtgtattgggaataaccgaacaagccctgatgatgattgtgtttggccatgttttcactgtcatattggttggcgaccgctacttgcatgcacaatgcattcgaggtagccggtccaagcctccatttggtcactggatgattgcttaaatgatgtttgagttctcttgtgttaaattattaatgcacaaggaaaataaaaacaattgcaaactggag

SEQ ID NO: 21286 - DNA, 502 bp, Zea Mays
cctgcttcctcccgcaccgagagtccgagacgccgcttctcctcccacctacctacaccccccctctctccatcctcccagccgcatctaaaccctaaccctaaacccctcccccaccaacccagcaaacgtcgatggcattgggagatctcatggcgtccaggttcggccactcctcgtcctcgccgtcgccgtcattggccccggtgccgccgctaccccatcaccaccacaaccaccaccagaaccacgtcgcggatgacctccccgtcgccagcgggccggagcccaagaacgggttggaggtccccgaggtggagaagccggcgtccgaggcgtacctgccccaggtggtcgtgctgtgcgactatcgccacgaggggatcgacgaagctaccaccgccgcgctctctaccagcggcctcgtctccaactggcgacccaaggaccgggcttaaggctttccagtagcaaagttggcatggaagcgcatggttgtttc

SEQ ID NO: 21287 - DNA, 3144 bp, Zea Mays
ctcctctgcctccgccctaacccaatccagagccagggcagggcagggcaaccaaaccctaggccctcgtgctcgtggtatccatgggctgaccgcgtcccggtggggagcccggatccagagctagggttccgtcctcggcggcaacaccatggagtgggacagcgagtccgacggcgccggcagcgtcggcgtcgacgagcaggaagaggagcaggaggaggagcggggaggcgagggaggaggtgttgacgccggtgggatgttcacgctcgcgattgaaggcatgctgcgcgcgtctggtccgtgcgggctcgtcgtcaccaacgcgctcgagcccgactgtcccatcatctacgctaaccgcggcttcgaggaggctacgggctaccgcgtcgaggagtttcttggcaggaactgtctacatctcaggttcgctccggacactttgctgctggttttgctgatggttctgtcaggatatatgatgttcgctctcctgataggttcgtctatgtggccaggccacatgccccaagaacagaaaaggttgtgagcataggatttcaacctgggtttgatccatacaagattgtaagtgcatctcaagctggagacatccagtttcttgatgttagaagggcagcagaaccctacctgactattgaggcacacaggggttcacttacagcattagtggttcatcgttatgccccagttgttgctagtggctcagccaagcaaatgattaaagtgtttagtcttggtggggagcagttgacgataattgggtacctgccatcttttatgggccaaagaataggcagtgtaaattgcctttcttttcacccatacaagtcactcctggctgctggtgctggtgacaatgctctggtctctatctatgctgaggaaaattacaaacatgcagtagctggtctggtgcattattttacagcgacggtgtctagggtgaggaattttctttgggaaatcaaggatcaggtccatattgtcatctctagtccttgcgagaggccctcaccggcggcggcgagtcaccgccttctgaggaagaagccactgtcagacacaggcgagggagtaaggattccccaaccccaaccccaaccccaaccccccaagaagcaccgcacagaaccctctgctcctctcaccctcacgctccaaggcggcggcgccatgcacggcggaggcgcggcctcgcccgatgccgccatatgcatctccccagaagctgggcccatcgtcggggtcgcccccgccgggatcagggtcgaaaactgctacgtgttcaagagccggctgcaggagtatgctcagagggttggcattccaaccccggagtaccacacgctgaaagaaggcccatctcatgaacctgtcttcaagtccacagtgttcgttaataataccaagtatgagtcgctgcctgggttcttcagccggaaggctgcagaacagtctgccgcggaagttgcgctcatggagatagccatgtccgctccggtgaccgaaattaggaacatgccagcagttcaagaaactggcctgtgcaagaatctccttcaggagtatgctcagaagatgaattacgccattccatcttatatttgcactaaacaagcttcgggtgtagctcctttcgtatgcagtgttgagattggtggcatcctatacattggtgctgcagctaggacaaagaaggaggcagagataaaagctgcccgaactgctcttcttgcaatccaaagtcaatcagaaggtggtgcaaatggtgccaaaaagtacattgttgttcctgggcaaaggccagataaggagacgaataaaaatccaactgaaacccccataccacttagagtcaagaagcgtggttccaggaagaaatggaacaagaggaaattcaggaggatggctgaccgaattgttgatgctggaaaggatgcagaggggcttggaacgcttctacatgatgactatgaggaagctagaagaataggatatgagttacctacagatactgctatggttcaatttaacaaggaagttgtaatgacacaacctggtgaaggagataggatagtacaattggagccacccagagatcctgcagaggtccaatataacaaggaagctagaagtgttgaacaggacccacccagagatcctgcagaggtccaacataacaaggaagctagaagtgttgaacaggacccacccagagatcctgcagaggtccaacataacaaggaagctagaactgtcgaacaggacccacccagcaacacagaagtgtggaagcctgacaataaggctacaactacagagcaggagtcggtgagcgctttcatagcattgagatctaatggggattctacagatgtggaggcggcaccaggcgataccttgatgatgcagggccaggagtcggaagccacaatgcaagaagcatctcacgctggtgaacaggcccagcctaactaggaacctgaaagcaaaaaaaacttcctgaacaggaagaccgaaatgtaggtcgaatgcatgcattgctgtaggagaataagtccactggaggtacatgagcctaaaataatttgtggagtggtggttgactccagtggtaagtgccttccagagtgtaccggcatgcccaaaactgaaatttccggtttagatagaattgggggcgcggaagagggtgccatgtgtgtgtttgtgtgtgttgcctgtggatggaggaattgatgggagtatgtgaactgatgtagctagtctatgtttgttaccattgagggcttgttcggttagctctcaatccatgtggattgagcgggattggatgggtttgaatcccaaacagctcaaacttcttcacaattttttccaatcccatccaatccatgtgtattgggaataaccgaacaagccctgatgatgattgtgtttggccatgttttcactgtcatattggttggcgaccgctacttgcatgcacaatgcattcgaggtagccggtccaagcctccatttggtcactggatgattgcttaaatgatgtttgagttctcttgtgttaaattattaatgcacaaggaaaataaaaacaattgcaaactggag

SEQ ID NO: 21288 - DNA, 2710 bp, Zea Mays
atggagtgggacagcgagtccgacggcgccggcagcgtcggcgtcgacgagcaggaagaggagcaggaggaggagcggggaggcgagggaggaggtgttgacgccggtgggatgttcacgctcgcgattgaaggcatgctgcgcgcgtctggtccgtgcgggctcgtcgtcaccaacgcgctcgagcccgactgtcccatcatctacgctaaccgcggcttcgaggaggctacgggctaccgcgtcgaggagtttcttggcaggaactgtaacgagcttagactggtatttagcaggagagttggcattgctacctcatctcgtgctctttgctctcaatttgttacacatcaattggatttggctgcaaggtgggtggggcggtccaaattccagcgatgggatgacaacgcttcgggttcctcctctggtggaacagtgcactcctataaggaggcccttctttcctcatctggcgccacctcccaggagttggacgtaaacacttctactgtagcgaggccgaagctctgtgacaaggagaggaggctgcgtcggcgtgaggtcctggtgccggtcgacaaggaggatggctggcaggccggccctcagaagctgaagaccccaggccgcttgcgcgacctcctggacattgtcagttcatatccgcgcggaactgggagtgctgctcctccaaagaagaggtcggtttgggtgcgtatctctcctgcaccccacacattcgaccggaagactgatcagccatctccaatgttgaacaactgtgccccggctgttgatcaacgttcctttcgcaacaagaggaaaagaaggtccaagagtaaaagaggaaaaggtcctgctgaagctgcgggaactggtgcgtgtgtggattcccctccctcatcttctgaagctcattacactcagtcgaggatggaatgccacaacacatctcccccaactgttgtaggttcacgtgttcttacgttcactgatgagatggcaagggaagagatcaatttacgcaaagccatgttcgtcaccatcgcaggtaccagacctgtagtgcagggatcagaggtgttggatgaggtggctcgcagctttggagtatgcattgataaaatgtccatccaccattcctcaccggaggatttcctacttttcctgccggatgaggaaactgcctccaggattttcaatgggggcagattgttcactggacctcgtttctgcttattgttcaaaagatggtctcgtttctcgcatgtttctctgtctcgcatgtctcacttagtggatgtgcagactagtggaatccctgaacatgcatggtcttgctccactgtggaagctattcttgaggactcatgtcatattgttgagtctacatctcaggttcgctccggacactttgctgctggttttgctgatggttctgtcaggatatatgatgttcgctctcctgataggttcgtctatgtggccaggccacatgccccaagaacagaaaaggttgtgagcataggatttcaacctgggtttgatccatacaagattgtaagtgcatctcaagctggagacatccagtttcttgatgttagaagggcagcagaaccctacctgactattgaggcacacaggggttcacttacagcattagtggttcatcgttatgccccagttgttgctagtggctcagccaagcaaatgattaaagtgtttagtcttggtggggagcagttgacgataattgggtacctgccatcttttatgggccaaagaataggcagtgtaaattgcctttcttttcacccatacaagtcactcctggctgctggtgctggtgacaatgctctggtctctatctatgctgaggaaaattacaagtaagatgaggccttatatctcatgacaatgcagccacagtgcaatcggtaggccttacattttttcggccaagtgatgctccacagcatggttcagcttcaagatccaagatgacggtaagccttgtcacggagatgtcgacggtaccgtggctctcggtgcatattggctgttggacggcgtgtgcggtttgtaagatacagtcaagattcattagcctccttgcagaaggtttgtgaaccctaacctgatcctgtcattgaactcggaggctccccccagcccacccaaataattagccatacctaggctataaccaaaatgtaaatagccagcgcattcgggttgtactttgccagcattcaagtgtaaaaaggtctgaagatggttgatgtgataaacagggcttggtaggggctgctgcctgggcaagtggggttgtgcatatgggcccaggtagtagaatggttgcagaagtctgcccacagatgttgaagagaaaagtgtatttgtccagctaaaatatggcgttagatgggggtagtattggcctgcatgaatgaatgaatgaatgttgagtcatttgcattgtaattgtaacccttggatagatgactgcccgcttgtatatatgagtcgtgtttgtacagttgtctgctttctgtccccaagttgtaatccgtccaatgatgtgttttatgctggtgcattccggtagagatgaaccggaggtgctggaacatataggtggtcttgtggtctgtaactgtaatggatatgtgaatcttaatatgagtaattgattaccgccgcgtcc

SEQ ID NO: 21289 - DNA, 2756 bp, Zea Mays
ctaaagcctccaacaggtcacaggaacataatatctcacaagaacgcacacgagcacaagtgttttggtggctggaatgacttagccttttctggttttctcttctaatatagccaatgttcgtctatgtggccaggccacatgccccaagaacagaaaaggttgtgagcataggatttcaacctgggtttgatccatacaagattgtaagtgcatctcaagctggagacatccagtttcttgatgttagaagggcagcagaaccctacctgactattgaggcacacaggggttcacttacagcattagtggttcatcgttatgccccagttgttgctagtggctcagccaagcaaatgattaaagtgtttagtcttggtggggagcagttgacgataattgggtacctgccatcttttatgggccaaagaataggcagtgtaaattgcctttcttttcacccatacaagtcactcctggctgctggtgctggtgacaatgctctggtctctatctatgctgaggaaaattacaaacatgcagtagctggtctggtgcattattttacagcgacggtgtctagggtgaggaattttctttgggaaatcaaggatcaggtccatattgtcatctctagtccttgcgagaggccctcaccggcggcggcgagtcaccgccttctgaggaagaagccactgtcagacacaggcgagggagtaaggattccccaaccccaaccccaaccccaaccccccaagaagcaccgcacagaaccctctgctcctctcaccctcacgctccaaggcggcggcgccatgcacggcggaggcgcggcctcgcccgatgccgccatatgcatctccccagaagctgggcccatcgtcggggtcgcccccgccgggatcagggtcgaaaactgctacgtgttcaagagccggctgcaggagtatgctcagagggttggcattccaaccccggagtaccacacgctgaaagaaggcccatctcatgaacctgtcttcaagtccacagtgttcgttaataataccaagtatgagtcgctgcctgggttcttcagccggaaggctgcagaacagtctgccgcggaagttgcgctcatggagatagccatgtccgctccggtgaccgaaattaggaacatgccagcagttcaagaaactggcctgtgcaagaatctccttcaggagtatgctcagaagatgaattacgccattccatcttatatttgcactaaacaagcttcgggtgtagctcctttcgtatgcagtgttgagattggtggcatcctatacattggtgctgcagctaggacaaagaaggaggcagagataaaagctgcccgaactgctcttcttgcaatccaaagtcaatcagaaggtggtgcaaatggtgccaaaaagtacattgttgttcctgggcaaaggccagataaggagacgaataaaaatccaactgaaacccccataccacttagagtcaagaagcgtggttccaggaagaaatggaacaagaggaaattcaggaggatggctgaccgaattgttgatgctggaaaggatgcagaggggcttggaacgcttctacatgatgactatgaggaagctagaagaataggatatgagttacctacagatactgctatggttcaatttaacaaggaagttgtaatgacacaacctggtgaaggagataggatagtacaattggagccacccagagatcctgcagaggtccaatataacaaggaagctagaagtgttgaacaggacccacccagagatcctgcagaggtccaacataacaaggaagctagaagtgttgaacaggacccacccagagatcctgcagaggtccaacataacaaggaagctagaactgtcgaacaggacccacccagcaacacagaagtgtggaagcctgacaataaggctacaactacagagcaggagtcggtgagcgctttcatagcattgagatctaatggggattctacagatgtggaggcggcaccaggcgataccttgatgatgcagggccaggagtcggaagccacaatgcaagaagcatctcacgctggtgaacaggcccagcctaactaggaacctgaaagcaaaaaaaacttcctgaacaggaagaccgaaatgtaggtcgaatgcatgcattgctgtaggagaataagtccactggaggtacatgagcctaaaataatttgtggagtggtggttgactccagtggtaagtgccttccagagtgtaccggcatgcccaaaactgaaatttccggtttagatagaattgggggcgcggaagagggtgccatgtgtgtgtttgtgtgtgttgcctgtggatggaggaattgatgggagtatgtgaactgatgtagctagtctatgtttgttaccattgagggcttgttcggttagctctcaatccatgtggattgagcgggattggatgggtttgaatcccaaacagctcaaacttcttcacaattttttccaatcccatccaatccatgtgtattgggaataaccgaacaagccctgatgatgattgtgtttggccatgttttcactgtcatattggttggcgaccgctacttgcatgcacaatgcattcgaggtagccggtccaagcctccatttggtcactggatgattgcttaaatgatgtttgagttctcttgtgttaaattattaatgcacaaggaaaataaaaacaattgcaaactggag

SEQ ID NO: 21290 - DNA, 1908 bp, Zea Mays
cgcaatttctgatacgatactactcctaccagttgcttatctttccctagtgcagcttgggtcgaaaactgctacgtgttcaagagccggctgcaggagtatgctcagagggttggcattccaaccccggagtaccacacgctgaaagaaggcccatctcatgaacctgtcttcaagtccacagtgttcgttaataataccaagtatgagtcgctgcctgggttcttcagccggaaggctgcagaacagtctgccgcggaagttgcgctcatggagatagccatgtccgctccggtgaccgaaattaggaacatgccagcagttcaagaaactggcctgtgcaagaatctccttcaggagtatgctcagaagatgaattacgccattccatcttatatttgcactaaacaagcttcgggtgtagctcctttcgtatgcagtgttgagattggtggcatcctatacattggtgctgcagctaggacaaagaaggaggcagagataaaagctgcccgaactgctcttcttgcaatccaaagtcaatcagaaggtggtgcaaatggtgccaaaaagtacattgttgttcctgggcaaaggccagataaggagacgaataaaaatccaactgaaacccccataccacttagagtcaagaagcgtggttccaggaagaaatggaacaagaggaaattcaggaggatggctgaccgaattgttgatgctggaaaggatgcagaggggcttggaacgcttctacatgatgactatgaggaagctagaagaataggatatgagttacctacagatactgctatggttcaatttaacaaggaagttgtaatgacacaacctggtgaaggagataggatagtacaattggagccacccagagatcctgcagaggtccaatataacaaggaagctagaagtgttgaacaggacccacccagagatcctgcagaggtccaacataacaaggaagctagaagtgttgaacaggacccacccagagatcctgcagaggtccaacataacaaggaagctagaactgtcgaacaggacccacccagcaacacagaagtgtggaagcctgacaataaggctacaactacagagcaggagtcggtgagcgctttcatagcattgagatctaatggggattctacagatgtggaggcggcaccaggcgataccttgatgatgcagggccaggagtcggaagccacaatgcaagaagcatctcacgctggtgaacaggcccagcctaactaggaacctgaaagcaaaaaaaacttcctgaacaggaagaccgaaatgtaggtcgaatgcatgcattgctgtaggagaataagtccactggaggtacatgagcctaaaataatttgtggagtggtggttgactccagtggtaagtgccttccagagtgtaccggcatgcccaaaactgaaatttccggtttagatagaattgggggcgcggaagagggtgccatgtgtgtgtttgtgtgtgttgcctgtggatggaggaattgatgggagtatgtgaactgatgtagctagtctatgtttgttaccattgagggcttgttcggttagctctcaatccatgtggattgagcgggattggatgggtttgaatcccaaacagctcaaacttcttcacaattttttccaatcccatccaatccatgtgtattgggaataaccgaacaagccctgatgatgattgtgtttggccatgttttcactgtcatattggttggcgaccgctacttgcatgcacaatgcattcgaggtagccggtccaagcctccatttggtcactggatgattgcttaaatgatgtttgagttctcttgtgttaaattattaatgcacaaggaaaataaaaacaattgcaaactggag

SEQ ID NO: 21291 - DNA, 1056 bp, Zea Mays
ccccaccctcgccccgctctccatccgcggccgccccgccatccccgccctcaccccgctctccatcgatggaagggcgccattccagggatttccctactttccatccgcgacagcccccaccatcctcgcccccgccatccacaagttgtagaagctgcaatggaggggagtacgtcgatgtccgttggtcccaccatcacattcatggtcgtttcggtcacccacccctccacccaaactggcatctccttgctccctggttcaaaaggttacacttcccaccacactttgccaacggcgcaaaatggctggagtccatatgcttggaacaaaattgttactgaatttaacaagaagcatgagtatatcacattcaacaagattcagattcaagagaaggagagggaattgaaaagggattacaagatgttcaaagaggttagaaagcaaagtggtgtttcctggaatgagaaacgatgcatgattgttgttgatccaccaatatgggaaaacatcataaaaatcataacatctacacatctaccacaagaatggaacacaatttcaaatgaagaagaacaagtgaacaccacaagaatggatgaggaaggtattattcaacaacaaccacaagaagaggattcaagattggaacaagatgaacatcctatatttgaaatgattgaacagaggagggtacatgtaacaacgagaaggtctactgcatcaacattcaatcaagataaggaagcagagaggatgaagaaggattctttggaaggacttggtgggagatatctaaatctaaaatcaaaacaagttgagaatgaggttacacaaatggcaaagggaaaagaatctgctcaaggtaatgaattctccatcttgagatgcatttctattcttagagccatggacgtgacaacagatgagaagataaaagcagctgaggtgttcgacataccaaacaacagagagacctttatcaattttagtattgatgagccagaaactgccctcctatggttaagacggaagatggataagatctaa

SEQ ID NO: 21292 - DNA, 1076 bp, Zea Mays
ccccaccctcgccccgctctccatccgcggccgccccgccatccccgccctcaccccgctctccatcgatggaagggcgccattccagggatttccctactttccatccgcgacagcccccaccatcctcgcccccgccatccacaagtccaaatatatgggcaacagttgtagaagctgcaatggaggggagtacgtcgatgtccgttggtcccaccatcacattcatggtcgtttcggtcacccacccctccacccaaactggcatctccttgctccctggttcaaaaggttacacttcccaccacactttgccaacggcgcaaaatggctggagtccatatgcttggaacaaaattgttactgaatttaacaagaagcatgagtatatcacattcaacaagattcagattcaagagaaggagagggaattgaaaagggattacaagatgttcaaagaggttagaaagcaaagtggtgtttcctggaatgagaaacgatgcatgattgttgttgatccaccaatatgggaaaacatcataaaaatcataacatctacacatctaccacaagaatggaacacaatttcaaatgaagaagaacaagtgaacaccacaagaatggatgaggaaggtattattcaacaacaaccacaagaagaggattcaagattggaacaagatgaacatcctatatttgaaatgattgaacagaggagggtacatgtaacaacgagaaggtctactgcatcaacattcaatcaagataaggaagcagagaggatgaagaaggattctttggaaggacttggtgggagatatctaaatctaaaatcaaaacaagttgagaatgaggttacacaaatggcaaagggaaaagaatctgctcaaggtaatgaattctccatcttgagatgcatttctattcttagagccatggacgtgacaacagatgagaagataaaagcagctgaggtgttcgacataccaaacaacagagagacctttatcaattttagtattgatgagccagaaactgccctcctatggttaagacggaagatggataagatctaa

SEQ ID NO: 21293 - DNA, 344 bp, Zea Mays
ccgctctccatccgcggccgccccgccatccccgccctcaccccgctctccatcgatggaagggcgccattccagggatttccctactttccatccgcgacagcccccaccatcctcgcccccgccatccacaaggtcctcggcgccccttccttagcccccgtcgtccccacatatttggattcgagattttgctcgagttgcctcgcctcgccgaggacccaccgcagcagtcagggagcatggtgggcaggaggatatggggaggagcagaggaggaggtgaagctcacatcgacaacatgttcatggcactcgagtccctcaagaagaagggcaccaagg

SEQ ID NO: 21294 - DNA, 556 bp, Zea Mays
gcatcgtactgttcacgctggattgtaatcgctctcctgcatttacaccttcgagcaagccgaatgtgtggcagaacctcccaagttattgggcccacatgcacctgtccttgtctcaaagacctcagacggctatgcatgtgcaccagataacttaacaggatccgtccgattgccccaaggacatcggataaaccacttacaaccaggaccgcaagattaagtaacacaaatcacacacaccaatatttttgcagcggaaatcttatttccaaattttacaagttacaaaaattttacattaatttatcagagtgattacaaaagtataagtttgaaatatatgctagctcaagtgaccatcctcaataagaagtatgtaagggagttacttagacttataagaaggccgagcccaccggcacttaacaccatcatcagcagcacaacactataacctgaaaaacatagagaaaaagccctgagtatggaattactcagcaagacttacttgactaaagaaaagactctcaaggttatgctggctagagggatt

SEQ ID NO: 21295 - DNA, 860 bp, Zea Mays
agggtaatcaattttcaaggaaggaaatgcatcagcggtttagcacacaactcctatcacctaatgcatcaaacaaggtgataaagatgttaaaacacaaggaggtggcaaatgcaccggggcttgcctgaataacactaggttagtgttgttagacgatgtccacttgacgatcatctttgtcctagcacttgatcaggtaggttcgtccatcagcatcaccatgcggattagcccgcgcttggggtcgacttggttcgtcttccgcatcacgcgattatttatcgtacctcatgagatgcacgatgcacatgtatgagcatgagtataaagagtataagatagatatctacaccgaagagaatgaaacacttataacaaaacattaatcaaatactagctagcaatgtacgactaattataataattacgcttttctagcctattcggatgtagtgcatacatcgcaatacaataaaatatacacatgctctactttcttttatgatttatttacagattcatattactacatatatttttacctagtcagcatattttatacaatataccatcacaccaatcactagataagaaaatcatcgatcatatcctactccaacattatcgatcacaaacatagatgacactaactactagcgcaggacatcgatttcatcttacgcgcactgaacacaactagcatcgactgttttatcgataattgcataaaatactaaagttaacctacacatcaccgaaatactacactctgcaaaatagaactagttcaaatatacttgataactaaatacaacgaagcacacctcgcatcactggtatttctaacttaaacttca

SEQ ID NO: 21296 - DNA, 1112 bp, Zea Mays
ggaacaacgacatccacgagctgggggaaaaagaacatatggctaggcgttaacggccggatccaagcgcgagggagaagctcgaccggcgagctgggcacacgacgacttgaggaagctgcgcacacgcacgaactcaaggagatatgcggatcgacacagtggagcagtgcgcgcagcgagctgaggaacgacggcgaggtcgcggccgatccggacgaggagcacgcggcagggagttgggagagaaccgcggcgcgagcaaggaaccggcctcggcgagcagagagcttcgtgcgtgcaacagaggagctcgacacacgcagcagggagaagtgaccgaagtggggattgggcagagcgccggccgagggtgagagagttgataggcctcggcacagaggctgggcgccgtgagagcttggtgaatcggcgaagttgaaggagcgagcagagagatgccatggcatggagctcggccagggtgcgaacacagaccgaccatgggcaccgaccggacgagcagagagagacagagaaaccgcgcggcatagcggggagctgggcgagcagtgaggaagacgcgcgcgaagctccgatctgtggccagcgcagagcaccagagagacgcggcaagggaggagcagaggccaaggacgcatggaggggcgagccagggaacaggagcgtcgcacagaggaagcttcagtcggagcaggagaagcccgagcgccatgggaggaaaattggagctggacggcgcgcacagaggagctcagttgcggcgcgcagaggagctctgagctggagggcgcgccatgggggcaagcagcggacacggcaccaggagatggcagagggagatgggaggagatggagacatcgtgagagccgagcagagactgagcgccatggaagatgagcgccggccgaggagggagagaagcagggagggcacgcggctggagagaggtggagggaggagagaggagcgcgcacgggagaagaagcgcgcgcggggaagaagaaatgccagagaacggcgacgctgaaaaaatcagggagggagagcggtggagataagcgcggtactggaaaaaaatctggaggag

SEQ ID NO: 21297 - DNA, 490 bp, Zea Mays
catttggcctgaacggtcaggatttttttggctttcactgggccatggccctgtcgctcgacaacctcatcaaagccgccgccgccgtcggctcagctcgctccggccgcctctgcctccctgcctctgaggatttgcttggggagggacatatgagattcgcgggttggtacctgaagatcgcggcggtaggggcctccattggcgccgccatggagctcttcatgatccacacgggcttctatgagaaggtaactgtcttggagtcagaaaaacgagcttgggaaagcagtccagaggcccaagctatgagagaagccctcaatccatggcacaagcatgatgaacaagaacaacaaaagaaatagtcaagatttatgtgtcctgtcgagtgtctgtgtcccccatccgtagacccatgaatgagggtcagggccatctgtatccacatatgagcaactggagcaggcagggatgatgaaaggaaggg

SEQ ID NO: 21298 - DNA, 388 bp, Zea Mays
tggccctgtcgctcgacaacctcatcaaagccgccgccgccgtcggctcagctcgctccggccgcctctgcctccctgcctctgaggatttgcttggggagggacatatgagattcgcgggttggtacctgaagatcgcggcggtaggggcctccattggcgccgccatggagctcttcatgatccacacgggcttctatgagaaggtaactgtcttggagtcagaaaaacgagcttgggaaagcagtccagaggcccaagctatgagagaagccctcaatccatggcacaagcatgatgaacaagaacaacaaaagaaatagtcaagatttatgtgtcctgtcgagtgtctgtgtcccccatccgtagacccatgaatgagtggcga

SEQ ID NO: 21299 - DNA, 1238 bp, Zea Mays
cgacaacctcatcaaagccgccgccgccgtcggctcagctcgctccggccgcctctgcctccctgcctctgaggatttgcttggggagggacatatgagattcgcgggttggtacctgaagatcgcggcggtaggggcctccattggcgccgccatggagctcttcatgatccacacgggcttctatgagaaggtaactgtcttggagtcagaaaaacgagcttgggaaagcagtccagaggcccaagctatgagagaagccctcaatccatggcacaagcatgatgaacaagaacaacaaaagaaatagtcaagatttatgtgtcctgtcgagtgtctgtgtcccccatccgtagacccatgaatgagggctggatgcctggatggtaccttccgcaagacgctgaagggctatgtgaaacagctataaactgtttttttcacgggaggaaaaaatcgagggaaaaattgtacactatcagactagtttcgcttgttttttatgatatattaacattaaacagcaaattctgggtataggaatgggtgaaagttgtatgcttctccttacaatagttgaatgctctgtggattcctcagttaagctttttcagttatggctcacctgagtagtacgccccaggcattcttgtaaaatttagaaactgcctgtgtcattttgtggtgcttgaataacttacagcacccctatttgaagtatcagtatctccatggcacagactgaaggagaagttattacatttcattttaggcagaaagctgaaatgctagctagctagattcaatactgaagtcctgcatactgtaagtcattataagtgttacataaaaaacagtgtggatcatttggcgtacaattcaactggcaacaacagtctaaactgatttcatgctgtcctgggcaaacttgttcgttctgtactttaacgtttcagctataaagctgttaattactgctctatggtatcattcaaggatttgttctgtcaagtatttgcattcacatcctcagttgtaaccctcagatgaaataatatgaatgtgatcctttttgtacaagctcttcatttcacgtattgtatgtgacccatttcagctagaactaaccaaaattttgtacaagctaaccgtgatttcaacagtaaatttctctgttaactactaactggaaacttggtgaaggtgcttacaacttgaccgactagcagcagtgtcat

SEQ ID NO: 21300 - DNA, 1774 bp, Zea Mays
cacggttctaccactgtctcctctccgtgacgcacgcccgagatcctctccgcgacacacgcctccctctcctctgccccaccctcctccccacgccatcggcgccgccatcatcggatccggcccaagatgcctccgccccacgcgcccgagtcgtcgaggcacactccttcccgcctccgtcgtccacgcatatctccgcctcacctcggcgcccgagtcgtcgcacgcgttcgcggtggtgtccatcccggcaccggcctcacgcaccgtctacagctcccaactctgctcctctcagttctccctccgcatttcgccttctctcccttcctctccaagcagcgtcctcctcgcctagatccgtacaagcggcaaataacctctccggcggcgagacagatggagtcgacctccggcgaggatgctccgaagcacaacccgattccgtccgcgctcgtctccaacctacagtccgtgctcaccgcccgccgcttgtccgcagccgaggtcagcaccgccgccacagctagcgaggttgaggccttggcttaggaagcagaggcgttcgctgcccccacgggagatgggacgctggcgaggcccatcgtgctactgacctatgccggggggatccggtcggcgggtctcgcggcgctcgtcgacgccctcgttgccgccgaccgctgcgacgtccacgtgtgtgcccccgaatcgtacgtgctgcgacttagaaaaccaaaccacagcgggaccagtgctcggatagggtccgacgacgatgcaagcaaggagtggcgcgcggccgacggggcgcagatcggctcctgcacgtgcagcgcagccgcgtgacagtgaagcagggaggccgcgataggtggcgcagggagggtgcgacggaggcaaagtgcaagcacctggggacttcagaaagaaagagtacaagtctactactgcagaaagcaaggagaatgccaatagaagcagatttcatgtatggatcggataaaatcttgagcaaaatgggagaaggtttgggttttctgcaatctgtcgtctcctcttctgctgggtatctccattattattctaatgaagagggctacgagttggattttcgtaggtacatttgagcgtgttttggaatgctgggatcgtgaaacacgtgaatatgttgccataaaagttgtacacagtatccacaagtactgtgatgctgcaatgattgagatagatgtgctcaatcgccttgtagaaaatgaaaaatatagatttctgctacacttggggaatcaaagaaaagtgaaagtgccatgtcaaagttgatgaccagaagcttgctattggaaccctctctattgaaaaatacccctagatagaaattgatttggttttcaataaagagtgtgagctgtcacacacatcgaaaactacacgtgtatttttctttggttacaaggttgagcaaccaatcgaggaagatgaataatggatcttgattctgaagatgaagagaaggagctaaacattccagtaatcaaggaaaatggcaaaggtgatgggaaggaggaccagagaagtgaagagaaggcagttgctgcagcttcaaaatcaagtcttgggcttgaaaaaaagcaaggatgagtatgagtctgatgattctaatgagggagaaggtgaaaccggagaatgagcagatgcggctgttcatggacaacagcatcaagaaacctgcaacatgcaacctgattttaagaaatttgccacctgcaac

SEQ ID NO: 21301 - DNA, 2267 bp, Zea Mays
gttctaccactgtctcctctccgtgacgcacgcccgagatcctctccgcgacacacgcctccctctcctctgccccaccctcctccccacgccatcggcgccgccatcatcggatccggcccaagatgcctccgccccacgcgcccgagtcgtcgaggcacactccttcccgcctccgtcgtccacgcatatctccgcctcacctcggcgcccgagtcgtcgcacgcgttcgcggtggtgtccatcccggcaccggcctcacgcaccgtctacagctcccaactctgctcctctcagttctccctccgcatttcgccttctctcccttcctctccaagcagcgtcctcctcgcctagatccgtacaagcggcaaataacctctccggcggcgagacagatggagtcgacctccggcgaggatgctccgaagcacaacccgattccgtccgcgctcgtctccaacctacagtccgtgctcaccgcccgccgcttgtccgcagccgaggtcagcaccgccgccacagctagcgaggttgaggccttggcttaggaagcagaggcgttcgctgcccccacgggagatgggacgctggcgaggcccatcgtgctactgacctatgccggggggatccggtcggcgggtctcgcggcgctcgtcgacgccctcgttgccgccgaccgctgcgacgtccacgtgtgtgcccccgaatcgtacgtgctgcgacttagaaaaccaaaccacagcgggaccagtgctcggatagggtccgacgacgatgcaagcaaggagtggcgcgcggccgacggggcgcagatcggctcctgcacgtgcagcgcagccgcgtgacagtgaagcagggaggccgcgataggtggcgcagggagggtgcgacggaggcaaagtgcaagcacctggggacttcagaaagaaagagtacaagtctactactgcagaaagcaaggagaatgccaatagaagcagatttcatgtatggatcgggtaatgacctttttgtgttctcctcaactcattatttagctacatatcttattaaatcttaatctttggtcattagctaccagcttgcactattattgtgaaaatccattaactttagtcattgaaatggttagactatcaccacgtaggtgatattagtggcattaagtgattaatctgtggcaaatcctattatcaactattttcttggctaatcattacaatatataatgaagaatactatggcttgaagggatatttatacaattggctatgtatacggtctgcccaggcgcccaacaatgaatgatgtggtgaaggaacttgagatcatcagatagaatgaaggggcacaattgttaaactcagcgtctttatcagttgaacaatttggaaacaaaaagagaagagatccttatgcatttgtctatggatgatggaagcaacaacaacacttttgactacaacagtgggagttcaattaagttgttcacccaaataaaatcttgagcaaaatgggagaaggtttgggttttctgcaatctgtcgtctcctcttctgctgggtatctccattattattctaatgaagagggctacgagttggattttcgtaggtacatttgagcgtgttttggaatgctgggatcgtgaaacacgtgaatatgttgccataaaagttgtacacagtatccacaagtactgtgatgctgcaatgattgagatagatgtgctcaatcgccttgtagaaaatgaaaaatatagatttctgctacacttggggaatcaaagaaaagtgaaagtgccatgtcaaagttgatgaccagaagcttgctattggaaccctctctattgaaaaatacccctagatagaaattgatttggttttcaataaagagtgtgagctgtcacacacatcgaaaactacacgtgtatttttctttggttacaaggttgagcaaccaatcgaggaagatgaatatggatcttgattctgaagatgaagagaaggagctaaacattccagtaatcaaggaaaatggcaaaggtgatgggaaggaggaccagagaagtgaagagaaggcagttgctgcagcttcaaaatcaagtcttgggcttgaaaaaaagcaaggatgagtatgagtctgatgattctaatgagggagaaggtgaaaccggagaatgagcagatgcggctgttcatggacaacagcatcaagaaacctgcaacatgcaacctgattttaagaaatttgccacctgcaac

SEQ ID NO: 21302 - DNA, 1975 bp, Zea Mays
ttctaccactgtctcctctccgtgacgcacgcccgagatcctctccgcgacacacgcctccctctcctctgccccaccctcctccccacgccatcggcgccgccatcatcggatccggcccaagatgcctccgccccacgcgcccgagtcgtcgaggcacactccttcccgcctccgtcgtccacgcatatctccgcctcacctcggcgcccgagtcgtcgcacgcgttcgcggtggtgtccatcccggcaccggcctcacgcaccgtctacagctcccaactctgctcctctcagttctccctccgcatttcgccttctctcccttcctctccaagcagcgtcctcctcgcctagatccgtacaagcggcaaataacctctccggcggcgagacagatggagtcgacctccggcgaggatgctccgaagcacaacccgattccgtccgcgctcgtctccaacctacagtccgtgctcaccgcccgccgcttgtccgcagccgaggtcagcaccgccgccacagctagcgaggttgaggccttggcttaggaagcagaggcgttcgctgcccccacgggagatgggacgctggcgaggcccatcgtgctactgacctatgccggggggatccggtcggcgggtctcgcggcgctcgtcgacgccctcgttgccgccgaccgctgcgacgtccacgtgtgtgcccccgaatcgtacgtgctgcgacttagaaaaccaaaccacagcgggaccagtgctcggatagggtccgacgacgatgcaagcaaggagtggcgcgcggccgacggggcgcagatcggctcctgcacgtgcagcgcagccgcgtgacagtgaagcagggaggccgcgataggtggcgcagggagggtgcgacggaggcaaagtgcaagcacctggggacttcagaaagaaagagtacaagtctactactgcagaaagcaaggagaatgccaatagaagcagatttcatgtatggatcgggcgcccaacaatgaatgatgtggtgaaggaacttgagatcatcagatagaatgaaggggcacaattgttaaactcagcgtctttatcagttgaacaatttggaaacaaaaagagaagagatccttatgcatttgtctatggatgatggaagcaacaacaacacttttgactacaacagtgggagttcaattaagttgttcacccaaataaaatcttgagcaaaatgggagaaggtttgggttttctgcaatctgtcgtctcctcttctgctgggtatctccattattattctaatgaagagggctacgagttggattttcgtaggtacatttgagcgtgttttggaatgctgggatcgtgaaacacgtgaatatgttgccataaaagttgtacacagtatccacaagtactgtgatgctgcaatgattgagatagatgtgctcaatcgccttgtagaaaatgaaaaatatagatttctgctacacttggggaatcaaagaaaagtgaaagtgccatgtcaaagttgatgaccagaagcttgctattggaaccctctctattgaaaaatacccctagatagaaattgatttggttttcaataaagagtgtgagctgtcacacacatcgaaaactacacgtgtatttttctttggttacaaggttgagcaaccaatcgaggaagatgaataatggatcttgattctgaagatgaagagaaggagctaaacattccagtaatcaaggaaaatggcaaaggtgatgggaaggaggaccagagaagtgaagagaaggcagttgctgcagcttcaaaatcaagtcttgggcttgaaaaaaagcaaggatgagtatgagtctgatgattctaatgagggagaaggtgaaaccggagaatgagcagatgcggctgttcatggacaacagcatcaagaaacctgcaacatgcaacctgattttaagaaatttgccacctgcaac

SEQ ID NO: 21303 - DNA, 3017 bp, Zea Mays
ccactgtctcctctccgtgacgcacgcccgagatcctctccgcgacacacgcctccctctcctctgccccaccctcctccccacgccatcggcgccgccatcatcggatccggcccaagatgcctccgccccacgcgcccgagtcgtcgaggcacactccttcccgcctccgtcgtccacgcatatctccgcctcacctcggcgcccgagtcgtcgcacgcgttcgcggtggtgtccatcccggcaccggcctcacgcaccgtctacagctcccaactctgctcctctcagttctccctccgcatttcgccttctctcccttcctctccaagcagcgtcctcctcgcctagatccgtacaagcggcaaataacctctccggcggcgagacagatggagtcgacctccggcgaggatgctccgaagcacaacccgattccgtccgcgctcgtctccaacctacagtccgtgctcaccgcccgccgcttgtccgcagccgaggtcagcaccgccgccacagctagcgaggttgaggccttggcttaggaagcagaggcgttcgctgcccccacgggagatgggacgctggcgaggcccatcgtgctactgacctatgccggggggatccggtcggcgggtctcgcggcgctcgtcgacgccctcgttgccgccgaccgctgcgacgtccacgtgtgtgcccccgaatcgtacgtgctgcgacttagaaaaccaaaccacagcgggaccagtgctcggatagggtccgacgacgatgcaagcaaggagtggcgcgcggccgacggggcgcagatcggctcctgcacgtgcagcgcagccgcgtgacagtgaagcagggaggccgcgataggtggcgcagggagggtgcgacggaggcaaagtgcaagcacctggggacttcaggtaagtagaaaaccaacactgaatttgtcggttctctgttttgtgattgaccgattggtttgttgatctcagaaaattgtttcaccgttaagcaccaatttttgggtaggtcagtgttttgggatgattctcctatgcatcaatagtaaccttgtgcttggcaaagttatttgccctgataatgttgtaggtttagtgaaaagaaatatactgacatatccacctatccatcgatgcccaatggagattgacctctatcaagatttagttatgtgtctcagtagggcaatatttctgtgagttgtatactgtggattcctcatctgcatcatgaattgatcgcactatttatgccctatttttcaaaccatggtttctgtaattctttgcaccatggtatttttctcaaatgattttatctttcacaacccggactgaactcactgaagcagaaagaaagagtacaagtctactactgcagaaagcaaggagaatgccaatagaagcagatttcatgtatggatcgggcgcccaacaatgaatgatgtggtgaaggaacttgagatcatcagatagaatgaaggggcacaattgttaaactcagcgtctttatcagttgaacaatttggaaacaaaaagagaagagatccttatgcatttgtctatggatgatggaagcaacaacaacacttttgactacaacagtgggagttcaattaagttgttcacccaagtagataattgtctccactctttcaacaagttattggagttattatatatgtctgctccatatgaatgccttttcattttagtatcacatctgaaattaccaaccttttatactggcagtgtgataagcattgaataaaagtttttttatatgttgaatattcaacaatatatgtataattttatatatacataaatataatattctcatacgcgtggttgctccgttggtatattgttgaaaggttgttttttacggtacatgtgctgaaatggccatgctttgatctgcctataggttgaaccatataagctttctctcagactcgattatgctgcttacatgatccatttagctgtctttggatttttggggtaactctccaatatctcacatgaggttctttgtgatagctgttacttaatctgtggtgatctatgtaaatgtggcaacacttgcagttcctcgagcccttgtgcatggatatatcgtttagttgtgtctaataatttgtaattagtggcaacatctttttgttattttggttttatctgatttttattgttataagatctcgattgcaaactggcagttagtacacctttaggttttcctttgtcgtatcaagctaataatgtgtgaagcagggttcccattctgatctttagttttttgtgattttaatagcaataacctttttcgcaaaaaagtaacaaactttatgcagtatgcggttcgtatagttcccagtatccttttggacttagatttagttcgatatatggttatgtttattgacagaatgcttttagctttgcagataaaatcttgagcaaaatgggagaaggtttgggttttctgcaatctgtcgtctcctcttctgctgggtatctccattattattctaatgaagagggctacgagttggattttcgtaggtacatttgagcgtgttttggaatgctgggatcgtgaaacacgtgaatatgttgccataaaagttgtacacagtatccacaagtactgtgatgctgcaatgattgagatagatgtgctcaatcgccttgtagaaaatgaaaaatatagatttctgtgagtatctcagagacctaattgcttaaagtataaccctattctgtttttgacttgacagttcctcttcaatttgtcagctgtgtttaaattcagagatggcttgactatcgtaatcatatatgcatggatgtgttactttatgtttgtttgtgtttaatatagaaggctcccttgccttcgttcgatcatgtggtatttgaaagtgatgtctctataaatgaagtaaggcagggcaatgcttatgttactgttgtcagttattagatttt

SEQ ID NO: 21304 - DNA, 1991 bp, Zea Mays
ccactgtctcctctccgtgacgcacgcccgagatcctctccgcgacacacgcctccctctcctctgccccaccctcctccccacgccatcggcgccgccatcatcggatccggcccaagatgcctccgccccacgcgcccgagtcgtcgaggcacactccttcccgcctccgtcgtccacgcatatctccgcctcacctcggcgcccgagtcgtcgcacgcgttcgcggtggtgtccatcccggcaccggcctcacgcaccgtctacagctcccaactctgctcctctcagttctccctccgcatttcgccttctctcccttcctctccaagcagcgtcctcctcgcctagatccgtacaagcggcaaataacctctccggcggcgagacagatggagtcgacctccggcgaggatgctccgaagcacaacccgattccgtccgcgctcgtctccaacctacagtccgtgctcaccgcccgccgcttgtccgcagccgaggtcagcaccgccgccacagctagcgaggttgaggccttggcttaggaagcagaggcgttcgctgcccccacgggagatgggacgctggcgaggcccatcgtgctactgacctatgccggggggatccggtcggcgggtctcgcggcgctcgtcgacgccctcgttgccgccgaccgctgcgacgtccacgtgtgtgcccccgaatcgtacgtgctgcgacttagaaaaccaaaccacagcgggaccagtgctcggatagggtccgacgacgatgcaagcaaggagtggcgcgcggccgacggggcgcagatcggctcctgcacgtgcagcgcagccgcgtgacagtgaagcagggaggccgcgataggtggcgcagggagggtgcgacggaggcaaagtgcaagcacctggggacttcaggtaagtagaaaaccaacactgaatttgtcggttctctgttttgtgattgaccgattggtttgttgatctcagaaaattgtttcaccgttaagcaccaatttttgggtaggtcagtgttttgggatgattctcctatgcatcaatagtaaccttgtgcttggcaaagttatttgccctgataatgttgtaggtttagtgaaaagaaatatactgacatatccacctatccatcgatgcccaatggagattgacctctatcaagatttagttatgtgtctcagtagggcaatatttctgtgagttgtatactgtggattcctcatctgcatcatgaattgatcgcactatttatgccctatttttcaaaccatggtttctgtaattctttgcaccatggtatttttctcaaatgattttatctttcacaacccggactgaactcactgaagcagaaagaaagagtacaagtctactactgcagaaagcaaggagaatgccaatagaagcagatttcatgtatggatcggataaaatcttgagcaaaatgggagaaggtttgggttttctgcaatctgtcgtctcctcttctgctgggtatctccattattattctaatgaagagggctacgagttggattttcgtaggtacatttgagcgtgttttggaatgctgggatcgtgaaacacgtgaatatgttgccataaaagttgtacacagtatccacaagtactgtgatgctgcaatgattgagatagatgtgctcaatcgccttgtagaaaatgaaaaatatagatttctgtgagtatctcagagacctaattgcttaaagtataaccctattctgtttttgacttgacagttcctcttcaatttgtcagctgtgtttaaattcagagatggcttgactatcgtaatcatatatgcatggatgtgttactttatgtttgtttgtgtttaatatagaaggctcccttgccttcgttcgatcatgtggtatttgaaagtgatgtctctataaatgaagtaaggcagggcaatgcttatgttactgttgtcagttattagatttt

SEQ ID NO: 21305 - DNA, 2978 bp, Zea Mays
ccactgtctcctctccgtgacgcacgcccgagatcctctccgcgacacacgcctccctctcctctgccccaccctcctccccacgccatcggcgccgccatcatcggatccggcccaagatgcctccgccccacgcgcccgagtcgtcgaggcacactccttcccgcctccgtcgtccacgcatatctccgcctcacctcggcgcccgagtcgtcgcacgcgttcgcggtggtgtccatcccggcaccggcctcacgcaccgtctacagctcccaactctgctcctctcagttctccctccgcatttcgccttctctcccttcctctccaagcagcgtcctcctcgcctagatccgtacaagcggcaaataacctctccggcggcgagacagatggagtcgacctccggcgaggatgctccgaagcacaacccgattccgtccgcgctcgtctccaacctacagtccgtgctcaccgcccgccgcttgtccgcagccgaggtcagcaccgccgccacagctagcgaggttgaggccttggcttaggaagcagaggcgttcgctgcccccacgggagatgggacgctggcgaggcccatcgtgctactgacctatgccggggggatccggtcggcgggtctcgcggcgctcgtcgacgccctcgttgccgccgaccgctgcgacgtccacgtgtgtgcccccgaatcgtacgtgctgcgacttagaaaaccaaaccacagcgggaccagtgctcggatagggtccgacgacgatgcaagcaaggagtggcgcgcggccgacggggcgcagatcggctcctgcacgtgcagcgcagccgcgtgacagtgaagcagggaggccgcgataggtggcgcagggagggtgcgacggaggcaaagtgcaagcacctggggacttcaggtaagtagaaaaccaacactgaatttgtcggttctctgttttgtgattgaccgattggtttgttgatctcagaaaattgtttcaccgttaagcaccaatttttgggtaggtcagtgttttgggatgattctcctatgcatcaatagtaaccttgtgcttggcaaagttatttgccctgataatgttgtaggtttagtgaaaagaaatatactgacatatccacctatccatcgatgcccaatggagattgacctctatcaagatttagttatgtgtctcagtagggcaatatttctgtgagttgtatactgtggattcctcatctgcatcatgaattgatcgcactatttatgccctatttttcaaaccatggtttctgtaattctttgcaccatggtatttttctcaaatgattttatctttcacaacccggactgaactcactgaagcagaaagaaagagtacaagtctactactgcagaaagcaaggagaatgccaatagaagcagatttcatgtatggatcgggcgcccaacaatgaatgatgtggtgaaggaacttgagatcatcagatagaatgaaggggcacaattgttaaactcagcgtctttatcagttgaacaatttggaaacaaaaagagaagagatccttatgcatttgtctatggatgatggaagcaacaacaacacttttgactacaacagtgggagttcaattaagttgttcacccaaataaaatcttgagcaaaatgggagaaggtttgggttttctgcaatctgtcgtctcctcttctgctgggtatctccattattattctaatgaagagggctacgagttggattttcgtaggtacatttgagcgtgttttggaatgctgggatcgtgaaacacgtgaatatgttgccataaaagttgtacacagtatccacaagtactgtgatgctgcaatgattgagatagatgtgctcaatcgccttgtagaaaatgaaaaatatagatttctgctacacttggggaatcaaagaaaagtgaaagtgccatgtcaaagttgatgaccagaagcttgctattggaaccctctctattgaaaaatacccctagatagaaattgatttggttttcaataaagagtgtgagctgtcacacacatcgaaaactacacgtgtatttttctttggttacaaggttgagcaaccaatcgaggaagatgaataatggatcttgattctgaagatgaagagaaggagctaaacattccagtaatcaaggaaaatggcaaaggtgatgggaaggaggaccagagaagtgaagagaaggcagttgctgcagcttcaaaatcaagtcttgggcttgaaaaaaagcaaggatgagtatgagtctgatgattctaatgagggtgagtgattatctcctgaagaaggcaatgttgtgatttgaagggtatggtgcagaaaagttttgtctgcatgtcatgacagtttcatacaatgcacgggcgaacgcaccgggagcctaccacctcccgtgctcaccattgctgtgtttgatacctgactactactgctgttactttgaatctccggggtgctcatggagtcatggtgcatatgctcatgtttgcagggtgtcagtttttttcatcgtctacttctagagataacaactttagcatgttggttaaagattcttggtgtgctaagcttttcttttttgcttcatttgaaactcaactatatatatggtgccctactttacattttgcaaacacaatctgctcaaaaaaatggaagcttatgtcttcatctgtcatgtgcttcatcagtgtgcttggaattttagccccttcttttgcttctaactaacatagatgcttttgtgttacatgtatttggttaccgaattaggaccatgttttctgtttggatatttcagaactaaaatccccaaacgattcccttatctaaacacttgagtaggggaaacaaccatgttgtgctgcgataagagcgtagctgatatgtgatgtgtaatttgcatctttttaatgtcatgtaac

SEQ ID NO: 21306 - DNA, 3798 bp, Zea Mays
ccactgtctcctctccgtgacgcacgcccgagatcctctccgcgacacacgcctccctctcctctgccccaccctcctccccacgccatcggcgccgccatcatcggatccggcccaagatgcctccgccccacgcgcccgagtcgtcgaggcacactccttcccgcctccgtcgtccacgcatatctccgcctcacctcggcgcccgagtcgtcgcacgcgttcgcggtggtgtccatcccggcaccggcctcacgcaccgtctacagctcccaactctgctcctctcagttctccctccgcatttcgccttctctcccttcctctccaagcagcgtcctcctcgcctagatccgtacaagcggcaaataacctctccggcggcgagacagatggagtcgacctccggcgaggatgctccgaagcacaacccgattccgtccgcgctcgtctccaacctacagtccgtgctcaccgcccgccgcttgtccgcagccgaggtcagcaccgccgccacagctagcgaggttgaggccttggcttaggaagcagaggcgttcgctgcccccacgggagatgggacgctggcgaggcccatcgtgctactgacctatgccggggggatccggtcggcgggtctcgcggcgctcgtcgacgccctcgttgccgccgaccgctgcgacgtccacgtgtgtgcccccgaatcgtacgtgctgcgacttagaaaaccaaaccacagcgggaccagtgctcggatagggtccgacgacgatgcaagcaaggagtggcgcgcggccgacggggcgcagatcggctcctgcacgtgcagcgcagccgcgtgacagtgaagcagggaggccgcgataggtggcgcagggagggtgcgacggaggcaaagtgcaagcacctggggacttcaggtaagtagaaaaccaacactgaatttgtcggttctctgttttgtgattgaccgattggtttgttgatctcagaaaattgtttcaccgttaagcaccaatttttgggtaggtcagtgttttgggatgattctcctatgcatcaatagtaaccttgtgcttggcaaagttatttgccctgataatgttgtaggtttagtgaaaagaaatatactgacatatccacctatccatcgatgcccaatggagattgacctctatcaagatttagttatgtgtctcagtagggcaatatttctgtgagttgtatactgtggattcctcatctgcatcatgaattgatcgcactatttatgccctatttttcaaaccatggtttctgtaattctttgcaccatggtatttttctcaaatgattttatctttcacaacccggactgaactcactgaagcagaaagaaagagtacaagtctactactgcagaaagcaaggagaatgccaatagaagcagatttcatgtatggatcgggcgcccaacaatgaatgatgtggtgaaggaacttgagatcatcagatagaatgaaggggcacaattgttaaactcagcgtctttatcagttgaacaatttggaaacaaaaagagaagagatccttatgcatttgtctatggatgatggaagcaacaacaacacttttgactacaacagtgggagttcaattaagttgttcacccaagtagataattgtctccactctttcaacaagttattggagttattatatatgtctgctccatatgaatgccttttcattttagtatcacatctgaaattaccaaccttttatactggcagtgtgataagcattgaataaaagtttttttatatgttgaatattcaacaatatatgtataattttatatatacataaatataatattctcatacgcgtggttgctccgttggtatattgttgaaaggttgttttttacggtacatgtgctgaaatggccatgctttgatctgcctataggttgaaccatataagctttctctcagactcgattatgctgcttacatgatccatttagctgtctttggatttttggggtaactctccaatatctcacatgaggttctttgtgatagctgttacttaatctgtggtgatctatgtaaatgtggcaacacttgcagttcctcgagcccttgtgcatggatatatcgtttagttgtgtctaataatttgtaattagtggcaacatctttttgttattttggttttatctgatttttattgttataagatctcgattgcaaactggcagttagtacacctttaggttttcctttgtcgtatcaagctaataatgtgtgaagcagggttcccattctgatctttagttttttgtgattttaatagcaataacctttttcgcaaaaaagtaacaaactttatgcagtatgcggttcgtatagttcccagtatccttttggacttagatttagttcgatatatggttatgtttattgacagaatgcttttagctttgcagataaaatcttgagcaaaatgggagaaggtttgggttttctgcaatctgtcgtctcctcttctgctgggtatctccattattattctaatgaagagggctacgagttggattttcgtaggtacatttgagcgtgttttggaatgctgggatcgtgaaacacgtgaatatgttgccataaaagttgtacacagtatccacaagtactgtgatgctgcaatgattgagatagatgtgctcaatcgccttgtagaaaatgaaaaatatagatttctgctacacttggggaatcaaagaaaagtgaaagtgccatgtcaaagttgatgaccagaagcttgctattggaaccctctctattgaaaaatacccctagatagaaattgatttggttttcaataaagagtgtgagctgtcacacacatcgaaaactacacgtgtatttttctttggttacaaggttgagcaaccaatcgaggaagatgaataatggatcttgattctgaagatgaagagaaggagctaaacattccagtaatcaaggaaaatggcaaaggtgatgggaaggaggaccagagaagtgaagagaaggcagttgctgcagcttcaaaatcaagtcttgggcttgaaaaaaagcaaggatgagtatgagtctgatgattctaatgagggtgagtgattatctcctgaagaaggcaatgttgtgatttgaagggtatggtgcagaaaagttttgtctgcatgtcatgacagtttcatacaatgcacgggcgaacgcaccgggagcctaccacctcccgtgctcaccattgctgtgtttgatacctgactactactgctgttactttgaatctccggggtgctcatggagtcatggtgcatatgctcatgtttgcagggtgtcagtttttttcatcgtctacttctagagataacaactttagcatgttggttaaagattcttggtgtgctaagcttttcttttttgcttcatttgaaactcaactatatatatggtgccctactttacattttgcaaacacaatctgctcaaaaaaatggaagcttatgtcttcatctgtcatgtgcttcatcagtgtgcttggaattttagccccttcttttgcttctaactaacatagatgcttttgtgttacatgtatttggttaccgaattaggaccatgttttctgtttggatatttcagaactaaaatccccaaacgattcccttatctaaacacttgagtaggggaaacaaccatgttgtgctgcgataagagcgtagctgatatgtgatgtgtaatttgcatctttttaatgtcatgtaac

SEQ ID NO: 21307 - DNA, 3352 bp, Zea Mays
ccactgtctcctctccgtgacgcacgcccgagatcctctccgcgacacacgcctccctctcctctgccccaccctcctccccacgccatcggcgccgccatcatcggatccggcccaagatgcctccgccccacgcgcccgagtcgtcgaggcacactccttcccgcctccgtcgtccacgcatatctccgcctcacctcggcgcccgagtcgtcgcacgcgttcgcggtggtgtccatcccggcaccggcctcacgcaccgtctacagctcccaactctgctcctctcagttctccctccgcatttcgccttctctcccttcctctccaagcagcgtcctcctcgcctagatccgtacaagcggcaaataacctctccggcggcgagacagatggagtcgacctccggcgaggatgctccgaagcacaacccgattccgtccgcgctcgtctccaacctacagtccgtgctcaccgcccgccgcttgtccgcagccgaggtcagcaccgccgccacagctagcgaggttgaggccttggcttaggaagcagaggcgttcgctgcccccacgggagatgggacgctggcgaggcccatcgtgctactgacctatgccggggggatccggtcggcgggtctcgcggcgctcgtcgacgccctcgttgccgccgaccgctgcgacgtccacgtgtgtgcccccgaatcgtacgtgctgcgacttagaaaaccaaaccacagcgggaccagtgctcggatagggtccgacgacgatgcaagcaaggagtggcgcgcggccgacggggcgcagatcggctcctgcacgtgcagcgcagccgcgtgacagtgaagcagggaggccgcgataggtggcgcagggagggtgcgacggaggcaaagtgcaagcacctggggacttcaggtaagtagaaaaccaacactgaatttgtcggttctctgttttgtgattgaccgattggtttgttgatctcagaaaattgtttcaccgttaagcaccaatttttgggtaggtcagtgttttgggatgattctcctatgcatcaatagtaaccttgtgcttggcaaagttatttgccctgataatgttgtaggtttagtgaaaagaaatatactgacatatccacctatccatcgatgcccaatggagattgacctctatcaagatttagttatgtgtctcagtagggcaatatttctgtgagttgtatactgtggattcctcatctgcatcatgaattgatcgcactatttatgccctatttttcaaaccatggtttctgtaattctttgcaccatggtatttttctcaaatgattttatctttcacaacccggactgaactcactgaagcagaaagaaagagtacaagtctactactgcagaaagcaaggagaatgccaatagaagcagatttcatgtatggatcgggcgcccaacaatgaatgatgtggtgaaggaacttgagatcatcagatagaatgaaggggcacaattgttaaactcagcgtctttatcagttgaacaatttggaaacaaaaagagaagagatccttatgcatttgtctatggatgatggaagcaacaacaacacttttgactacaacagtgggagttcaattaagttgttcacccaagtagataattgtctccactctttcaacaagttattggagttattatatatgtctgctccatatgaatgccttttcattttagtatcacatctgaaattaccaaccttttatactggcagtgtgataagcattgaataaaagtttttttatatgttgaatattcaacaatatatgtataattttatatatacataaatataatattctcatacgcgtggttgctccgttggtatattgttgaaaggttgttttttacggtacatgtgctgaaatggccatgctttgatctgcctataggttgaaccatataagctttctctcagactcgattatgctgcttacatgatccatttagctgtctttggatttttgggataaaatcttgagcaaaatgggagaaggtttgggttttctgcaatctgtcgtctcctcttctgctgggtatctccattattattctaatgaagagggctacgagttggattttcgtaggtacatttgagcgtgttttggaatgctgggatcgtgaaacacgtgaatatgttgccataaaagttgtacacagtatccacaagtactgtgatgctgcaatgattgagatagatgtgctcaatcgccttgtagaaaatgaaaaatatagatttctgctacacttggggaatcaaagaaaagtgaaagtgccatgtcaaagttgatgaccagaagcttgctattggaaccctctctattgaaaaatacccctagatagaaattgatttggttttcaataaagagtgtgagctgtcacacacatcgaaaactacacgtgtatttttctttggttacaaggttgagcaaccaatcgaggaagatgaataatggatcttgattctgaagatgaagagaaggagctaaacattccagtaatcaaggaaaatggcaaaggtgatgggaaggaggaccagagaagtgaagagaaggcagttgctgcagcttcaaaatcaagtcttgggcttgaaaaaaagcaaggatgagtatgagtctgatgattctaatgagggtgagtgattatctcctgaagaaggcaatgttgtgatttgaagggtatggtgcagaaaagttttgtctgcatgtcatgacagtttcatacaatgcacgggcgaacgcaccgggagcctaccacctcccgtgctcaccattgctgtgtttgatacctgactactactgctgttactttgaatctccggggtgctcatggagtcatggtgcatatgctcatgtttgcagggtgtcagtttttttcatcgtctacttctagagataacaactttagcatgttggttaaagattcttggtgtgctaagcttttcttttttgcttcatttgaaactcaactatatatatggtgccctactttacattttgcaaacacaatctgctcaaaaaaatggaagcttatgtcttcatctgtcatgtgcttcatcagtgtgcttggaattttagccccttcttttgcttctaactaacatagatgcttttgtgttacatgtatttggttaccgaattaggaccatgttttctgtttggatatttcagaactaaaatccccaaacgattcccttatctaaacacttgagtaggggaaacaaccatgttgtgctgcgataagagcgtagctgatatgtgatgtgtaatttgcatctttttaatgtcatgtaac

SEQ ID NO: 21308 - DNA, 2320 bp, Zea Mays
ccactgtctcctctccgtgacgcacgcccgagatcctctccgcgacacacgcctccctctcctctgccccaccctcctccccacgccatcggcgccgccatcatcggatccggcccaagatgcctccgccccacgcgcccgagtcgtcgaggcacactccttcccgcctccgtcgtccacgcatatctccgcctcacctcggcgcccgagtcgtcgcacgcgttcgcggtggtgtccatcccggcaccggcctcacgcaccgtctacagctcccaactctgctcctctcagttctccctccgcatttcgccttctctcccttcctctccaagcagcgtcctcctcgcctagatccgtacaagcggcaaataacctctccggcggcgagacagatggagtcgacctccggcgaggatgctccgaagcacaacccgattccgtccgcgctcgtctccaacctacagtccgtgctcaccgcccgccgcttgtccgcagccgaggtcagcaccgccgccacagctagcgaggttgaggccttggcttaggaagcagaggcgttcgctgcccccacgggagatgggacgctggcgaggcccatcgtgctactgacctatgccggggggatccggtcggcgggtctcgcggcgctcgtcgacgccctcgttgccgccgaccgctgcgacgtccacgtgtgtgcccccgaatcgtacgtgctgcgacttagaaaaccaaaccacagcgggaccagtgctcggatagggtccgacgacgatgcaagcaaggagtggcgcgcggccgacggggcgcagatcggctcctgcacgtgcagcgcagccgcgtgacagtgaagcagggaggccgcgataggtggcgcagggagggtgcgacggaggcaaagtgcaagcacctggggacttcagaaagaaagagtacaagtctactactgcagaaagcaaggagaatgccaatagaagcagatttcatgtatggatcggataaaatcttgagcaaaatgggagaaggtttgggttttctgcaatctgtcgtctcctcttctgctgggtatctccattattattctaatgaagagggctacgagttggattttcgtaggtacatttgagcgtgttttggaatgctgggatcgtgaaacacgtgaatatgttgccataaaagttgtacacagtatccacaagtactgtgatgctgcaatgattgagatagatgtgctcaatcgccttgtagaaaatgaaaaatatagatttctgctacacttggggaatcaaagaaaagtgaaagtgccatgtcaaagttgatgaccagaagcttgctattggaaccctctctattgaaaaatacccctagatagaaattgatttggttttcaataaagagtgtgagctgtcacacacatcgaaaactacacgtgtatttttctttggttacaaggttgagcaaccaatcgaggaagatgaataatggatcttgattctgaagatgaagagaaggagctaaacattccagtaatcaaggaaaatggcaaaggtgatgggaaggaggaccagagaagtgaagagaaggcagttgctgcagcttcaaaatcaagtcttgggcttgaaaaaaagcaaggatgagtatgagtctgatgattctaatgagggtgagtgattatctcctgaagaaggcaatgttgtgatttgaagggtatggtgcagaaaagttttgtctgcatgtcatgacagtttcatacaatgcacgggcgaacgcaccgggagcctaccacctcccgtgctcaccattgctgtgtttgatacctgactactactgctgttactttgaatctccggggtgctcatggagtcatggtgcatatgctcatgtttgcagggtgtcagtttttttcatcgtctacttctagagataacaactttagcatgttggttaaagattcttggtgtgctaagcttttcttttttgcttcatttgaaactcaactatatatatggtgccctactttacattttgcaaacacaatctgctcaaaaaaatggaagcttatgtcttcatctgtcatgtgcttcatcagtgtgcttggaattttagccccttcttttgcttctaactaacatagatgcttttgtgttacatgtatttggttaccgaattaggaccatgttttctgtttggatatttcagaactaaaatccccaaacgattcccttatctaaacacttgagtaggggaaacaaccatgttgtgctgcgataagagcgtagctgatatgtgatgtgtaatttgcatctttttaatgtcatgtaac

SEQ ID NO: 21309 - DNA, 3017 bp, Zea Mays
ccactgtctcctctccgtgacgcacgcccgagatcctctccgcgacacacgcctccctctcctctgccccaccctcctccccacgccatcggcgccgccatcatcggatccggcccaagatgcctccgccccacgcgcccgagtcgtcgaggcacactccttcccgcctccgtcgtccacgcatatctccgcctcacctcggcgcccgagtcgtcgcacgcgttcgcggtggtgtccatcccggcaccggcctcacgcaccgtctacagctcccaactctgctcctctcagttctccctccgcatttcgccttctctcccttcctctccaagcagcgtcctcctcgcctagatccgtacaagcggcaaataacctctccggcggcgagacagatggagtcgacctccggcgaggatgctccgaagcacaacccgattccgtccgcgctcgtctccaacctacagtccgtgctcaccgcccgccgcttgtccgcagccgaggtcagcaccgccgccacagctagcgaggttgaggccttggcttaggaagcagaggcgttcgctgcccccacgggagatgggacgctggcgaggcccatcgtgctactgacctatgccggggggatccggtcggcgggtctcgcggcgctcgtcgacgccctcgttgccgccgaccgctgcgacgtccacgtgtgtgcccccgaatcgtacgtgctgcgacttagaaaaccaaaccacagcgggaccagtgctcggatagggtccgacgacgatgcaagcaaggagtggcgcgcggccgacggggcgcagatcggctcctgcacgtgcagcgcagccgcgtgacagtgaagcagggaggccgcgataggtggcgcagggagggtgcgacggaggcaaagtgcaagcacctggggacttcaggtaagtagaaaaccaacactgaatttgtcggttctctgttttgtgattgaccgattggtttgttgatctcagaaaattgtttcaccgttaagcaccaatttttgggtaggtcagtgttttgggatgattctcctatgcatcaatagtaaccttgtgcttggcaaagttatttgccctgataatgttgtaggtttagtgaaaagaaatatactgacatatccacctatccatcgatgcccaatggagattgacctctatcaagatttagttatgtgtctcagtagggcaatatttctgtgagttgtatactgtggattcctcatctgcatcatgaattgatcgcactatttatgccctatttttcaaaccatggtttctgtaattctttgcaccatggtatttttctcaaatgattttatctttcacaacccggactgaactcactgaagcagaaagaaagagtacaagtctactactgcagaaagcaaggagaatgccaatagaagcagatttcatgtatggatcggggatatttatacaattggctatgtatacggtctgcccaggcgcccaacaatgaatgatgtggtgaaggaacttgagatcatcagatagaatgaaggggcacaattgttaaactcagcgtctttatcagttgaacaatttggaaacaaaaagagaagagatccttatgcatttgtctatggatgatggaagcaacaacaacacttttgactacaacagtgggagttcaattaagttgttcacccaaataaaatcttgagcaaaatgggagaaggtttgggttttctgcaatctgtcgtctcctcttctgctgggtatctccattattattctaatgaagagggctacgagttggattttcgtaggtacatttgagcgtgttttggaatgctgggatcgtgaaacacgtgaatatgttgccataaaagttgtacacagtatccacaagtactgtgatgctgcaatgattgagatagatgtgctcaatcgccttgtagaaaatgaaaaatatagatttctgctacacttggggaatcaaagaaaagtgaaagtgccatgtcaaagttgatgaccagaagcttgctattggaaccctctctattgaaaaatacccctagatagaaattgatttggttttcaataaagagtgtgagctgtcacacacatcgaaaactacacgtgtatttttctttggttacaaggttgagcaaccaatcgaggaagatgaataatggatcttgattctgaagatgaagagaaggagctaaacattccagtaatcaaggaaaatggcaaaggtgatgggaaggaggaccagagaagtgaagagaaggcagttgctgcagcttcaaaatcaagtcttgggcttgaaaaaaagcaaggatgagtatgagtctgatgattctaatgagggtgagtgattatctcctgaagaaggcaatgttgtgatttgaagggtatggtgcagaaaagttttgtctgcatgtcatgacagtttcatacaatgcacgggcgaacgcaccgggagcctaccacctcccgtgctcaccattgctgtgtttgatacctgactactactgctgttactttgaatctccggggtgctcatggagtcatggtgcatatgctcatgtttgcagggtgtcagtttttttcatcgtctacttctagagataacaactttagcatgttggttaaagattcttggtgtgctaagcttttcttttttgcttcatttgaaactcaactatatatatggtgccctactttacattttgcaaacacaatctgctcaaaaaaatggaagcttatgtcttcatctgtcatgtgcttcatcagtgtgcttggaattttagccccttcttttgcttctaactaacatagatgcttttgtgttacatgtatttggttaccgaattaggaccatgttttctgtttggatatttcagaactaaaatccccaaacgattcccttatctaaacacttgagtaggggaaacaaccatgttgtgctgcgataagagcgtagctgatatgtgatgtgtaatttgcatctttttaatgtcatgtaac

SEQ ID NO: 21310 - DNA, 2282 bp, Zea Mays
ccactgtctcctctccgtgacgcacgcccgagatcctctccgcgacacacgcctccctctcctctgccccaccctcctccccacgccatcggcgccgccatcatcggatccggcccaagatgcctccgccccacgcgcccgagtcgtcgaggcacactccttcccgcctccgtcgtccacgcatatctccgcctcacctcggcgcccgagtcgtcgcacgcgttcgcggtggtgtccatcccggcaccggcctcacgcaccgtctacagctcccaactctgctcctctcagttctccctccgcatttcgccttctctcccttcctctccaagcagcgtcctcctcgcctagatccgtacaagcggcaaataacctctccggcggcgagacagatggagtcgacctccggcgaggatgctccgaagcacaacccgattccgtccgcgctcgtctccaacctacagtccgtgctcaccgcccgccgcttgtccgcagccgaggtcagcaccgccgccacagctagcgaggttgaggccttggcttaggaagcagaggcgttcgctgcccccacgggagatgggacgctggcgaggcccatcgtgctactgacctatgccggggggatccggtcggcgggtctcgcggcgctcgtcgacgccctcgttgccgccgaccgctgcgacgtccacgtgtgtgcccccgaatcgtacgtgctgcgacttagaaaaccaaaccacagcgggaccagtgctcggatagggtccgacgacgatgcaagcaaggagtggcgcgcggccgacggggcgcagatcggctcctgcacgtgcagcgcagccgcgtgacagtgaagcagggaggccgcgataggtggcgcagggagggtgcgacggaggcaaagtgcaagcacctggggacttcagaaagaaagagtacaagtctactactgcagaaagcaaggagaatgccaatagaagcagatttcatgtatggatcggataaaatcttgagcaaaatgggagaaggtttgggttttctgcaatctgtcgtctcctcttctgctgggtatctccattattattctaatgaagagggctacgagttggattttcgtaggtacatttgagcgtgttttggaatgctgggatcgtgaaacacgtgaatatgttgccataaaagttgtacacagtatccacaagtactgtgatgctgcaatgattgagatagatgtgctcaatcgccttgtagaaaatgaaaaatatagatttctgtgagtatctcagagacctaattgcttaaagtataaccctattctgtttttgacttgacagttcctcttcaatttgtcagctgtgtttaaattcagagatggcttgactatcgtaatcatatatgcatggatgtgttactttatgtttgtttgtgtttaatatagaaggctcccttgccttcgttcgatcatgtggtatttgaaagtgatgtctctataaatgaagtaaggcagggcaatgcttatgttactgttgtcagttattagatttttaaaccaagcatatgtcaatgtgtcctgtttcaatagggtcttattataggacgtgatgccactgaattaggatgtttgttcttttgctacctttgttaaacaacatcagatcattcgtattgtatccttcctcggattgcttcttttgttctactacaaatatgctcaacatggcaggcaggggtcaagcctggacccactgtcaagtgtgtgcttggacatgactttgtcctgcactttctagtgctacacttggggaatcaaagaaaagtgaaagtgccatgtcaaagttgatgaccagaagcttgctattggaaccctctctattgaaaaatacccctagatagaaattgatttggttttcaataaagagtgtgagctgtcacacacatcgaaaactacacgtgtatttttctttggttacaaggttgagcaaccaatcgaggaagatgaataatggatcttgattctgaagatgaagagaaggagctaaacattccagtaatcaaggaaaatggcaaaggtgatgggaaggaggaccagagaagtgaagagaaggcagttgctgcagcttcaaaatcaagtcttgggcttgaaaaaaagcaaggatgagtatgagtctgatgattctaatgagggagaaggtgaaaccggagaatgagcagatgcggctgttcatggacaacagcatcaagaaacctgcaacatgcaacctgattttaagaaatttgccacctgcaac

SEQ ID NO: 21311 - DNA, 1978 bp, Zea Mays
ccactgtctcctctccgtgacgcacgcccgagatcctctccgcgacacacgcctccctctcctctgccccaccctcctccccacgccatcggcgccgccatcatcggatccggcccaagatgcctccgccccacgcgcccgagtcgtcgaggcacactccttcccgcctccgtcgtccacgcatatctccgcctcacctcggcgcccgagtcgtcgcacgcgttcgcggtggtgtccatcccggcaccggcctcacgcaccgtctacagctcccaactctgctcctctcagttctccctccgcatttcgccttctctcccttcctctccaagcagcgtcctcctcgcctagatccgtacaagcggcaaataacctctccggcggcgagacagatggagtcgacctccggcgaggatgctccgaagcacaacccgattccgtccgcgctcgtctccaacctacagtccgtgctcaccgcccgccgcttgtccgcagccgaggtcagcaccgccgccacagctagcgaggttgaggccttggcttaggaagcagaggcgttcgctgcccccacgggagatgggacgctggcgaggcccatcgtgctactgacctatgccggggggatccggtcggcgggtctcgcggcgctcgtcgacgccctcgttgccgccgaccgctgcgacgtccacgtgtgtgcccccgaatcgtacgtgctgcgacttagaaaaccaaaccacagcgggaccagtgctcggatagggtccgacgacgatgcaagcaaggagtggcgcgcggccgacggggcgcagatcggctcctgcacgtgcagcgcagccgcgtgacagtgaagcagggaggccgcgataggtggcgcagggagggtgcgacggaggcaaagtgcaagcacctggggacttcagaaagaaagagtacaagtctactactgcagaaagcaaggagaatgccaatagaagcagatttcatgtatggatcgggcgcccaacaatgaatgatgtggtgaaggaacttgagatcatcagatagaatgaaggggcacaattgttaaactcagcgtctttatcagttgaacaatttggaaacaaaaagagaagagatccttatgcatttgtctatggatgatggaagcaacaacaacacttttgactacaacagtgggagttcaattaagttgttcacccaactttgcagataaaatcttgagcaaaatgggagaaggtttgggttttctgcaatctgtcgtctcctcttctgctgggtatctccattattattctaatgaagagggctacgagttggattttcgtaggtacatttgagcgtgttttggaatgctgggatcgtgaaacacgtgaatatgttgccataaaagttgtacacagtatccacaagtactgtgatgctgcaatgattgagatagatgtgctcaatcgccttgtagaaaatgaaaaatatagatttctgctacacttggggaatcaaagaaaagtgaaagtgccatgtcaaagttgatgaccagaagcttgctattggaaccctctctattgaaaaatacccctagatagaaattgatttggttttcaataaagagtgtgagctgtcacacacatcgaaaactacacgtgtatttttctttggttacaaggttgagcaaccaatcgaggaagatgaataatggatcttgattctgaagatgaagagaaggagctaaacattccagtaatcaaggaaaatggcaaaggtgatgggaaggaggaccagagaagtgaagagaaggcagttgctgcagcttcaaaatcaagtcttgggcttgaaaaaaagcaaggatgagtatgagtctgatgattctaatgagggagaaggtgaaaccggagaatgagcagatgcggctgttcatggacaacagcatcaagaaacctgcaacatgcaacctgattttaagaaatttgccacctgcaac

SEQ ID NO: 21312 - DNA, 2331 bp, Zea Mays
ccactgtctcctctccgtgacgcacgcccgagatcctctccgcgacacacgcctccctctcctctgccccaccctcctccccacgccatcggcgccgccatcatcggatccggcccaagatgcctccgccccacgcgcccgagtcgtcgaggcacactccttcccgcctccgtcgtccacgcatatctccgcctcacctcggcgcccgagtcgtcgcacgcgttcgcggtggtgtccatcccggcaccggcctcacgcaccgtctacagctcccaactctgctcctctcagttctccctccgcatttcgccttctctcccttcctctccaagcagcgtcctcctcgcctagatccgtacaagcggcaaataacctctccggcggcgagacagatggagtcgacctccggcgaggatgctccgaagcacaacccgattccgtccgcgctcgtctccaacctacagtccgtgctcaccgcccgccgcttgtccgcagccgaggtcagcaccgccgccacagctagcgaggttgaggccttggcttaggaagcagaggcgttcgctgcccccacgggagatgggacgctggcgaggcccatcgtgctactgacctatgccggggggatccggtcggcgggtctcgcggcgctcgtcgacgccctcgttgccgccgaccgctgcgacgtccacgtgtgtgcccccgaatcgtacgtgctgcgacttagaaaaccaaaccacagcgggaccagtgctcggatagggtccgacgacgatgcaagcaaggagtggcgcgcggccgacggggcgcagatcggctcctgcacgtgcagcgcagccgcgtgacagtgaagcagggaggccgcgataggtggcgcagggagggtgcgacggaggcaaagtgcaagcacctggggacttcaggtaagtagaaaaccaacactgaatttgtcggttctctgttttgtgattgaccgattggtttgttgatctcagaaaattgtttcaccgttaagcaccaatttttgggtaggtcagtgttttgggatgattctcctatgcatcaatagtaaccttgtgcttggcaaagttatttgccctgataatgttgtaggtttagtgaaaagaaatatactgacatatccacctatccatcgatgcccaatggagattgacctctatcaagatttagttatgtgtctcagtagggcaatatttctgtgagttgtatactgtggattcctcatctgcatcatgaattgatcgcactatttatgccctatttttcaaaccatggtttctgtaattctttgcaccatggtatttttctcaaatgattttatctttcacaacccggactgaactcactgaagcagaaagaaagagtacaagtctactactgcagaaagcaaggagaatgccaatagaagcagatttcatgtatggatcgggcgcccaacaatgaatgatgtggtgaaggaacttgagatcatcagatagaatgaaggggcacaattgttaaactcagcgtctttatcagttgaacaatttggaaacaaaaagagaagagatccttatgcatttgtctatggatgatggaagcaacaacaacacttttgactacaacagtgggagttcaattaagttgttcacccaaataaaatcttgagcaaaatgggagaaggtacatttgagcgtgttttggaatgctgggatcgtgaaacacgtgaatatgttgccataaaagttgtacacagtatccacaagtactgtgatgctgcaatgattgagatagatgtgctcaatcgccttgtagaaaatgaaaaatatagatttctgctacacttggggaatcaaagaaaagtgaaagtgccatgtcaaagttgatgaccagaagcttgctattggaaccctctctattgaaaaatacccctagatagaaattgatttggttttcaataaagagtgtgagctgtcacacacatcgaaaactacacgtgtatttttctttggttacaaggttgagcaaccaatcgaggaagatgaataatggatcttgattctgaagatgaagagaaggagctaaacattccagtaatcaaggaaaatggcaaaggtgatgggaaggaggaccagagaagtgaagagaaggcagttgctgcagcttcaaaatcaagtcttgggcttgaaaaaaagcaaggatgagtatgagtctgatgattctaatgagggagaaggtgaaaccggagaatgagcagatgcggctgttcatggacaacagcatcaagaaacctgcaacatgcaacctgattttaagaaatttgccacctgcaac

SEQ ID NO: 21313 - DNA, 3231 bp, Zea Mays
ccactgtctcctctccgtgacgcacgcccgagatcctctccgcgacacacgcctccctctcctctgccccaccctcctccccacgccatcggcgccgccatcatcggatccggcccaagatgcctccgccccacgcgcccgagtcgtcgaggcacactccttcccgcctccgtcgtccacgcatatctccgcctcacctcggcgcccgagtcgtcgcacgcgttcgcggtggtgtccatcccggcaccggcctcacgcaccgtctacagctcccaactctgctcctctcagttctccctccgcatttcgccttctctcccttcctctccaagcagcgtcctcctcgcctagatccgtacaagcggcaaataacctctccggcggcgagacagatggagtcgacctccggcgaggatgctccgaagcacaacccgattccgtccgcgctcgtctccaacctacagtccgtgctcaccgcccgccgcttgtccgcagccgaggtcagcaccgccgccacagctagcgaggttgaggccttggcttaggaagcagaggcgttcgctgcccccacgggagatgggacgctggcgaggcccatcgtgctactgacctatgccggggggatccggtcggcgggtctcgcggcgctcgtcgacgccctcgttgccgccgaccgctgcgacgtccacgtgtgtgcccccgaatcgtacgtgctgcgacttagaaaaccaaaccacagcgggaccagtgctcggatagggtccgacgacgatgcaagcaaggagtggcgcgcggccgacggggcgcagatcggctcctgcacgtgcagcgcagccgcgtgacagtgaagcagggaggccgcgataggtggcgcagggagggtgcgacggaggcaaagtgcaagcacctggggacttcaggtaagtagaaaaccaacactgaatttgtcggttctctgttttgtgattgaccgattggtttgttgatctcagaaaattgtttcaccgttaagcaccaatttttgggtaggtcagtgttttgggatgattctcctatgcatcaatagtaaccttgtgcttggcaaagttatttgccctgataatgttgtaggtttagtgaaaagaaatatactgacatatccacctatccatcgatgcccaatggagattgacctctatcaagatttagttatgtgtctcagtagggcaatatttctgtgagttgtatactgtggattcctcatctgcatcatgaattgatcgcactatttatgccctatttttcaaaccatggtttctgtaattctttgcaccatggtatttttctcaaatgattttatctttcacaacccggactgaactcactgaagcagaaagaaagagtacaagtctactactgcagaaagcaaggagaatgccaatagaagcagatttcatgcgcccaacaatgaatgatgtggtgaaggaacttgagatcatcagatagaatgaaggggcacaattgttaaactcagcgtctttatcagttgaacaatttggaaacaaaaagagaagagatccttatgcatttgtctatggatgatggaagcaacaacaacacttttgactacaacagtgggagttcaattaagttgttcacccaagtagataattgtctccactctttcaacaagttattggagttattatatatgtctgctccatatgaatgccttttcattttagtatcacatctgaaattaccaaccttttatactggcagtgtgataagcattgaataaaagtttttttatatgttgaatattcaacaatatatgtataattttatatatacataaatataatattctcatacgcgtggttgctccgttggtatattgttgaaaggttgttttttacggtacatgtgctgaaatggccatgctttgatctgcctataggttgaaccatataagctttctctcagactcgattatgctgcttacatgatccatttagctgtctttggatttttggggtaactctccaatatctcacatgaggttctttgtgatagctgttacttaatctgtggtgatctatgtaaatgtggcaacacttgcagttcctcgagcccttgtgcatggatatatcgtttagttgtgtctaataatttgtaattagtggcaacatctttttgttattttggttttatctgatttttattgttataagatctcgattgcaaactggcagttagtacacctttaggttttcctttgtcgtatcaagctaataatgtgtgaagcagggttcccattctgatctttagttttttgtgattttaatagcaataacctttttcgcaaaaaagtaacaaactttatgcagtatgcggttcgtatagttcccagtatccttttggacttagatttagttcgatatatggttatgtttattgacagaatgcttttagctttgcagataaaatcttgagcaaaatgggagaaggtttgggttttctgcaatctgtcgtctcctcttctgctgggtatctccattattattctaatgaagagggctacgagttggattttcgtaggtacatttgagcgtgttttggaatgctgggatcgtgaaacacgtgaatatgttgccataaaagttgtacacagtatccacaagtactgtgatgctgcaatgattgagatagatgtgctcaatcgccttgtagaaaatgaaaaatatagatttctgctacacttggggaatcaaagaaaagtgaaagtgccatgtcaaagttgatgaccagaagcttgctattggaaccctctctattgaaaaatacccctagatagaaattgatttggttttcaataaagagtgtgagctgtcacacacatcgaaaactacacgtgtatttttctttggttacaaggttgagcaaccaatcgaggaagatgaataatggatcttgattctgaagatgaagagaaggagctaaacattccagtaatcaaggaaaatggcaaaggtgatgggaaggaggaccagagaagtgaagagaaggcagttgctgcagcttcaaaatcaagtcttgggcttgaaaaaaagcaaggatgagtatgagtctgatgattctaatgagggagaaggtgaaaccggagaatgagcagatgcggctgttcatggacaacagcatcaagaaacctgcaacatgcaacctgattttaagaaatttgccacctgcaac

SEQ ID NO: 21314 - DNA, 2344 bp, Zea Mays
ccactgtctcctctccgtgacgcacgcccgagatcctctccgcgacacacgcctccctctcctctgccccaccctcctccccacgccatcggcgccgccatcatcggatccggcccaagatgcctccgccccacgcgcccgagtcgtcgaggcacactccttcccgcctccgtcgtccacgcatatctccgcctcacctcggcgcccgagtcgtcgcacgcgttcgcggtggtgtccatcccggcaccggcctcacgcaccgtctacagctcccaactctgctcctctcagttctccctccgcatttcgccttctctcccttcctctccaagcagcgtcctcctcgcctagatccgtacaagcggcaaataacctctccggcggcgagacagatggagtcgacctccggcgaggatgctccgaagcacaacccgattccgtccgcgctcgtctccaacctacagtccgtgctcaccgcccgccgcttgtccgcagccgaggtcagcaccgccgccacagctagcgaggttgaggccttggcttaggaagcagaggcgttcgctgcccccacgggagatgggacgctggcgaggcccatcgtgctactgacctatgccggggggatccggtcggcgggtctcgcggcgctcgtcgacgccctcgttgccgccgaccgctgcgacgtccacgtgtgtgcccccgaatcgtacgtgctgcgacttagaaaaccaaaccacagcgggaccagtgctcggatagggtccgacgacgatgcaagcaaggagtggcgcgcggccgacggggcgcagatcggctcctgcacgtgcagcgcagccgcgtgacagtgaagcagggaggccgcgataggtggcgcagggagggtgcgacggaggcaaagtgcaagcacctggggacttcagaaagaaagagtacaagtctactactgcagaaagcaaggagaatgccaatagaagcagatttcatgtatggatcgggcgcccaacaatgaatgatgtggtgaaggaacttgagatcatcagatagaatgaaggggcacaattgttaaactcagcgtctttatcagttgaacaatttggaaacaaaaagagaagagatccttatgcatttgtctatggatgatggaagcaacaacaacacttttgactacaacagtgggagttcaattaagttgttcacccaagtagataattgtctccactctttcaacaagttattggagttattatatatgtctgctccatatgaatgccttttcattttagtatcacatctgaaattaccaaccttttatactggcagtgtgataagcattgaataaaagtttttttatatgttgaatattcaacaatatatgtataattttatatatacataaatataatattctcatacgcgtggttgctccgttggtatattgttgaaaggttgttttttacggtacatgtgctgaaatggccatgctttgatctgcctataggttgaaccatataagctttctctcagactcgattatgctgcttacatgatccatttagctgtctttggatttttgggataaaatcttgagcaaaatgggagaaggtttgggttttctgcaatctgtcgtctcctcttctgctgggtatctccattattattctaatgaagagggctacgagttggattttcgtaggtacatttgagcgtgttttggaatgctgggatcgtgaaacacgtgaatatgttgccataaaagttgtacacagtatccacaagtactgtgatgctgcaatgattgagatagatgtgctcaatcgccttgtagaaaatgaaaaatatagatttctgctacacttggggaatcaaagaaaagtgaaagtgccatgtcaaagttgatgaccagaagcttgctattggaaccctctctattgaaaaatacccctagatagaaattgatttggttttcaataaagagtgtgagctgtcacacacatcgaaaactacacgtgtatttttctttggttacaaggttgagcaaccaatcgaggaagatgaataatggatcttgattctgaagatgaagagaaggagctaaacattccagtaatcaaggaaaatggcaaaggtgatgggaaggaggaccagagaagtgaagagaaggcagttgctgcagcttcaaaatcaagtcttgggcttgaaaaaaagcaaggatgagtatgagtctgatgattctaatgagggagaaggtgaaaccggagaatgagcagatgcggctgttcatggacaacagcatcaagaaacctgcaacatgcaacctgattttaagaaatttgccacctgcaac

SEQ ID NO: 21315 - DNA, 2260 bp, Zea Mays
ccactgtctcctctccgtgacgcacgcccgagatcctctccgcgacacacgcctccctctcctctgccccaccctcctccccacgccatcggcgccgccatcatcggatccggcccaagatgcctccgccccacgcgcccgagtcgtcgaggcacactccttcccgcctccgtcgtccacgcatatctccgcctcacctcggcgcccgagtcgtcgcacgcgttcgcggtggtgtccatcccggcaccggcctcacgcaccgtctacagctcccaactctgctcctctcagttctccctccgcatttcgccttctctcccttcctctccaagcagcgtcctcctcgcctagatccgtacaagcggcaaataacctctccggcggcgagacagatggagtcgacctccggcgaggatgctccgaagcacaacccgattccgtccgcgctcgtctccaacctacagtccgtgctcaccgcccgccgcttgtccgcagccgaggtcagcaccgccgccacagctagcgaggttgaggccttggcttaggaagcagaggcgttcgctgcccccacgggagatgggacgctggcgaggcccatcgtgctactgacctatgccggggggatccggtcggcgggtctcgcggcgctcgtcgacgccctcgttgccgccgaccgctgcgacgtccacgtgtgtgcccccgaatcgtacgtgctgcgacttagaaaaccaaaccacagcgggaccagtgctcggatagggtccgacgacgatgcaagcaaggagtggcgcgcggccgacggggcgcagatcggctcctgcacgtgcagcgcagccgcgtgacagtgaagcagggaggccgcgataggtggcgcagggagggtgcgacggaggcaaagtgcaagcacctggggacttcaggtaagtagaaaaccaacactgaatttgtcggttctctgttttgtgattgaccgattggtttgttgatctcagaaaattgtttcaccgttaagcaccaatttttgggtaggtcagtgttttgggatgattctcctatgcatcaatagtaaccttgtgcttggcaaagttatttgccctgataatgttgtaggtttagtgaaaagaaatatactgacatatccacctatccatcgatgcccaatggagattgacctctatcaagatttagttatgtgtctcagtagggcaatatttctgtgagttgtatactgtggattcctcatctgcatcatgaattgatcgcactatttatgccctatttttcaaaccatggtttctgtaattctttgcaccatggtatttttctcaaatgattttatctttcacaacccggactgaactcactgaagcagaaagaaagagtacaagtctactactgcagaaagcaaggagaatgccaatagaagcagatttcatgtatggatcggataaaatcttgagcaaaatgggagaaggtttgggttttctgcaatctgtcgtctcctcttctgctgggtatctccattattattctaatgaagagggctacgagttggattttcgtaggtacatttgagcgtgttttggaatgctgggatcgtgaaacacgtgaatatgttgccataaaagttgtacacagtatccacaagtactgtgatgctgcaatgattgagatagatgtgctcaatcgccttgtagaaaatgaaaaatatagatttctgctacacttggggaatcaaagaaaagtgaaagtgccatgtcaaagttgatgaccagaagcttgctattggaaccctctctattgaaaaatacccctagatagaaattgatttggttttcaataaagagtgtgagctgtcacacacatcgaaaactacacgtgtatttttctttggttacaaggttgagcaaccaatcgaggaagatgaataatggatcttgattctgaagatgaagagaaggagctaaacattccagtaatcaaggaaaatggcaaaggtgatgggaaggaggaccagagaagtgaagagaaggcagttgctgcagcttcaaaatcaagtcttgggcttgaaaaaaagcaaggatgagtatgagtctgatgattctaatgagggtgagtgattatctcctgaagaaggcaatgttgtgatttgaagggagaaggtgaaaccggagaatgagcagatgcggctgttcatggacaacagcatcaagaaacctgcaacatgcaacctgattttaagaaatttgccacctgcaac

SEQ ID NO: 21316 - DNA, 3242 bp, Zea Mays
ccactgtctcctctccgtgacgcacgcccgagatcctctccgcgacacacgcctccctctcctctgccccaccctcctccccacgccatcggcgccgccatcatcggatccggcccaagatgcctccgccccacgcgcccgagtcgtcgaggcacactccttcccgcctccgtcgtccacgcatatctccgcctcacctcggcgcccgagtcgtcgcacgcgttcgcggtggtgtccatcccggcaccggcctcacgcaccgtctacagctcccaactctgctcctctcagttctccctccgcatttcgccttctctcccttcctctccaagcagcgtcctcctcgcctagatccgtacaagcggcaaataacctctccggcggcgagacagatggagtcgacctccggcgaggatgctccgaagcacaacccgattccgtccgcgctcgtctccaacctacagtccgtgctcaccgcccgccgcttgtccgcagccgaggtcagcaccgccgccacagctagcgaggttgaggccttggcttaggaagcagaggcgttcgctgcccccacgggagatgggacgctggcgaggcccatcgtgctactgacctatgccggggggatccggtcggcgggtctcgcggcgctcgtcgacgccctcgttgccgccgaccgctgcgacgtccacgtgtgtgcccccgaatcgtacgtgctgcgacttagaaaaccaaaccacagcgggaccagtgctcggatagggtccgacgacgatgcaagcaaggagtggcgcgcggccgacggggcgcagatcggctcctgcacgtgcagcgcagccgcgtgacagtgaagcagggaggccgcgataggtggcgcagggagggtgcgacggaggcaaagtgcaagcacctggggacttcaggtaagtagaaaaccaacactgaatttgtcggttctctgttttgtgattgaccgattggtttgttgatctcagaaaattgtttcaccgttaagcaccaatttttgggtaggtcagtgttttgggatgattctcctatgcatcaatagtaaccttgtgcttggcaaagttatttgccctgataatgttgtaggtttagtgaaaagaaatatactgacatatccacctatccatcgatgcccaatggagattgacctctatcaagatttagttatgtgtctcagtagggcaatatttctgtgagttgtatactgtggattcctcatctgcatcatgaattgatcgcactatttatgccctatttttcaaaccatggtttctgtaattctttgcaccatggtatttttctcaaatgattttatctttcacaacccggactgaactcactgaagcagaaagaaagagtacaagtctactactgcagaaagcaaggagaatgccaatagaagcagatttcatgtatggatcgggcgcccaacaatgaatgatgtggtgaaggaacttgagatcatcagatagaatgaaggggcacaattgttaaactcagcgtctttatcagttgaacaatttggaaacaaaaagagaagagatccttatgcatttgtctatggatgatggaagcaacaacaacacttttgactacaacagtgggagttcaattaagttgttcacccaagtagataattgtctccactctttcaacaagttattggagttattatatatgtctgctccatatgaatgccttttcattttagtatcacatctgaaattaccaaccttttatactggcagtgtgataagcattgaataaaagtttttttatatgttgaatattcaacaatatatgtataattttatatatacataaatataatattctcatacgcgtggttgctccgttggtatattgttgaaaggttgttttttacggtacatgtgctgaaatggccatgctttgatctgcctataggttgaaccatataagctttctctcagactcgattatgctgcttacatgatccatttagctgtctttggatttttggggtaactctccaatatctcacatgaggttctttgtgatagctgttacttaatctgtggtgatctatgtaaatgtggcaacacttgcagttcctcgagcccttgtgcatggatatatcgtttagttgtgtctaataatttgtaattagtggcaacatctttttgttattttggttttatctgatttttattgttataagatctcgattgcaaactggcagttagtacacctttaggttttcctttgtcgtatcaagctaataatgtgtgaagcagggttcccattctgatctttagttttttgtgattttaatagcaataacctttttcgcaaaaaagtaacaaactttatgcagtatgcggttcgtatagttcccagtatccttttggacttagatttagttcgatatatggttatgtttattgacagaatgcttttagctttgcagataaaatcttgagcaaaatgggagaaggtttgggttttctgcaatctgtcgtctcctcttctgctgggtatctccattattattctaatgaagagggctacgagttggattttcgtaggtacatttgagcgtgttttggaatgctgggatcgtgaaacacgtgaatatgttgccataaaagttgtacacagtatccacaagtactgtgatgctgcaatgattgagatagatgtgctcaatcgccttgtagaaaatgaaaaatatagatttctgctacacttggggaatcaaagaaaagtgaaagtgccatgtcaaagttgatgaccagaagcttgctattggaaccctctctattgaaaaatacccctagatagaaattgatttggttttcaataaagagtgtgagctgtcacacacatcgaaaactacacgtgtatttttctttggttacaaggttgagcaaccaatcgaggaagatgaataatggatcttgattctgaagatgaagagaaggagctaaacattccagtaatcaaggaaaatggcaaaggtgatgggaaggaggaccagagaagtgaagagaaggcagttgctgcagcttcaaaatcaagtcttgggcttgaaaaaaagcaaggatgagtatgagtctgatgattctaatgagggagaaggtgaaaccggagaatgagcagatgcggctgttcatggacaacagcatcaagaaacctgcaacatgcaacctgattttaagaaatttgccacctgcaac

SEQ ID NO: 21317 - DNA, 1753 bp, Zea Mays
ccactgtctcctctccgtgacgcacgcccgagatcctctccgcgacacacgcctccctctcctctgccccaccctcctccccacgccatcggcgccgccatcatcggatccggcccaagatgcctccgccccacgcgcccgagtcgtcgaggcacactccttcccgcctccgtcgtccacgcatatctccgcctcacctcggcgcccgagtcgtcgcacgcgttcgcggtggtgtccatcccggcaccggcctcacgcaccgtctacagctcccaactctgctcctctcagttctccctccgcatttcgccttctctcccttcctctccaagcagcgtcctcctcgcctagatccgtacaagcggcaaataacctctccggcggcgagacagatggagtcgacctccggcgaggatgctccgaagcacaacccgattccgtccgcgctcgtctccaacctacagtccgtgctcaccgcccgccgcttgtccgcagccgaggtcagcaccgccgccacagctagcgaggttgaggccttggcttaggaagcagaggcgttcgctgcccccacgggagatgggacgctggcgaggcccatcgtgctactgacctatgccggggggatccggtcggcgggtctcgcggcgctcgtcgacgccctcgttgccgccgaccgctgcgacgtccacgtgtgtgcccccgaatcgtacgtgctgcgacttagaaaaccaaaccacagcgggaccagtgctcggatagggtccgacgacgatgcaagcaaggagtggcgcgcggccgacggggcgcagatcggctcctgcacgtgcagcgcagccgcgtgacagtgaagcagggaggccgcgataggtggcgcagggagggtgcgacggaggcaaagtgcaagcacctggggacttcagaaagaaagagtacaagtctactactgcagaaagcaaggagaatgccaatagaagcagatttcatataaaatcttgagcaaaatgggagaaggtttgggttttctgcaatctgtcgtctcctcttctgctgggtatctccattattattctaatgaagagggctacgagttggattttcgtaggtacatttgagcgtgttttggaatgctgggatcgtgaaacacgtgaatatgttgccataaaagttgtacacagtatccacaagtactgtgatgctgcaatgattgagatagatgtgctcaatcgccttgtagaaaatgaaaaatatagatttctgctacacttggggaatcaaagaaaagtgaaagtgccatgtcaaagttgatgaccagaagcttgctattggaaccctctctattgaaaaatacccctagatagaaattgatttggttttcaataaagagtgtgagctgtcacacacatcgaaaactacacgtgtatttttctttggttacaaggttgagcaaccaatcgaggaagatgaataatggatcttgattctgaagatgaagagaaggagctaaacattccagtaatcaaggaaaatggcaaaggtgatgggaaggaggaccagagaagtgaagagaaggcagttgctgcagcttcaaaatcaagtcttgggcttgaaaaaaagcaaggatgagtatgagtctgatgattctaatgagggagaaggtgaaaccggagaatgagcagatgcggctgttcatggacaacagcatcaagaaacctgcaacatgcaacctgattttaagaaatttgccacctgcaac

SEQ ID NO: 21318 - DNA, 3281 bp, Zea Mays
ccactgtctcctctccgtgacgcacgcccgagatcctctccgcgacacacgcctccctctcctctgccccaccctcctccccacgccatcggcgccgccatcatcggatccggcccaagatgcctccgccccacgcgcccgagtcgtcgaggcacactccttcccgcctccgtcgtccacgcatatctccgcctcacctcggcgcccgagtcgtcgcacgcgttcgcggtggtgtccatcccggcaccggcctcacgcaccgtctacagctcccaactctgctcctctcagttctccctccgcatttcgccttctctcccttcctctccaagcagcgtcctcctcgcctagatccgtacaagcggcaaataacctctccggcggcgagacagatggagtcgacctccggcgaggatgctccgaagcacaacccgattccgtccgcgctcgtctccaacctacagtccgtgctcaccgcccgccgcttgtccgcagccgaggtcagcaccgccgccacagctagcgaggttgaggccttggcttaggaagcagaggcgttcgctgcccccacgggagatgggacgctggcgaggcccatcgtgctactgacctatgccggggggatccggtcggcgggtctcgcggcgctcgtcgacgccctcgttgccgccgaccgctgcgacgtccacgtgtgtgcccccgaatcgtacgtgctgcgacttagaaaaccaaaccacagcgggaccagtgctcggatagggtccgacgacgatgcaagcaaggagtggcgcgcggccgacggggcgcagatcggctcctgcacgtgcagcgcagccgcgtgacagtgaagcagggaggccgcgataggtggcgcagggagggtgcgacggaggcaaagtgcaagcacctggggacttcaggtaagtagaaaaccaacactgaatttgtcggttctctgttttgtgattgaccgattggtttgttgatctcagaaaattgtttcaccgttaagcaccaatttttgggtaggtcagtgttttgggatgattctcctatgcatcaatagtaaccttgtgcttggcaaagttatttgccctgataatgttgtaggtttagtgaaaagaaatatactgacatatccacctatccatcgatgcccaatggagattgacctctatcaagatttagttatgtgtctcagtagggcaatatttctgtgagttgtatactgtggattcctcatctgcatcatgaattgatcgcactatttatgccctatttttcaaaccatggtttctgtaattctttgcaccatggtatttttctcaaatgattttatctttcacaacccggactgaactcactgaagcagaaagaaagagtacaagtctactactgcagaaagcaaggagaatgccaatagaagcagatttcatgtatggatcggggatatttatacaattggctatgtatacggtctgcccaggcgcccaacaatgaatgatgtggtgaaggaacttgagatcatcagatagaatgaaggggcacaattgttaaactcagcgtctttatcagttgaacaatttggaaacaaaaagagaagagatccttatgcatttgtctatggatgatggaagcaacaacaacacttttgactacaacagtgggagttcaattaagttgttcacccaagtagataattgtctccactctttcaacaagttattggagttattatatatgtctgctccatatgaatgccttttcattttagtatcacatctgaaattaccaaccttttatactggcagtgtgataagcattgaataaaagtttttttatatgttgaatattcaacaatatatgtataattttatatatacataaatataatattctcatacgcgtggttgctccgttggtatattgttgaaaggttgttttttacggtacatgtgctgaaatggccatgctttgatctgcctataggttgaaccatataagctttctctcagactcgattatgctgcttacatgatccatttagctgtctttggatttttggggtaactctccaatatctcacatgaggttctttgtgatagctgttacttaatctgtggtgatctatgtaaatgtggcaacacttgcagttcctcgagcccttgtgcatggatatatcgtttagttgtgtctaataatttgtaattagtggcaacatctttttgttattttggttttatctgatttttattgttataagatctcgattgcaaactggcagttagtacacctttaggttttcctttgtcgtatcaagctaataatgtgtgaagcagggttcccattctgatctttagttttttgtgattttaatagcaataacctttttcgcaaaaaagtaacaaactttatgcagtatgcggttcgtatagttcccagtatccttttggacttagatttagttcgatatatggttatgtttattgacagaatgcttttagctttgcagataaaatcttgagcaaaatgggagaaggtttgggttttctgcaatctgtcgtctcctcttctgctgggtatctccattattattctaatgaagagggctacgagttggattttcgtaggtacatttgagcgtgttttggaatgctgggatcgtgaaacacgtgaatatgttgccataaaagttgtacacagtatccacaagtactgtgatgctgcaatgattgagatagatgtgctcaatcgccttgtagaaaatgaaaaatatagatttctgctacacttggggaatcaaagaaaagtgaaagtgccatgtcaaagttgatgaccagaagcttgctattggaaccctctctattgaaaaatacccctagatagaaattgatttggttttcaataaagagtgtgagctgtcacacacatcgaaaactacacgtgtatttttctttggttacaaggttgagcaaccaatcgaggaagatgaataatggatcttgattctgaagatgaagagaaggagctaaacattccagtaatcaaggaaaatggcaaaggtgatgggaaggaggaccagagaagtgaagagaaggcagttgctgcagcttcaaaatcaagtcttgggcttgaaaaaaagcaaggatgagtatgagtctgatgattctaatgagggagaaggtgaaaccggagaatgagcagatgcggctgttcatggacaacagcatcaagaaacctgcaacatgcaacctgattttaagaaatttgccacctgcaac

SEQ ID NO: 21319 - DNA, 2062 bp, Zea Mays
ccactgtctcctctccgtgacgcacgcccgagatcctctccgcgacacacgcctccctctcctctgccccaccctcctccccacgccatcggcgccgccatcatcggatccggcccaagatgcctccgccccacgcgcccgagtcgtcgaggcacactccttcccgcctccgtcgtccacgcatatctccgcctcacctcggcgcccgagtcgtcgcacgcgttcgcggtggtgtccatcccggcaccggcctcacgcaccgtctacagctcccaactctgctcctctcagttctccctccgcatttcgccttctctcccttcctctccaagcagcgtcctcctcgcctagatccgtacaagcggcaaataacctctccggcggcgagacagatggagtcgacctccggcgaggatgctccgaagcacaacccgattccgtccgcgctcgtctccaacctacagtccgtgctcaccgcccgccgcttgtccgcagccgaggtcagcaccgccgccacagctagcgaggttgaggccttggcttaggaagcagaggcgttcgctgcccccacgggagatgggacgctggcgaggcccatcgtgctactgacctatgccggggggatccggtcggcgggtctcgcggcgctcgtcgacgccctcgttgccgccgaccgctgcgacgtccacgtgtgtgcccccgaatcgtacgtgctgcgacttagaaaaccaaaccacagcgggaccagtgctcggatagggtccgacgacgatgcaagcaaggagtggcgcgcggccgacggggcgcagatcggctcctgcacgtgcagcgcagccgcgtgacagtgaagcagggaggccgcgataggtggcgcagggagggtgcgacggaggcaaagtgcaagcacctggggacttcaggtaagtagaaaaccaacactgaatttgtcggttctctgttttgtgattgaccgattggtttgttgatctcagaaaattgtttcaccgttaagcaccaatttttgggtaggtcagtgttttgggatgattctcctatgcatcaatagtaaccttgtgcttggcaaagttatttgccctgataatgttgtaggtttagtgaaaagaaatatactgacatatccacctatccatcgatgcccaatggagattgacctctatcaagatttagttatgtgtctcagtagggcaatatttctgtgagttgtatactgtggattcctcatctgcatcatgaattgatcgcactatttatgccctatttttcaaaccatggtttctgtaattctttgcaccatggtatttttctcaaatgattttatctttcacaacccggactgaactcactgaagcagaaagaaagagtacaagtctactactgcagaaagcaaggagaatgccaatagaagcagatttcatgtatggatcggataaaatcttgagcaaaatgggagaaggtttgggttttctgcaatctgtcgtctcctcttctgctgggtatctccattattattctaatgaagagggctacgagttggattttcgtaggctacacttggggaatcaaagaaaagtgaaagtgccatgtcaaagttgatgaccagaagcttgctattggaaccctctctattgaaaaatacccctagatagaaattgatttggttttcaataaagagtgtgagctgtcacacacatcgaaaactacacgtgtatttttctttggttacaaggttgagcaaccaatcgaggaagatgaataatggatcttgattctgaagatgaagagaaggagctaaacattccagtaatcaaggaaaatggcaaaggtgatgggaaggaggaccagagaagtgaagagaaggcagttgctgcagcttcaaaatcaagtcttgggcttgaaaaaaagcaaggatgagtatgagtctgatgattctaatgagggagaaggtgaaaccggagaatgagcagatgcggctgttcatggacaacagcatcaagaaacctgcaacatgcaacctgattttaagaaatttgccacctgcaac

SEQ ID NO: 21320 - DNA, 2451 bp, Zea Mays
ccactgtctcctctccgtgacgcacgcccgagatcctctccgcgacacacgcctccctctcctctgccccaccctcctccccacgccatcggcgccgccatcatcggatccggcccaagatgcctccgccccacgcgcccgagtcgtcgaggcacactccttcccgcctccgtcgtccacgcatatctccgcctcacctcggcgcccgagtcgtcgcacgcgttcgcggtggtgtccatcccggcaccggcctcacgcaccgtctacagctcccaactctgctcctctcagttctccctccgcatttcgccttctctcccttcctctccaagcagcgtcctcctcgcctagatccgtacaagcggcaaataacctctccggcggcgagacagatggagtcgacctccggcgaggatgctccgaagcacaacccgattccgtccgcgctcgtctccaacctacagtccgtgctcaccgcccgccgcttgtccgcagccgaggtcagcaccgccgccacagctagcgaggttgaggccttggcttaggaagcagaggcgttcgctgcccccacgggagatgggacgctggcgaggcccatcgtgctactgacctatgccggggggatccggtcggcgggtctcgcggcgctcgtcgacgccctcgttgccgccgaccgctgcgacgtccacgtgtgtgcccccgaatcgtacgtgctgcgacttagaaaaccaaaccacagcgggaccagtgctcggatagggtccgacgacgatgcaagcaaggagtggcgcgcggccgacggggcgcagatcggctcctgcacgtgcagcgcagccgcgtgacagtgaagcagggaggccgcgataggtggcgcagggagggtgcgacggaggcaaagtgcaagcacctggggacttcaggtaagtagaaaaccaacactgaatttgtcggttctctgttttgtgattgaccgattggtttgttgatctcagaaaattgtttcaccgttaagcaccaatttttgggtaggtcagtgttttgggatgattctcctatgcatcaatagtaaccttgtgcttggcaaagttatttgccctgataatgttgtaggtttagtgaaaagaaatatactgacatatccacctatccatcgatgcccaatggagattgacctctatcaagatttagttatgtgtctcagtagggcaatatttctgtgagttgtatactgtggattcctcatctgcatcatgaattgatcgcactatttatgccctatttttcaaaccatggtttctgtaattctttgcaccatggtatttttctcaaatgattttatctttcacaacccggactgaactcactgaagcagaaagaaagagtacaagtctactactgcagaaagcaaggagaatgccaatagaagcagatttcatgtatggatcgggcgcccaacaatgaatgatgtggtgaaggaacttgagatcatcagatagaatgaaggggcacaattgttaaactcagcgtctttatcagttgaacaatttggaaacaaaaagagaagagatccttatgcatttgtctatggatgatggaagcaacaacaacacttttgactacaacagtgggagttcaattaagttgttcacccaagtagataattgtctccactctttcaacaaataaaatcttgagcaaaatgggagaaggtttgggttttctgcaatctgtcgtctcctcttctgctgggtatctccattattattctaatgaagagggctacgagttggattttcgtaggtacatttgagcgtgttttggaatgctgggatcgtgaaacacgtgaatatgttgccataaaagttgtacacagtatccacaagtactgtgatgctgcaatgattgagatagatgtgctcaatcgccttgtagaaaatgaaaaatatagatttctgctacacttggggaatcaaagaaaagtgaaagtgccatgtcaaagttgatgaccagaagcttgctattggaaccctctctattgaaaaatacccctagatagaaattgatttggttttcaataaagagtgtgagctgtcacacacatcgaaaactacacgtgtatttttctttggttacaaggttgagcaaccaatcgaggaagatgaataatggatcttgattctgaagatgaagagaaggagctaaacattccagtaatcaaggaaaatggcaaaggtgatgggaaggaggaccagagaagtgaagagaaggcagttgctgcagcttcaaaatcaagtcttgggcttgaaaaaaagcaaggatgagtatgagtctgatgattctaatgagggagaaggtgaaaccggagaatgagcagatgcggctgttcatggacaacagcatcaagaaacctgcaacatgcaacctgattttaagaaatttgccacctgcaac

SEQ ID NO: 21321 - DNA, 2216 bp, Zea Mays
ccactgtctcctctccgtgacgcacgcccgagatcctctccgcgacacacgcctccctctcctctgccccaccctcctccccacgccatcggcgccgccatcatcggatccggcccaagatgcctccgccccacgcgcccgagtcgtcgaggcacactccttcccgcctccgtcgtccacgcatatctccgcctcacctcggcgcccgagtcgtcgcacgcgttcgcggtggtgtccatcccggcaccggcctcacgcaccgtctacagctcccaactctgctcctctcagttctccctccgcatttcgccttctctcccttcctctccaagcagcgtcctcctcgcctagatccgtacaagcggcaaataacctctccggcggcgagacagatggagtcgacctccggcgaggatgctccgaagcacaacccgattccgtccgcgctcgtctccaacctacagtccgtgctcaccgcccgccgcttgtccgcagccgaggtcagcaccgccgccacagctagcgaggttgaggccttggcttaggaagcagaggcgttcgctgcccccacgggagatgggacgctggcgaggcccatcgtgctactgacctatgccggggggatccggtcggcgggtctcgcggcgctcgtcgacgccctcgttgccgccgaccgctgcgacgtccacgtgtgtgcccccgaatcgtacgtgctgcgacttagaaaaccaaaccacagcgggaccagtgctcggatagggtccgacgacgatgcaagcaaggagtggcgcgcggccgacggggcgcagatcggctcctgcacgtgcagcgcagccgcgtgacagtgaagcagggaggccgcgataggtggcgcagggagggtgcgacggaggcaaagtgcaagcacctggggacttcaggtaagtagaaaaccaacactgaatttgtcggttctctgttttgtgattgaccgattggtttgttgatctcagaaaattgtttcaccgttaagcaccaatttttgggtaggtcagtgttttgggatgattctcctatgcatcaatagtaaccttgtgcttggcaaagttatttgccctgataatgttgtaggtttagtgaaaagaaatatactgacatatccacctatccatcgatgcccaatggagattgacctctatcaagatttagttatgtgtctcagtagggcaatatttctgtgagttgtatactgtggattcctcatctgcatcatgaattgatcgcactatttatgccctatttttcaaaccatggtttctgtaattctttgcaccatggtatttttctcaaatgattttatctttcacaacccggactgaactcactgaagcagaaagaaagagtacaagtctactactgcagaaagcaaggagaatgccaatagaagcagatttcatgtatggatcggataaaatcttgagcaaaatgggagaaggtttgggttttctgcaatctgtcgtctcctcttctgctgggtatctccattattattctaatgaagagggctacgagttggattttcgtaggtacatttgagcgtgttttggaatgctgggatcgtgaaacacgtgaatatgttgccataaaagttgtacacagtatccacaagtactgtgatgctgcaatgattgagatagatgtgctcaatcgccttgtagaaaatgaaaaatatagatttctgctacacttggggaatcaaagaaaagtgaaagtgccatgtcaaagttgatgaccagaagcttgctattggaaccctctctattgaaaaatacccctagatagaaattgatttggttttcaataaagagtgtgagctgtcacacacatcgaaaactacacgtgtatttttctttggttacaaggttgagcaaccaatcgaggaagatgaataatggatcttgattctgaagatgaagagaaggagctaaacattccagtaatcaaggaaaatggcaaaggtgatgggaaggaggaccagagaagtgaagagaaggcagttgctgcagcttcaaaatcaagtcttgggcttgaaaaaaagcaaggatgagtatgagtctgatgattctaatgagggagaaggtgaaaccggagaatgagcagatgcggctgttcatggacaacagcatcaagaaacctgcaacatgcaacctgattttaagaaatttgccacctgcaac

SEQ ID NO: 21322 - DNA, 1610 bp, Zea Mays
ccactgtctcctctccgtgacgcacgcccgagatcctctccgcgacacacgcctccctctcctctgccccaccctcctccccacgccatcggcgccgccatcatcggatccggcccaagatgcctccgccccacgcgcccgagtcgtcgaggcacactccttcccgcctccgtcgtccacgcatatctccgcctcacctcggcgcccgagtcgtcgcacgcgttcgcggtggtgtccatcccggcaccggcctcacgcaccgtctacagctcccaactctgctcctctcagttctccctccgcatttcgccttctctcccttcctctccaagcagcgtcctcctcgcctagatccgtacaagcggcaaataacctctccggcggcgagacagatggagtcgacctccggcgaggatgctccgaagcacaacccgattccgtccgcgctcgtctccaacctacagtccgtgctcaccgcccgccgcttgtccgcagccgaggtcagcaccgccgccacagctagcgaggttgaggccttggcttaggaagcagaggcgttcgctgcccccacgggagatgggacgctggcgaggcccatcgtgctactgacctatgccggggggatccggtcggcgggtctcgcggcgctcgtcgacgccctcgttgccgccgaccgctgcgacgtccacgtgtgtgcccccgaatcgtacgtgctgcgacttagaaaaccaaaccacagcgggaccagtgctcggatagggtccgacgacgatgcaagcaaggagtggcgcgcggccgacggggcgcagatcggctcctgcacgtgcagcgcagccgcgtgacagtgaagcagggaggccgcgataggtggcgcagggagggtgcgacggaggcaaagtgcaagcacctggggacttcagaaagaaagagtacaagtctactactgcagaaagcaaggagaatgccaatagaagcagatttcatgtatggatcggataaaatcttgagcaaaatgggagaaggtttgggttttctgcaatctgtcgtctcctcttctgctgggtatctccattattattctaatgaagagggctacgagttggattttcgtaggctacacttggggaatcaaagaaaagtgaaagtgccatgtcaaagttgatgaccagaagcttgctattggaaccctctctattgaaaaatacccctagatagaaattgatttggttttcaataaagagtgtgagctgtcacacacatcgaaaactacacgtgtatttttctttggttacaaggttgagcaaccaatcgaggaagatgaataatggatcttgattctgaagatgaagagaaggagctaaacattccagtaatcaaggaaaatggcaaaggtgatgggaaggaggaccagagaagtgaagagaaggcagttgctgcagcttcaaaatcaagtcttgggcttgaaaaaaagcaaggatgagtatgagtctgatgattctaatgagggagaaggtgaaaccggagaatgagcagatgcggctgttcatggacaacagcatcaagaaacctgcaacatgcaacctgattttaagaaatttgccacctgcaac

SEQ ID NO: 21323 - DNA, 2257 bp, Zea Mays
ccactgtctcctctccgtgacgcacgcccgagatcctctccgcgacacacgcctccctctcctctgccccaccctcctccccacgccatcggcgccgccatcatcggatccggcccaagatgcctccgccccacgcgcccgagtcgtcgaggcacactccttcccgcctccgtcgtccacgcatatctccgcctcacctcggcgcccgagtcgtcgcacgcgttcgcggtggtgtccatcccggcaccggcctcacgcaccgtctacagctcccaactctgctcctctcagttctccctccgcatttcgccttctctcccttcctctccaagcagcgtcctcctcgcctagatccgtacaagcggcaaataacctctccggcggcgagacagatggagtcgacctccggcgaggatgctccgaagcacaacccgattccgtccgcgctcgtctccaacctacagtccgtgctcaccgcccgccgcttgtccgcagccgaggtcagcaccgccgccacagctagcgaggttgaggccttggcttaggaagcagaggcgttcgctgcccccacgggagatgggacgctggcgaggcccatcgtgctactgacctatgccggggggatccggtcggcgggtctcgcggcgctcgtcgacgccctcgttgccgccgaccgctgcgacgtccacgtgtgtgcccccgaatcgtacgtgctgcgacttagaaaaccaaaccacagcgggaccagtgctcggatagggtccgacgacgatgcaagcaaggagtggcgcgcggccgacggggcgcagatcggctcctgcacgtgcagcgcagccgcgtgacagtgaagcagggaggccgcgataggtggcgcagggagggtgcgacggaggcaaagtgcaagcacctggggacttcaggtaagtagaaaaccaacactgaatttgtcggttctctgttttgtgattgaccgattggtttgttgatctcagaaaattgtttcaccgttaagcaccaatttttgggtaggtcagtgttttgggatgattctcctatgcatcaatagtaaccttgtgcttggcaaagttatttgccctgataatgttgtaggtttagtgaaaagaaatatactgacatatccacctatccatcgatgcccaatggagattgacctctatcaagatttagttatgtgtctcagtagggcaatatttctgtgagttgtatactgtggattcctcatctgcatcatgaattgatcgcactatttatgccctatttttcaaaccatggtttctgtaattctttgcaccatggtatttttctcaaatgattttatctttcacaacccggactgaactcactgaagcagaaagaaagagtacaagtctactactgcagaaagcaaggagaatgccaatagaagcagatttcatgcgcccaacaatgaatgatgtggtgaaggaacttgagatcatcagatagaatgaaggggcacaattgttaaactcagcgtctttatcagttgaacaatttggaaacaaaaagagaagagatccttatgcatttgtctatggatgatggaagcaacaacaacacttttgactacaacagtgggagttcaattaagttgttcacccaaataaaatcttgagcaaaatgggagaaggtttgggttttctgcaatctgtcgtctcctcttctgctgggtatctccattattattctaatgaagagggctacgagttggattttcgtaggctacacttggggaatcaaagaaaagtgaaagtgccatgtcaaagttgatgaccagaagcttgctattggaaccctctctattgaaaaatacccctagatagaaattgatttggttttcaataaagagtgtgagctgtcacacacatcgaaaactacacgtgtatttttctttggttacaaggttgagcaaccaatcgaggaagatgaataatggatcttgattctgaagatgaagagaaggagctaaacattccagtaatcaaggaaaatggcaaaggtgatgggaaggaggaccagagaagtgaagagaaggcagttgctgcagcttcaaaatcaagtcttgggcttgaaaaaaagcaaggatgagtatgagtctgatgattctaatgagggagaaggtgaaaccggagaatgagcagatgcggctgttcatggacaacagcatcaagaaacctgcaacatgcaacctgattttaagaaatttgccacctgcaac

SEQ ID NO: 21324 - DNA, 2370 bp, Zea Mays
ccactgtctcctctccgtgacgcacgcccgagatcctctccgcgacacacgcctccctctcctctgccccaccctcctccccacgccatcggcgccgccatcatcggatccggcccaagatgcctccgccccacgcgcccgagtcgtcgaggcacactccttcccgcctccgtcgtccacgcatatctccgcctcacctcggcgcccgagtcgtcgcacgcgttcgcggtggtgtccatcccggcaccggcctcacgcaccgtctacagctcccaactctgctcctctcagttctccctccgcatttcgccttctctcccttcctctccaagcagcgtcctcctcgcctagatccgtacaagcggcaaataacctctccggcggcgagacagatggagtcgacctccggcgaggatgctccgaagcacaacccgattccgtccgcgctcgtctccaacctacagtccgtgctcaccgcccgccgcttgtccgcagccgaggtcagcaccgccgccacagctagcgaggttgaggccttggcttaggaagcagaggcgttcgctgcccccacgggagatgggacgctggcgaggcccatcgtgctactgacctatgccggggggatccggtcggcgggtctcgcggcgctcgtcgacgccctcgttgccgccgaccgctgcgacgtccacgtgtgtgcccccgaatcgtacgtgctgcgacttagaaaaccaaaccacagcgggaccagtgctcggatagggtccgacgacgatgcaagcaaggagtggcgcgcggccgacggggcgcagatcggctcctgcacgtgcagcgcagccgcgtgacagtgaagcagggaggccgcgataggtggcgcagggagggtgcgacggaggcaaagtgcaagcacctggggacttcaggtaagtagaaaaccaacactgaatttgtcggttctctgttttgtgattgaccgattggtttgttgatctcagaaaattgtttcaccgttaagcaccaatttttgggtaggtcagtgttttgggatgattctcctatgcatcaatagtaaccttgtgcttggcaaagttatttgccctgataatgttgtaggtttagtgaaaagaaatatactgacatatccacctatccatcgatgcccaatggagattgacctctatcaagatttagttatgtgtctcagtagggcaatatttctgtgagttgtatactgtggattcctcatctgcatcatgaattgatcgcactatttatgccctatttttcaaaccatggtttctgtaattctttgcaccatggtatttttctcaaatgattttatctttcacaacccggactgaactcactgaagcagaaagaaagagtacaagtctactactgcagaaagcaaggagaatgccaatagaagcagatttcatgtatggatcggggatatttatacaattggctatgtatacggtctgcccaggcgcccaacaatgaatgatgtggtgaaggaacttgagatcatcagatagaatgaaggggcacaattgttaaactcagcgtctttatcagttgaacaatttggaaacaaaaagagaagagatccttatgcatttgtctatggatgatggaagcaacaacaacacttttgactacaacagtgggagttcaattaagttgttcacccaaataaaatcttgagcaaaatgggagaaggtacatttgagcgtgttttggaatgctgggatcgtgaaacacgtgaatatgttgccataaaagttgtacacagtatccacaagtactgtgatgctgcaatgattgagatagatgtgctcaatcgccttgtagaaaatgaaaaatatagatttctgctacacttggggaatcaaagaaaagtgaaagtgccatgtcaaagttgatgaccagaagcttgctattggaaccctctctattgaaaaatacccctagatagaaattgatttggttttcaataaagagtgtgagctgtcacacacatcgaaaactacacgtgtatttttctttggttacaaggttgagcaaccaatcgaggaagatgaataatggatcttgattctgaagatgaagagaaggagctaaacattccagtaatcaaggaaaatggcaaaggtgatgggaaggaggaccagagaagtgaagagaaggcagttgctgcagcttcaaaatcaagtcttgggcttgaaaaaaagcaaggatgagtatgagtctgatgattctaatgagggagaaggtgaaaccggagaatgagcagatgcggctgttcatggacaacagcatcaagaaacctgcaacatgcaacctgattttaagaaatttgccacctgcaac

SEQ ID NO: 21325 - DNA, 2790 bp, Zea Mays
ccactgtctcctctccgtgacgcacgcccgagatcctctccgcgacacacgcctccctctcctctgccccaccctcctccccacgccatcggcgccgccatcatcggatccggcccaagatgcctccgccccacgcgcccgagtcgtcgaggcacactccttcccgcctccgtcgtccacgcatatctccgcctcacctcggcgcccgagtcgtcgcacgcgttcgcggtggtgtccatcccggcaccggcctcacgcaccgtctacagctcccaactctgctcctctcagttctccctccgcatttcgccttctctcccttcctctccaagcagcgtcctcctcgcctagatccgtacaagcggcaaataacctctccggcggcgagacagatggagtcgacctccggcgaggatgctccgaagcacaacccgattccgtccgcgctcgtctccaacctacagtccgtgctcaccgcccgccgcttgtccgcagccgaggtcagcaccgccgccacagctagcgaggttgaggccttggcttaggaagcagaggcgttcgctgcccccacgggagatgggacgctggcgaggcccatcgtgctactgacctatgccggggggatccggtcggcgggtctcgcggcgctcgtcgacgccctcgttgccgccgaccgctgcgacgtccacgtgtgtgcccccgaatcgtacgtgctgcgacttagaaaaccaaaccacagcgggaccagtgctcggatagggtccgacgacgatgcaagcaaggagtggcgcgcggccgacggggcgcagatcggctcctgcacgtgcagcgcagccgcgtgacagtgaagcagggaggccgcgataggtggcgcagggagggtgcgacggaggcaaagtgcaagcacctggggacttcagaaagaaagagtacaagtctactactgcagaaagcaaggagaatgccaatagaagcagatttcatgtatggatcgggcgcccaacaatgaatgatgtggtgaaggaacttgagatcatcagatagaatgaaggggcacaattgttaaactcagcgtctttatcagttgaacaatttggaaacaaaaagagaagagatccttatgcatttgtctatggatgatggaagcaacaacaacacttttgactacaacagtgggagttcaattaagttgttcacccaagtagataattgtctccactctttcaacaagttattggagttattatatatgtctgctccatatgaatgccttttcattttagtatcacatctgaaattaccaaccttttatactggcagtgtgataagcattgaataaaagtttttttatatgttgaatattcaacaatatatgtataattttatatatacataaatataatattctcatacgcgtggttgctccgttggtatattgttgaaaggttgttttttacggtacatgtgctgaaatggccatgctttgatctgcctataggttgaaccatataagctttctctcagactcgattatgctgcttacatgatccatttagctgtctttggatttttggggtaactctccaatatctcacatgaggttctttgtgatagctgttacttaatctgtggtgatctatgtaaatgtggcaacacttgcagttcctcgagcccttgtgcatggatatatcgtttagttgtgtctaataatttgtaattagtggcaacatctttttgttattttggttttatctgatttttattgttataagatctcgattgcaaactggcagttagtacacctttaggttttcctttgtcgtatcaagctaataatgtgtgaagcagggttcccattctgatctttagttttttgtgattttaatagcaataacctttttcgcaaaaaagtaacaaactttatgcagtatgcggttcgtatagttcccagtatccttttggacttagatttagttcgatatatggttatgtttattgacagaatgcttttagctttgcagataaaatcttgagcaaaatgggagaaggtttgggttttctgcaatctgtcgtctcctcttctgctgggtatctccattattattctaatgaagagggctacgagttggattttcgtaggtacatttgagcgtgttttggaatgctgggatcgtgaaacacgtgaatatgttgccataaaagttgtacacagtatccacaagtactgtgatgctgcaatgattgagatagatgtgctcaatcgccttgtagaaaatgaaaaatatagatttctgctacacttggggaatcaaagaaaagtgaaagtgccatgtcaaagttgatgaccagaagcttgctattggaaccctctctattgaaaaatacccctagatagaaattgatttggttttcaataaagagtgtgagctgtcacacacatcgaaaactacacgtgtatttttctttggttacaaggttgagcaaccaatcgaggaagatgaataatggatcttgattctgaagatgaagagaaggagctaaacattccagtaatcaaggaaaatggcaaaggtgatgggaaggaggaccagagaagtgaagagaaggcagttgctgcagcttcaaaatcaagtcttgggcttgaaaaaaagcaaggatgagtatgagtctgatgattctaatgagggagaaggtgaaaccggagaatgagcagatgcggctgttcatggacaacagcatcaagaaacctgcaacatgcaacctgattttaagaaatttgccacctgcaac

SEQ ID NO: 21326 - DNA, 2171 bp, Zea Mays
ccactgtctcctctccgtgacgcacgcccgagatcctctccgcgacacacgcctccctctcctctgccccaccctcctccccacgccatcggcgccgccatcatcggatccggcccaagatgcctccgccccacgcgcccgagtcgtcgaggcacactccttcccgcctccgtcgtccacgcatatctccgcctcacctcggcgcccgagtcgtcgcacgcgttcgcggtggtgtccatcccggcaccggcctcacgcaccgtctacagctcccaactctgctcctctcagttctccctccgcatttcgccttctctcccttcctctccaagcagcgtcctcctcgcctagatccgtacaagcggcaaataacctctccggcggcgagacagatggagtcgacctccggcgaggatgctccgaagcacaacccgattccgtccgcgctcgtctccaacctacagtccgtgctcaccgcccgccgcttgtccgcagccgaggtcagcaccgccgccacagctagcgaggttgaggccttggcttaggaagcagaggcgttcgctgcccccacgggagatgggacgctggcgaggcccatcgtgctactgacctatgccggggggatccggtcggcgggtctcgcggcgctcgtcgacgccctcgttgccgccgaccgctgcgacgtccacgtgtgtgcccccgaatcgtacgtgctgcgacttagaaaaccaaaccacagcgggaccagtgctcggatagggtccgacgacgatgcaagcaaggagtggcgcgcggccgacggggcgcagatcggctcctgcacgtgcagcgcagccgcgtgacagtgaagcagggaggccgcgataggtggcgcagggagggtgcgacggaggcaaagtgcaagcacctggggacttcagaaagaaagagtacaagtctactactgcagaaagcaaggagaatgccaatagaagcagatttcatgtatggatcgggtaatgacctttttgtgttctcctcaactcattatttagctacatatcttattaaatcttaatctttggtcattagctaccagcttgcactattattgtgaaaatccattaactttagtcattgaaatggttagactatcaccacgtaggtgatattagtggcattaagtgattaatctgtggcaaatcctattatcaactattttcttggctaatcattacaatatataatgaagaatactatggcttgaagggatatttatacaattggctatgtatacggtctgcccaggcgcccaacaatgaatgatgtggtgaaggaacttgagatcatcagatagaatgaaggggcacaattgttaaactcagcgtctttatcagttgaacaatttggaaacaaaaagagaagagatccttatgcatttgtctatggatgatggaagcaacaacaacacttttgactacaacagtgggagttcaattaagttgttcacccaaataaaatcttgagcaaaatgggagaaggtacatttgagcgtgttttggaatgctgggatcgtgaaacacgtgaatatgttgccataaaagttgtacacagtatccacaagtactgtgatgctgcaatgattgagatagatgtgctcaatcgccttgtagaaaatgaaaaatatagatttctgctacacttggggaatcaaagaaaagtgaaagtgccatgtcaaagttgatgaccagaagcttgctattggaaccctctctattgaaaaatacccctagatagaaattgatttggttttcaataaagagtgtgagctgtcacacacatcgaaaactacacgtgtatttttctttggttacaaggttgagcaaccaatcgaggaagatgaataatggatcttgattctgaagatgaagagaaggagctaaacattccagtaatcaaggaaaatggcaaaggtgatgggaaggaggaccagagaagtgaagagaaggcagttgctgcagcttcaaaatcaagtcttgggcttgaaaaaaagcaaggatgagtatgagtctgatgattctaatgagggagaaggtgaaaccggagaatgagcagatgcggctgttcatggacaacagcatcaagaaacctgcaacatgcaacctgattttaagaaatttgccacctgcaac

SEQ ID NO: 21327 - DNA, 3925 bp, Zea Mays
ctcaattggttattttcaaatcaaacatcgtgtcgcctactctactctagttgagtgagtcactgagtctaaaatgacgcctggtccatggaagaccaatacggccaatgatctcaggcgcctgcaaggaaaacacaagacactgacaagtgggcccattactaaccctattaggccagaccagagctgaagcagagcggagaggtctgctcgccggccatcgaatccaggctcctccaaggtgatctctctcgatcgcttccggcctcaccgtagcccgatccacgcaggctcggccacgacccgcggcctccgcacgacctggatctgacgcgcctccccctgcccccgccctccgcctcgtacttcctcgctgcggccgccgtgctcgcgctactcggcggactcctactctatatgcttccccggaagcggggggtcgacgccggcgaggaccaggacttgcacaacaaggcccttcgcgccgccgcagttgctcaggacaaggagaaggtggttgcggagatgggcggcagggcgccagagatcgatgaggacctccacagccgccagctcgccgtctacgggcgcgagaccatgaagcgcctcttcggctccaacgtcctcatctccggactgcagggactaggcgctgagatcgcaaaaaaccttgtccttgcgggtgtcaagtccgtaaccttgcatgatgatggcaaagttgagctatgggacttgtcaagcaactttttcctctcagagaaggatgttgggcaaaaccgtgctctagcttgcgttccaaagctacaagagcttaacaatgctgttatcatctctaccataactggtgatttgatcaaagagcagctttctaattttcaggccgtggtttttactgatatgagcatagaaaaggcagttgagtttgatgattactgccatagtcaccagccgccaattgctttcattaagtcggaagtttgtggcctttttggcagtgttttctgtgattttggtcctgagtttactgttttggatgtcgatggtgaggagccacatacaggaattgtggcatcaatcagcaatgacaacccagcacttgtttcttgtgtggatgatgagcgtctggagttccaggatggtgatctagttgttttctctgaagtgcatggaatgaccgaactcaatgatggaaaaccaagaaagattaagaatgcaaggccttattcttttactctagaagaagacaccacctcatatggcacttacattagaggcggtattgtcacacaggtgaagccaccaaaggttcttaatttcaaaaccttgaaggaggcaatcaaggagccaggagaatttctcatgagtgatttctccaagttcgaccgcccacctcttgtgcatttggccttccaagctttggacaagtttaggactgagttgacacgattccctattgctgggtcagctgatgatgtacagaagctgatagaccttgctattagtattaatgaaactcttggtgatagtaagcttgaagaaattgacaagaaagtcttgcagcattttgcaagtggttcgagggctgttttgaatcctatggctgcaatgtttggtggtattgtaggtcaggaggttgttaaagcatgttcagggaaattccatccactgtaccagttcttctactttgattctgtcgaatctctgccagttgaaccgttggagcctagtgatttgaagccagagaacagtagatatgatgcgcaaattagtgtctttggggctaagcttcaaaagaaactggagcagtcaaaaatcttcatggttggttctggggctcttggatgtgaattcttgaagaaccttgcgttaatgggtatttcttgcagtcaaaatgggaagctgactgtgacagatgatgatgttatagagaaaagcaatctcagtcgccagtttctcttccgtgactggaacatcggacagcccaagtccacagttgctgcaaccgctgctatggcaattaatcctaagcttcatgtggaggcccttcagaatagagcaagtcctgagactgaaaatgtgtttaatgatgccttttgggagagtttggatgctgttgttaatgcattggacaatgtcactgcaagaatgtacattgattccagatgtgtatattttcagaaaccacttcttgaatcgggtactctgggtgccaagtgcaacacacagatggtcattcctcacctaacagaaaactatggggcatccagggatccaccagaaaagcaggcacctatgtgcactgtacattcatttcctcacaatattgatcactgccttacgtgggccaggtctgagtttgagggtctacttgagaagactcccactgaagtaaatgctttcctgtcgaaccctggtggatatgcaaccgcagcaagaactgctggtgatgcacaggctagggatcaacttgagcgagttattgaatgccttgagacagacaagtgtgagacattccaagattgtattacctgggcccggcttaagtttgaggattatttctccaaccgtgtaaagcagctgacattcactttccccgaagatgcaatgactagctcgggtgctcctttctggtctgctcctaagcggttcccgcgacctctggagttctcgtcttccgactcaagtcaccttaacttcttgttggctgcatctgtattaagggcagagacatttggaatacacatacctgattgggctaagaacccaaagaaactggctgaagctgtggacaaggtcattgttccggatttccaaccaaaacagggtgttaagatagagacagacgagaaggctactagcctatcctctgcgtctgttgatgatgctgctgtcattgaagagcttattgcaaagctggaagaaatttttaaaacattgccaccaagattccatatgaaccctatacagtttgagaaggatgatgataccaatttccatatggacttgatcgctggttttgccaacatgcgggctaggaactacagcatccctgaagttgacaagttgaaggcgaagttcatagcgggaagaatcatcccagccatcgccacctcaactgcaatggccactggccttgtctgcctggagctttacaaagtcctcgctggtgggcacaaggtcgaagactaccggaacacatttgcaaacctggcaatccccctcttctccatggcggaacctgtgccacccaagaccattaagcaccaagacatgtcgtggactgtctgggaccgctggaccataaccggcaacatcacgctgagggggctcctggggtggctcaaggagaagggcttgaacgcctacagcatatcctgtgggacctcgctgctgtacaactccatgttccccaggcacaaggaccggctggacaagaaggtggtggatgtggccagggaggtggccaaggtggaggtgccatcataccgccgccatctggacgttgtggtggcctgtgaggatgacgacgacaatgatgtcgacgtcccacttgtgtccatttactttcggtaaagaggggctcaccgcccgtttacatgttgatcctgtgcgatatttgtcaatgtttgtctcagaaggatcaagtgtataatttgcgatagcaaccgtgaactagattgtgtttaagcacatactgatgatttcctgtgctgccatctggttagacttggctgggaattgtcgctgagatttggaccactgttatggaattcttaagcataacattatgatagctgttgcatgatactgtcgtcgctaaatgttgttatcttggtatttcaatgcatgtactgctgtgactcgtattctggttgcgatttcagagatgtactcaggtgcaatgtttcatggcatcacgaatttg

SEQ ID NO: 21328 - DNA, 3773 bp, Zea Mays
cgcctgcaaggaaaacacaagacactgacaagtgggcccattactaaccctattaggccagaccagagctgaagcagagcggagaggtctgctcgccggccatcgaatccaggctcctccaaggtgatctctctcgatcgcttccggcctcaccgtagcccgatccacgcaggctcggccacgacccgcggcctccgcacgacctggatctgacgcgcctccccctgcccccgccctccgcctcgtacttcctcgctgcggccgccgtgctcgcgctactcggcggactcctactctatatgcttccccggaagcggggggtcgacgccggcgaggaccaggacttgcacaacaaggcccttcgcgccgccgcagttgctcaggacaaggagaaggtggttgcggagatgggcggcagggcgccagagatcgatgaggacctccacagccgccagctcgccgtctacgggcgcgagaccatgaagcgcctcttcggctccaacgtcctcatctccggactgcagggactaggcgctgagatcgcaaaaaaccttgtccttgcgggtgtcaagtccgtaaccttgcatgatgatggcaaagttgagctatgggacttgtcaagcaactttttcctctcagagaaggatgttgggcaaaaccgtgctctagcttgcgttccaaagctacaagagcttaacaatgctgttatcatctctaccataactggtgatttgatcaaagagcagctttctaattttcaggccgtggtttttactgatatgagcatagaaaaggcagttgagtttgatgattactgccatagtcaccagccgccaattgctttcattaagtcggaagtttgtggcctttttggcagtgttttctgtgattttggtcctgagtttactgttttggatgtcgatggtgaggagccacatacaggaattgtggcatcaatcagcaatgacaacccagcacttgtttcttgtgtggatgatgagcgtctggagttccaggatggtgatctagttgttttctctgaagtgcatggaatgaccgaactcaatgatggaaaaccaagaaagattaagaatgcaaggccttattcttttactctagaagaagacaccacctcatatggcacttacattagaggcggtattgtcacacaggtgaagccaccaaaggttcttaatttcaaaaccttgaaggaggcaatcaaggagccaggagaatttctcatgagtgatttctccaagttcgaccgcccacctcttgtgcatttggccttccaagctttggacaagtttaggactgagttgacacgattccctattgctgggtcagctgatgatgtacagaagctgatagaccttgctattagtattaatgaaactcttggtgatagtaagcttgaagaaattgacaagaaagtcttgcagcattttgcaagtggttcgagggctgttttgaatcctatggctgcaatgtttggtggtattgtaggtcaggaggttgttaaagcatgttcagggaaattccatccactgtaccagttgaaccgttggagcctagtgatttgaagccagagaacagtagatatgatgcgcaaattagtgtctttggggctaagcttcaaaagaaactggagcagtcaaaaatcttcatggttggttctggggctcttggatgtgaattcttgaagaaccttgcgttaatgggtatttcttgcagtcaaaatgggaagctgactgtgacagatgatgatgttatagagaaaagcaatctcagtcgccagtttctcttccgtgactggaacatcggacagcccaagtccacagttgctgcaaccgctgctatggcaattaatcctaagcttcatgtggaggcccttcagaatagagcaagtcctgagactgaaaatgtgtttaatgatgccttttgggagagtttggatgctgttgttaatgcattggacaatgtcactgcaagaatgtacattgattccagatgtgtatattttcagaaaccacttcttgaatcgggtactctgggtgccaagtgcaacacacagatggtcattcctcacctaacagaaaactatggggcatccagggatccaccagaaaagcaggcacctatgtgcactgtacattcatttcctcacaatattgatcactgccttacgtgggccaggtctgagtttgagggtctacttgagaagactcccactgaagtaaatgctttcctgtcgaaccctggtggatatgcaaccgcagcaagaactgctggtgatgcacaggctagggatcaacttgagcgagttattgaatgccttgagacagacaagtgtgagacattccaagattgtattacctgggcccggcttaagtttgaggattatttctccaaccgtgtaaagcagctgacattcactttccccgaagatgcaatgactagctcgggtgctcctttctggtctgctcctaagcggttcccgcgacctctggagttctcgtcttccgactcaagtcaccttaacttcttgttggctgcatctgtattaagggcagagacatttggaatacacatacctgattgggctaagaacccaaagaaactggctgaagctgtggacaaggtcattgttccggatttccaaccaaaacagggtgttaagatagagacagacgagaaggctactagcctatcctctgcgtctgttgatgatgctgctgtcattgaagagcttattgcaaagctggaagaaatttttaaaacattgccaccaagattccatatgaaccctatacagtttgagaaggatgatgataccaatttccatatggacttgatcgctggttttgccaacatgcgggctaggaactacagcatccctgaagttgacaagttgaaggcgaagttcatagcgggaagaatcatcccagccatcgccacctcaactgcaatggccactggccttgtctgcctggagctttacaaagtcctcgctggtgggcacaaggtcgaagactaccggaacacatttgcaaacctggcaatccccctcttctccatggcggaacctgtgccacccaagaccattaagcaccaagacatgtcgtggactgtctgggaccgctggaccataaccggcaacatcacgctgagggggctcctggggtggctcaaggagaagggcttgaacgcctacagcatatcctgtgggacctcgctgctgtacaactccatgttccccaggcacaaggaccggctggacaagaaggtggtggatgtggccagggaggtggccaaggtggaggtgccatcataccgccgccatctggacgttgtggtggcctgtgaggatgacgacgacaatgatgtcgacgtcccacttgtgtccatttactttcggtaaagaggggctcaccgcccgtttacatgttgatcctgtgcgatatttgtcaatgtttgtctcagaaggatcaagtgtataatttgcgatagcaaccgtgaactagattgtgtttaagcacatactgatgatttcctgtgctgccatctggttagacttggctgggaattgtcgctgagatttggaccactgttatggaattcttaagcataacattatgatagctgttgcatgatactgtcgtcgctaaatgttgttatcttggtatttcaatgcatgtactgctgtgactcgtattctggttgcgatttcagagatgtactcaggtgcaatgtttcatggcatcacgaatttg

SEQ ID NO: 21329 - DNA, 3207 bp, Zea Mays
gttaaatatattagttcagtgacaaaaaaattcatgcaaattcctattgacaatatattggaagagaagttcatgttcaaatatacagcctagaaaattgtgccatgtggaacatgccttataaaaatggaccgagggtgtactcaaaaggttttgttatggccgtggtttttactgatatgagcatagaaaaggcagttgagtttgatgattactgccatagtcaccagccgccaattgctttcattaagtcggaagtttgtggcctttttggcagtgttttctgtgattttggtcctgagtttactgttttggatgtcgatggtgaggagccacatacaggaattgtggcatcaatcagcaatgacaacccagcacttgtttcttgtgtggatgatgagcgtctggagttccaggatggtgatctagttgttttctctgaagtgcatggaatgaccgaactcaatgatggaaaaccaagaaagattaagaatgcaaggccttattcttttactctagaagaagacaccacctcatatggcacttacattagaggcggtattgtcacacaggtgaagccaccaaaggttcttaatttcaaaaccttgaaggaggcaatcaaggagccaggagaatttctcatgagtgatttctccaagttcgaccgcccacctcttgtgcatttggccttccaagctttggacaagtttaggactgagttgacacgattccctattgctgggtcagctgatgatgtacagaagctgatagaccttgctattagtattaatgaaactcttggtgatagtaagcttgaagaaattgacaagaaagtcttgcagcattttgcaagtggttcgagggctgttttgaatcctatggctgcaatgtttggtggtattgtaggtcaggaggttgttaaagcatgttcagggaaattccatccactgtaccagttcttctactttgattctgtcgaatctctgccagttgaaccgttggagcctagtgatttgaagccagagaacagtagatatgatgcgcaaattagtgtctttggggctaagcttcaaaagaaactggagcagtcaaaaatcttcatggttggttctggggctcttggatgtgaattcttgaagaaccttgcgttaatgggtatttcttgcagtcaaaatgggaagctgactgtgacagatgatgatgttatagagaaaagcaatctcagtcgccagtttctcttccgtgactggaacatcggacagcccaagtccacagttgctgcaaccgctgctatggcaattaatcctaagcttcatgtggaggcccttcagaatagagcaagtcctgagactgaaaatgtgtttaatgatgccttttgggagagtttggatgctgttgttaatgcattggacaatgtcactgcaagaatgtacattgattccagatgtgtatattttcagaaaccacttcttgaatcgggtactctgggtgccaagtgcaacacacagatggtcattcctcacctaacagaaaactatggggcatccagggatccaccagaaaagcaggcacctatgtgcactgtacattcatttcctcacaatattgatcactgccttacgtgggccaggtctgagtttgagggtctacttgagaagactcccactgaagtaaatgctttcctgtcgaaccctggtggatatgcaaccgcagcaagaactgctggtgatgcacaggctagggatcaacttgagcgagttattgaatgccttgagacagacaagtgtgagacattccaagattgtattacctgggcccggcttaagtttgaggattatttctccaaccgtgtaaagcagctgacattcactttccccgaagatgcaatgactagctcgggtgctcctttctggtctgctcctaagcggttcccgcgacctctggagttctcgtcttccgactcaagtcaccttaacttcttgttggctgcatctgtattaagggcagagacatttggaatacacatacctgattgggctaagaacccaaagaaactggctgaagctgtggacaaggtcattgttccggatttccaaccaaaacagggtgttaagatagagacagacgagaaggctactagcctatcctctgcgtctgttgatgatgctgctgtcattgaagagcttattgcaaagctggaagaaatttttaaaacattgccaccaagattccatatgaaccctatacagtttgagaaggatgatgataccaatttccatatggacttgatcgctggttttgccaacatgcgggctaggaactacagcatccctgaagttgacaagttgaaggcgaagttcatagcgggaagaatcatcccagccatcgccacctcaactgcaatggccactggccttgtctgcctggagctttacaaagtcctcgctggtgggcacaaggtcgaagactaccggaacacatttgcaaacctggcaatccccctcttctccatggcggaacctgtgccacccaagaccattaagcaccaagacatgtcgtggactgtctgggaccgctggaccataaccggcaacatcacgctgagggggctcctggggtggctcaaggagaagggcttgaacgcctacagcatatcctgtgggacctcgctgctgtacaactccatgttccccaggcacaaggaccggctggacaagaaggtggtggatgtggccagggaggtggccaaggtggaggtgccatcataccgccgccatctggacgttgtggtggcctgtgaggatgacgacgacaatgatgtcgacgtcccacttgtgtccatttactttcggtaaagaggggctcaccgcccgtttacatgttgatcctgtgcgatatttgtcaatgtttgtctcagaaggatcaagtgtataatttgcgatagcaaccgtgaactagattgtgtttaagcacatactgatgatttcctgtgctgccatctggttagacttggctgggaattgtcgctgagatttggaccactgttatggaattcttaagcataacattatgatagctgttgcatgatactgtcgtcgctaaatgttgttatcttggtatttcaatgcatgtactgctgtgactcgtattctggttgcgatttcagagatgtactcaggtgcaatgtttcatggcatcacgaatttg

SEQ ID NO: 21330 - DNA, 1001 bp, Zea Mays
ggggatggcactacttcctgtttgtatgaccttatcgaagaccaagaagaagccaggtttggagcgcaagggcaaagtagtcgccgagataaaagatgccgtggacaagtacagcagcgcctatgtttttacctacgataacatgaggaatcagaagctcaaggacctcagggagcagctcaagtcttctagcaggatatttctcgctgggaagaaggttatgcagatagcgctggggcgttcagctgctgatgaagctaagacaggcctccacaaactttcaaagttccttcaaggcaactctggtctgttattcaccaatcttccaagggatgatgttgagaggatgtttcgagaatttgaggagcatgattttgcaaggacaggaagtactgcggcagatacggttgagcttaaggaaggccctctggaacagttcacacatgagatggagccatttctacgcaagcaaggacttccagttcgcttgaacaaaggtgtcgtagagttagttgcagaccatgtagtttgtgaggaaggaaagcccctttcgccagaagcagcacagattctgcggctgcttgggatacagatggcgacattccgtctataccttgtatgtcgctggtcgagcgatgaatttgaagcttacaaagaaggcttgatgcacctaggagctgatgattcctcttaagcttgtgtttcgtgtatacacaacacaaagggagcacttgctgtcttggctgggttggaaactagaaagatgctgtctgcagaaaaattttgctagtgtatttctgagattcagtggggggttttgtatgtgcgacgcggtgctgaacctaaagaaactgtttggattcaggtttctgagttgggtttacttgttcaaactgaatgtagctcagtggcaaatggcaaatctgtacctcgtgcaatgtttttgagccgtccgattaatcacgattaatgatccaagtaggtttagaccattcacgatt

SEQ ID NO: 21331 - DNA, 951 bp, Zea Mays
agacacctgctgccttgacttgactcctttgcacttgggtcgcggtatcagatgaggagacaccagatcgatctgcccttaacaacgcctggaaatcatggatgcaagaacacatagcggccaccggcaaggcgccaccagggaatgttgcaggaaacaacacctgggttggtggcccccagcggcctccagacctgcggctgacgcccggacgccacgtccagctgacggttccgctggagcagctgatacaccggctggtgaaggagaacagagtggtagccttcatcaaggggtcaaggagcgctccccagtgtgggttctcgcagagggtggtgggcatcctggaagggcacggcgtggatttcgtaaccgtcgacgtgctcgacgaggagcacaaccacgggctgagagaaaccctcaaggcgtacagcagctggccgacgttccctcaggtcttcgttggaggggagctcgtgggcggctgcgatatcgtttcgtccatggctgaaaagggggagcttgctgccctactaattcagaaatgaatgctttaccctacagtgacttgaattgcttcgatggttgtctgatccacacgtagtagcacggagatccaagttgttgtacctgctgtgcatgttggatgtggtacgtcccgagtttgaaaagcgtgtgatgtggtatggacgtgtggtttgcctgctgtttataggtagaagttgcctgaggacgacacacatattttttgttttatttatttgtggggatcggagagcgatcgagcctctgtttggttggttggatgtacgtagatggatgaaagagtcggccacagtttatataatgttcggatgaaagttaagtagagacgagttaaacactggagtagttttttgtagcgatgtggtaccaaaaaatcgaaggatggtgtcgtctccgtcttattct

SEQ ID NO: 21332 - DNA, 728 bp, Zea Mays
cttttatcacaccttcccttgttttgatttcttcatcgaggggtggtttcttcgtggccccttatggactctggcaaacatcaacataggagcgcccccagtgctatgtccactccggtagaagatgaacgattcgagctaggtgatctcgatgggacaaagaaaagaattcgggatgtctttttgccaaggtaggatcacgatcctcttgtcacagtcccctttagatatctgggagagtctagccgccacctacatagcgcttgaggctgccgacgatgagggggtcggtctctgtgaccgtctgttgcaggcggaccaccgtgtcatggagctggagtcgaaggttgtgggcctccatgagggtgtagatgaagtggtcgccttcgtccgtgcccagggtgccgatcgaggagagtgactcctcgacgttactaaccgggtgcgcctggccatccgccgtggtgctgcaggggctctggcctttgtgcagttctagtcgggctataagctcgacactagcgatctgttggaggacacgaccgctggtgccctggaggacttcgaagataactttagcatagctattggggttgtggttgaaatccttccactagaggatgtaatcaacgaatccccctagttaggatgtttctgcaagctgcttctgggatatgtatgcccctatgcttttataatgtttcctgaactttgttgatggaatgatt

SEQ ID NO: 21333 - DNA, 561 bp, Zea Mays
atttcttcatcgaggggtggtttcttcgtggccccttatggactctggcaaacatcaacataggagcgcccccagtgctatgtccactccggtagaagatgaacgattcgagctaggtgatctcgatgggacaaagaaaagaattcgggatgtctttttgccaagagctggagtcgaaggttgtgggcctccatgagggtgtagatgaagtggtcgccttcgtccgtgcccagggtgccgatcgaggagagtgactcctcgacgttactaaccgggtgcgcctggccatccgccgtggtgctgcaggggctctggcctttgtgcagttctagtcgggctataagctcgacactagcgatctgttggaggacacgaccgctggtgccctggaggacttcgaagataactttagcatagctattggggttgtggttgaaatccttccactagaggatgtaatcaacgaatccccctagttaggatgtttctgcaagctgcttctgggatatgtatgcccctatgcttttataatgtttcctgaactttgttgatggaatgatt

SEQ ID NO: 21334 - DNA, 4113 bp, Zea Mays
ctaaaattctatttaaagaataaaataaaataaaatagaggattaaaaattagtctccgtaaatcaaacactcttaaatcaagagggatgaattggtgttaagtatttggttgatgctagagaaaaaaccaaacattctccccgttattctgaacagatacaaatgcgaacaaaaaagcatatccatccaaatatcgtaatccatttcattcccctgagaaattaatttatttctgcagtttcctcaaattctcatggtctcggtttctcgcctcgccgcttctccgcctcccgtctcgtctgcaactgcaactccacctcggccctctcatcctcgtcaccaccggccacggccggcctccaccgctgcctgcccaccgctcgctacactcatctccccaaagtggaagaagaatcgggctgttgctcactcgtaccctctaagtgaggcgggcctcaccaaccttgctgctatgccttccacgacgctcgctgcagtccaccaccaccggacaggaagcaccacctagttcctgaccctgatgtccatggcacccgaccatcccttcgatgccttcgtcgccgcagctcgtggcgccataacccaccttcaccttcccgtcatccacatccctggatccaattccagtcctaaccccgactccaagcagcaccacgaacccgaggtcgactgcctgctccacctccacgtcgtcgtcaccaacttcttccacaagcccctcagatcattcgctaggtgcttcaggcccaagcgacgggcaggcaaacactccccgccgctctaccaggagcccagcaatggcgcgaccccgcagcagcaactggagctcctgctctgcattgcgttcgatgccttcgcccacaacctccacgcgctggaggacgcctgcaagcacaaaggcgaggaatttgctgtcgctacccgacagttggagcaatttgtggttttcaggaaggtaatcgatgggaagagggccgatttcgatgggttcctttcaaatctgggctttgcaaaggttgggccaccgccaccgccagcaagcatcatgggtggtgcttcccctgtcccagcaccagcaccagtcagcaatcaggaggatggtgctgtgattgggaacggcgagagggtggacattgctagtggtacacaacagcaggcacaaaaattgcctgcccggttgcttaacattcctttgtcgaatgtggagcgtctgcggtctacgctttctgcagtttcactgacggagctcattgaattagttccgcagctggtgagcagatcatcgacatcggcagatgcacatcctgacaagaagaagcttttctcagtgcaagacttcttcagatatgcggaaattgaaggaaagcgattctttgaagagttagacagagatggtgatggccaagtcactctagaagatctcgaaattgcaacgaggaagaggcggttgccaaggaggtatgctcgagaattgttcaggcgtacaagaagcaacttcttttcgaaatcaattgggtggaagcaatttttatccttgatggaacagaaggaagcaaccattctccgagcatataccacgttgtgtttgagcaagtctggaacacttcacaagaatcaaattttgacttccttgaaaggtgctggacttccagccaatgaagataatgccgctgccatgctacggtatctaaatgctgattcagaaggatcaatctcatatggccatttccgcaacttcatgcttctacttccttcagaacgccttgaggatgatcctcggaacatttggtttgaagcagccaccgttgttgctgtatccccacctatagaaatatctacaggaagtgttttgaagtctgctttagctggaggtcttgcaagtgctctctctacctctctgctgcatcctattgattcaatgaagacacgtgtccaagcatctacactctcatttcccgagctcatttcaaagcttccacaaattggacttcgaggattgtatcgaggttctatcccagcaattctcggccagttttcaagccatggtttgaggacaggaatctttgaagcaagcaagcttgtattaattaatgtcgctccaacacttccagagattcaagtgcaatcaattgcatccttctgcagcacagtcttagggactgcagtccgtatcccttgtgaggttcttaagcagcgattgcaggctggaatattcgacaatgtaggggaggcgattgttggcaccatgcgacgagatggcccaaagggattttttcgtggcactggggccacactgtgtcgcgaggttcctttctatgttgctggaatgtgcctctatgcagaagctaagaaggtatcctcgttttgaactgattcctggtttcaccagaccttcaaagtggcattcacaaatccctatgttgttaacaagtcagctaccattcttaactacctttggctgattttgagctatcagttctattgatttggggggaaaatgtcattcctcttaactccaaaaaggcagcctagtgactttgttttgacacgtgaaagttggtaccaaatggagctgcctaaggggtattttcgctcatttactagtggtactcgtgactacttttggttctcataatttgtaaatgatagctatatttgtatcactatgccttgcatattggtgcatctatgatggcttttttttttgttctgcaggcagcacagcatgttttgaggagagacttggaagcatgggaagtagtggcagttggagcattgtctggaggacttgcggcaatagtgaccactccctttgacgtgatgaagactaggatgatgactgcccctccaggcacaccagtgtctatgcagatgataatcttgtccatccttggaaacgagggtccacttgggctctttaagggcgcgatcccccgcttcttctggattgctcctcttggagcaatgaactttgcaggctatgagcttgccaagaaggcaatgataaaagatgagaaaaattccagtgagtcaacacgagagatcttgccaagaaagcagtgatcaaccatgcaacttttttattttatttttgggtccatgttgcagagaagcaacagaacatctgcctttttttgatattgggaattacattcccgtagggccttgagatggctgtatagtatacattacatgagaaaagtgctagaggacagaggcacatgctggagctgttgttcttttgctggataggacagctcacttgttttgttatccgacgatgatccatagccttccttgttaaacacgatgtaaatttgctcttgtagttaccctgaggacatttggctttcgacccaattgttttggtgttcgaaatggaatgatagagccatgacgaaactaaagaagaaaggacaagcgttcccaccaaagaggtttaggatttagaaatggcaatgggacttgatttcctgcgggaattcctctattataagtgaacgggaaagctattctaccaacgggtggacggggacagaaaactcttctaccgacgggtggacggggacacaaaactcttctaccgacgggtggatggggatggaaagtttcttactccacgtggatgtaaacgggaaaaactcttctatcgacgggtggacgtggacaggaaaacattctctatccccattctctacagagacctattaaacttgcacgtgacgatgttttgtgtactaattaatgttaaaaataaataattactttgtcaagagatcgctcattgtacaaatgtgcacattttgatatacacataatagtttcttacatatgacaatatgtataagtgataatgttttgtattaataataaaagatgtgtgttctatttataatttaagtgggaacgaagatcctgccggagattctcatcccgtggagaacggtgatgggaaagaaatgtctcctgcaaacgttcgaggggatcctcacaggaaaaaattcaacgggaggacagagatggagagttatttcctgttagggaatttttcattgtcatccctactaggatctatgctaaacatcattttc

SEQ ID NO: 21335 - DNA, 4606 bp, Zea Mays
ctaaaattctatttaaagaataaaataaaataaaatagaggattaaaaattagtctccgtaaatcaaacactcttaaatcaagagggatgaattggtgttaagtatttggttgatgctagagaaaaaaccaaacattctccccgttattctgaacagatacaaatgcgaacaaaaaagcatatccatccaaatatcgtaatccatttcattcccctgagaaattaatttatttctgcagtttcctcaaattctcatggtctcggtttctcgcctcgccgcttctccgcctcccgtctcgtctgcaactgcaactccacctcggccctctcatcctcgtcaccaccggccacggccggcctccaccgctgcctgcccaccgctcgctacactcatctccccaaagtggaagaagaatcgggctgttgctcactcgtaccctctaagtgaggcgggcctcaccaaccttgctgctatgccttccacgacgctcgctgcagtccaccaccaccggacaggaagcaccacctagttcctgaccctgatgtccatggcacccgaccatcccttcgatgccttcgtcgccgcagctcgtggcgccataacccaccttcaccttcccgtcatccacatccctggatccaattccagtcctaaccccgactccaagcagcaccacgaacccgaggtcgactgcctgctccacctccacgtcgtcgtcaccaacttcttccacaagcccctcagatcattcgctaggtgcttcaggcccaagcgacgggcaggcaaacactccccgccgctctaccaggagcccagcaatggcgcgaccccgcagcagcaactggagctcctgctctgcattgcgttcgatgccttcgcccacaacctccacgcgctggaggacgcctgcaagcacaaaggcgaggaatttgctgtcgctacccgacagttggagcaatttgtggttttcaggaaggtaatcgatgggaagagggccgatttcgatgggttcctttcaaatctgggctttgcaaaggttgggccaccgccaccgccagcaagcatcatgggtggtgcttcccctgtcccagcaccagcaccagtcagcaatcaggaggatggtgctgtgattgggaacggcgagagggtggacattgctagtggtacacaacagcaggcacaaaaattgcctgcccggttgcttaacattcctttgtcgaatgtggagcgtctgcggtctacgctttctgcagtttcactgacggagctcattgaattagttccgcagctggtgagcagatcatcgacatcggcagatgcacatcctgacaagaagaagcttttctcagtgcaagacttcttcagatatgcggaaattgaaggaaagcgattctttgaagagttagacagagatggtgatggccaagtcactctagaagatctcgaaattgcaacgaggaagaggcggttgccaaggagaaggaagcaaccattctccgagcatataccacgttgtgtttgagcaagtctggaacacttcacaagaatcaaattttgacttccttgaaaggtgctggacttccagccaatgaagataatgccgctgccatgctacggtatctaaatgctgattcagaaggatcaatctcatatggccatttccgcaacttcatgcttctacttccttcagaacgccttgaggatgatcctcggaacatttggtttgaagcagccaccgttgttgctgtatccccacctatagaaatatctacaggaagtgttttgaagtctgctttagctggaggtcttgcaagtgctctctctacctctctgctgcatcctattgattcaatgaaggtacagtagcatgcttctttatactgttttagttaccatgcttctttataccgttttagttcaaacaagtgattcagtaaagcacatgatattgaactggcactttctatgtatagcatcccattttgagatcttactttattatgtctatgatttcttatcacaaatgaatacacatatggtatgccatggcattatttgtggcctcacgaattaatatgggataacaaaagtttagcctgctgaccaaagtaatcaaaatgcaattgctttatctttaatgtatcagacacgtgtccaagcatctacactctcatttcccgagctcatttcaaagcttccacaaattggacttcgaggattgtatcgaggttctatcccagcaattctcggccagttttcaagccatggtttgaggacaggaatctttgaagcaagcaagcttgtattaattaatgtcgctccaacacttccagagattcaagtatgattaactactctagtacttgtgcaaaatttaaggctatctccagcagcttactcattttcatctctcatttcaaactccactctgaaaacaatgtagtttacagtgcaaaacaatgttttgcacgaccatatgcatgatctgttggccatagccttatggagcccaccttataaatcttatgattgaactttttagaatttagtagctgtaatagaaactttctggttctctgtaatagttattgtgttttgcggaattgcttgatgatatgctttttgttccataggtgcaatcaattgcatccttctgcagcacagtcttagggactgcagtccgtatcccttgtgaggttcttaagcagcgattgcaggctggaatattcgacaatgtaggggaggcgattgttggcaccatgcgacgagatggcccaaagggattttttcgtggcactggggccacactgtgtcgcgaggttcctttctatgttgctggaatgtgcctctatgcagaagctaagaaggtatcctcgttttgaactgattcctggtttcaccagaccttcaaagtggcattcacaaatccctatgttgttaacaagtcagctaccattcttaactacctttggctgattttgagctatcagttctattgatttggggggaaaatgtcattcctcttaactccaaaaaggcagcctagtgactttgttttgacacgtgaaagttggtaccaaatggagctgcctaaggggtattttcgctcatttactagtggtactcgtgactacttttggttctcataatttgtaaatgatagctatatttgtatcactatgccttgcatattggtgcatctatgatggcttttttttttgttctgcaggcagcacagcatgttttgaggagagacttggaagcatgggaagtagtggcagttggagcattgtctggaggacttgcggcaatagtgaccactccctttgacgtgatgaagactaggatgatgactgcccctccaggcacaccagtgtctatgcagatgataatcttgtccatccttggaaacgagggtccacttgggctctttaagggcgcgatcccccgcttcttctggattgctcctcttggagcaatgaactttgcaggctatgagcttgccaagaaggcaatgataaaagatgagaaaaattccagtgagtcaacacgagagatcttgccaagaaagcagtgatcaaccatgcaacttttttattttatttttgggtccatgttgcagagaagcaacagaacatctgcctttttttgatattgggaattacattcccgtagggccttgagatggctgtatagtatacattacatgagaaaagtgctagaggacagaggcacatgctggagctgttgttcttttgctggataggacagctcacttgttttgttatccgacgatgatccatagccttccttgttaaacacgatgtaaatttgctcttgtagttaccctgaggacatttggctttcgacccaattgttttggtgttcgaaatggaatgatagagccatgacgaaactaaagaagaaaggacaagcgttcccaccaaagaggtttaggatttagaaatggcaatgggacttgatttcctgcgggaattcctctattataagtgaacgggaaagctattctaccaacgggtggacggggacagaaaactcttctaccgacgggtggacggggacacaaaactcttctaccgacgggtggatggggatggaaagtttcttactccacgtggatgtaaacgggaaaaactcttctatcgacgggtggacgtggacaggaaaacattctctatccccattctctacagagacctattaaacttgcacgtgacgatgttttgtgtactaattaatgttaaaaataaataattactttgtcaagagatcgctcattgtacaaatgtgcacattttgatatacacataatagtttcttacatatgacaatatgtataagtgataatgttttgtattaataataaaagatgtgtgttctatttataatttaagtgggaacgaagatcctgccggagattctcatcccgtggagaacggtgatgggaaagaaatgtctcctgcaaacgttcgaggggatcctcacaggaaaaaattcaacgggaggacagagatggagagttatttcctgttagggaatttttcattgtcatccctactaggatctatgctaaacatcattttc

SEQ ID NO: 21336 - DNA, 946 bp, Zea Mays
atgtggagctactcctggctggagttccagcagctcaatgacatctacaggttcaaggcggaggagtactcgcacacgtctgttaacaagttcaacgtgaacccggagtccatcccgggctgtggatccgggagcaaaaaccgtgtcaactgcgcccgtgcgggtgagggatcactagaggctggactcgcgctagagatggtcaaggcaaaagcaagggttcgctatgagcctggaccggcttttgaggaggtcaaagaagaagccatgcttgatatatcaccaacagactcgacagagttttggttaattcagtggcctaaagaccagtgctattttctcatgtttgagattcttcaattccaggcaaatagaattttaaggcaaaagattgctggggatcagtttctcgatcttgttagtgttgaaacagaagtgcgctcagtttacaaagagctctacagcatttacaaaactaccctcaaatccaagagtttaataaatgaggtgaatcaggttgcttagccgaggatcatcataaaaccaaaatcctgcaatggtgtttggccattgtgcactgcacaacagatctgctatcatgttcttggccttgttcatggcatatggacacccgttcctcaagctgtggaagattacattgcaactccaaaacctaatggctaccaaagcctacacacaacagtgataccatttttaatgagaataagaacagaagatatggatttaatagcagaaagaggcattgctacacattacagtggaagaggagtggtttctggacctgttcggcttggaatatcaagtggaagaaatgccaaggggaaagtaatctgcctgaacaacacaggctttgctctgaggattggttggctcaatgcaatccgcgagtggcaagaaaagtttgttggtaatatgagttctaggg

SEQ ID NO: 21337 - DNA, 2668 bp, Zea Mays
gaaaagtctgtgtcaacgggagatgaggaaagggtatccgccgtggatataattgggtaagccagaagccaaagcaccagaagatatacagggggaggggttcctttcttctcccaccgtcgctgccgccagctgcccagctgcgcctcgtcgtcagagggttccctttcctgttcgatgtgacgcagccccccgctgcgccccgacggcggcggcctcaccggctggcgatgggcacgacaaactgagacctccctttccacccaagttctctttcctccttctctctctctctccctctctctgcggaaggtggcggtgctgcactctgttggtacaagagtctggagtgcagtgcagatccacccggccggacctggatcgatatctccgtttgttggttcaataaaaccaataaattctggggttcaactgaacccccaatccgagtataacggccactctgtgctgcaaggtttgtctaagattttcgtgcaataacggccatgtggaggctcaagcagttcatccccaaggagcagcccagccccagcggcctcgagggtcggacggtcgatgttggcaatgtcaaggtgcacgtccgagaggccattgctgagggtgggttctcatctgtctatgctgctcgagacctggtaaacccagcgaagcagtacgccctcaagcgcgtgattgtccaggacgaggagtcgctgaacctggtccagaaggagatcacggtgatgcggtcgctcaaggggcaccctaatgtggtcacactggttgcacacgccatactggacatgggacggatgagggaggcactgctgctcatggagttctgcgggaagtcactggtttctgtgttggagggcagaggagcaggttactttgatgaggagaaggtggcgctgatcttccgggatgtttgcaatgctgtctttgcgatgcattgccagacgccacctcttgctcacaggctcttgggtgtctcttgtatagaatttgctacttcaaatcagcatttgatggagaatcaaagctccaaatacttaacgggaactatcgcatcccagaattgccgaagtacagttcttctattacaacacttatcaaagacatgcttaattcttctccagatgccagaccggacatcacacaggtgtggttccgtattaatgagttacttccattggagctgcaaaaggatttacctgatggatctccatctggatcagcatttgaatctcacactgccactgatgaagtatcaatgaggccacagcagatgagtggctcttcatcaagagagaatatcaagaatacctctcttagtgattcttccaacataatggagccagcttttgataaagagcccattgatcaagtcagatcaaagcaatcacaggctaagaaccagaacacagcagctcgcaattcatctcggaagtctctgtctgcatcagttgatagttcccctggggatttcgaaattaggttttctgcaaatggctcggagtctaggttggaggaaaccaaaacggtaataacagagaataaaacaaagatacaaactactgccttcaactcctgtgcgtcagactttgataatatcaaaatgaactcacgaaacactactgacagtataaacataactagcaaattgaaagagcttcaattggaagcagaagtaactttactcaaggaacaattaaagatagcaaacctggagaaggaagaaatttcgttgaagtttgataagttgtctgccatttgctcctctcagaggcgagagatacaagagcttaagcaagctttggctgcagcttatgttacgccaccagctaaacagttcagagaaaattcaagtgttgaagtcaccccacccagcaaaagcctcgacactccgccgagggagaagattgaaggaacccctccagagctccggcaaggcctgtttacttcaagcccaggaacaccaagccctgacctgaaaacatggtcagctttccttgaagagccaaaatctcaagcagctgtgaagagtgtccaccccaggtcagtccgaactctgcgtgcatcaaacagcaacaaagccagctcgttgggacagtcaaatataagttctagcaccgatccatttgcgtttggtcaagatagttttaaggctgctccttctggaactgtacttcccctgttatcaaacatggggaatacttctcagctcagtaatctgaatatagaagaaaagaaagacggatcctaccaaccagatggatggactgggttttgattgtgctatagtaatttatgtgccaaaagagtcaagagttcatatggtcttggtggtgtggtatactgaaggtgcagagaggaatgcctgaactggtgtaggtatgtgtgacaatgctttttgtacaattgttctggtcctgagctagcatcgtgatgcgttcagttgtaactgtagtgcaaatgtaagttgcaacttgcaattaattgctagatattagatataggaagatgtttttttttcttatgtagacaagcttgtggtgtcatgaattttggaggcatgctatatagatatagccatctattataccatatcatgaataaagggttatcatttagtgacaattggccaatatactcactttaatactat

SEQ ID NO: 21338 - DNA, 2738 bp, Zea Mays
caaagcaccagaagatatacagggggaggggttcctttcttctcccaccgtcgctgccgccagctgcccagctgcgcctcgtcgtcagagggttccctttcctgttcgatgtgacgcagccccccgctgcgccccgacggcggcggcctcaccggctggcgatgggcacgacaaactgagacctccctttccacccaagttctctttcctccttctctctctctctccctctctctgcggaaggtggcggtgctgcactctgttggtacaagagtctggagtgcagtgcagatccacccggccggacctggatcgatatctccgtttgttggttcaataaaaccaataaattctggggttcaactgaacccccaatccgagtataacggccactctgtgctgcaaggtttgtctaagattttcgtgcaataacggccatgtggaggctcaagcagttcatccccaaggagcagcccagccccagcggcctcgagggtcggacggtcgatgttggcaatgtcaaggtgcacgtccgagaggccattgctgagggtgggttctcatctgtctatgctgctcgagacctggtaaacccagcgaagcagtacgccctcaagcgcgtgattgtccaggacgaggagtcgctgaacctggtccagaaggagatcacggtgatgcggtcgctcaaggggcaccctaatgtggtcacactggttgcacacgccatactggacatgggacggatgagggaggcactgctgctcatggagttctgcgggaagtcactggtttctgtgttggagggcagaggagcaggttactttgatgaggagaaggtggcgctgatcttccgggatgtttgcaatgctgtctttgcgatgcattgccagacgccacctcttgctcacaggctcttgggtgtctcttgtatagaatttgctacttcaaatcagcatttgatggagaatcaaagctccaaatacttaacgggaactatcgcatcccagaattgccgaagtacagttcttctattacaacacttatcaaagacatgcttaattcttctccagatgccagaccggacatcacacaggcaagggctttgcttgattggccattcacttccatgaacttaggtgtggttccgtattaatgagttacttccattggagctgcaaaaggatttacctgatggatctccatctggatcagcatttgaatctcacactgccactgatgaagtatcaatgaggccacagcagatgagtggctcttcatcaagagagaatatcaagaatacctctcttagtgattcttccaacataatggtacaaagtcctctgaaagctatagggaacatgggttctatgggtgcattttggtcaactcaacatgctcaggagctatcttttgctgatgacaaggagccagcttttgataaagagcccattgatcaagtcagatcaaagcaatcacaggctaagaaccagaacacagcagctcgcaattcatctcggaagtctctgtctgcatcagttgatagttcccctggggatttcgaaattaggttttctgcaaatggctcggagtctaggttggaggaaaccaaaacggtaataacagagaataaaacaaagatacaaactactgccttcaactcctgtgcgtcagactttgataatatcaaaatgaactcacgaaacactactgacagtataaacataactagcaaattgaaagagcttcaattggaagcagaagtaactttactcaaggaacaattaaagatagcaaacctggagaaggaagaaatttcgttgaagtttgataagttgtctgccatttgctcctctcagaggcgagagatacaagagcttaagcaagctttggctgcagcttatgttacgccaccagctaaacagttcagagaaaattcaagtgttgaagtcaccccacccagcaaaagcctcgacactccgccgagggagaagattgaaggaacccctccagagctccggcaaggcctgtttacttcaagcccaggaacaccaagccctgacctgaaaacatggtcagctttccttgaagagccaaaatctcaagcagctgtgaagagtgtccaccccaggtcagtccgaactctgcgtgcatcaaacagcaacaaagccagctcgttgggacagtcaaatataagttctagcaccgatccatttgcgtttggtcaagatagttttaaggctgctccttctggaactgtacttcccctgttatcaaacatggggaatacttctcagctcagtaatctgaatatagaagaaaagaaagacggatcctaccaaccagatggatggactgggttttgattgtgctatagtaatttatgtgccaaaagagtcaagagttcatatggtcttggtggtgtggtatactgaaggtgcagagaggaatgcctgaactggtgtaggtatgtgtgacaatgctttttgtacaattgttctggtcctgagctagcatcgtgatgcgttcagttgtaactgtagtgcaaatgtaagttgcaacttgcaattaattgctagatattagatataggaagatgtttttttttcttatgtagacaagcttgtggtgtcatgaattttggaggcatgctatatagatatagccatctattataccatatcatgaataaagggttatcatttagtgacaattggccaatatactcactttaatactat

SEQ ID NO: 21339 - DNA, 2689 bp, Zea Mays
ggaggggttcctttcttctcccaccgtcgctgccgccagctgcccagctgcgcctcgtcgtcagagggttccctttcctgttcgatgtgacgcagccccccgctgcgccccgacggcggcggcctcaccggctggcgatgggcacgacaaactgagacctccctttccacccaagttctctttcctccttctctctctctctccctctctctgcggaaggtggcggtgctgcactctgttggtacaagagtctggagtgcagtgcagatccacccggccggacctggatcgatatctccgtttgttggttctttccatcgtgcaggttcaataaaaccaataaattctggggttcaactgaacccccaatccgagtataacggccactctgtgctgcaaggtttgtctaagattttcgtgcaataacggccatgtggaggctcaagcagttcatccccaaggagcagcccagccccagcggcctcgagggtcggacggtcgatgttggcaatgtcaaggtgcacgtccgagaggccattgctgagggtgggttctcatctgtctatgctgctcgagacctggtaaacccagcgaagcagtacgccctcaagcgcgtgattgtccaggacgaggagtcgctgaacctggtccagaaggagatcacggtgatgcggtcgctcaaggggcaccctaatgtggtcacactggttgcacacgccatactggacatgggacggatgagggaggcactgctgctcatggagttctgcgggaagtcactggtttctgtgttggagggcagaggagcaggttactttgatgaggagaaggtggcgctgatcttccgggatgtttgcaatgctgtctttgcgatgcattgccagacgccacctcttgctcacaggctcttgggtgtctcttgtatagaatttgctacttcaaatcagcatttgatggagaatcaaagctccaaatacttaacgggaactatcgcatcccagaattgccgaagtacagttcttctattacaacacttatcaaagacatgcttaattcttctccagatgccagaccggacatcacacaggtgtggttccgtattaatgagttacttccattggagctgcaaaaggatttacctgatggatctccatctggatcagcatttgaatctcacactgccactgatgaagtatcaatgaggccacagcagatgagtggctcttcatcaagagagaatatcaagaatacctctcttagtgattcttccaacataatggtacaaagtcctctgaaagctatagggaacatgggttctatgggtgcattttggtcaactcaacatgctcaggagctatcttttgctgatgacaaggagccagcttttgataaagagcccattgatcaagtcagatcaaagcaatcacaggctaagaaccagaacacagcagctcgcaattcatctcggaagtctctgtctgcatcagttgatagttcccctggggatttcgaaattaggttttctgcaaatggctcggagtctaggttggaggaaaccaaaacggtaataacagagaataaaacaaagatacaaactactgccttcaactcctgtgcgtcagactttgataatatcaaaatgaactcacgaaacactactgacagtataaacataactagcaaattgaaagagcttcaattggaagcagaagtaactttactcaaggaacaattaaagatagcaaacctggagaaggaagaaatttcgttgaagtttgataagttgtctgccatttgctcctctcagaggcgagagatacaagagcttaagcaagctttggctgcagcttatgttacgccaccagctaaacagttcagagaaaattcaagtgttgaagtcaccccacccagcaaaagcctcgacactccgccgagggagaagattgaaggaacccctccagagctccggcaaggcctgtttacttcaagcccaggaacaccaagccctgacctgaaaacatggtcagctttccttgaagagccaaaatctcaagcagctgtgaagagtgtccaccccaggtcagtccgaactctgcgtgcatcaaacagcaacaaagccagctcgttgggacagtcaaatataagttctagcaccgatccatttgcgtttggtcaagatagttttaaggctgctccttctggaactgtacttcccctgttatcaaacatggggaatacttctcagctcagtaatctgaatatagaagaaaagaaagacggatcctaccaaccagatggatggactgggttttgattgtgctatagtaatttatgtgccaaaagagtcaagagttcatatggtcttggtggtgtggtatactgaaggtgcagagaggaatgcctgaactggtgtaggtatgtgtgacaatgctttttgtacaattgttctggtcctgagctagcatcgtgatgcgttcagttgtaactgtagtgcaaatgtaagttgcaacttgcaattaattgctagatattagatataggaagatgtttttttttcttatgtagacaagcttgtggtgtcatgaattttggaggcatgctatatagatatagccatctattataccatatcatgaataaagggttatcatttagtgacaattggccaatatactcactttaatactat

SEQ ID NO: 21340 - DNA, 2536 bp, Zea Mays
aggggttcctttcttctcccaccgtcgctgccgccagctgcccagctgcgcctcgtcgtcagagggttccctttcctgttcgatgtgacgcagccccccgctgcgccccgacggcggcggcctcaccggctggcgatgggcacgacaaactgagacctccctttccacccaagttctctttcctccttctctctctctctccctctctctgcggaaggtggcggtgctgcactctgttggtacaagagtctggagtgcagtgcagatccacccggccggacctggatcgatatctccgtttgttggttctttccatcgtgcaggttcaataaaaccaataaattctggggttcaactgaacccccaatccgagtataacggccactctgtgctgcaaggtttgtctaagattttcgtgcaataacggccatgtggaggctcaagcagttcatccccaaggagcagcccagccccagcggcctcgagggtcggacggtcgatgttggcaatgtcaaggtgcacgtccgagaggccattgctgagggacgaggagtcgctgaacctggtccagaaggagatcacggtgatgcggtcgctcaaggggcaccctaatgtggtcacactggttgcacacgccatactggacatgggacggatgagggaggcactgctgctcatggagttctgcgggaagtcactggtttctgtgttggagggcagaggagcaggttactttgatgaggagaaggtggcgctgatcttccgggatgtttgcaatgctgtctttgcgatgcattgccagacgccacctcttgctcacaggctcttgggtgtctcttgtatagaatttgctacttcaaatcagcatttgatggagaatcaaagctccaaatacttaacgggaactatcgcatcccagaattgccgaagtacagtgtggttccgtattaatgagttacttccattggagctgcaaaaggatttacctgatggatctccatctggatcagcatttgaatctcacactgccactgatgaagtatcaatgaggccacagcagatgagtggctcttcatcaagagagaatatcaagaatacctctcttagtgattcttccaacataatggtacaaagtcctctgaaagctatagggaacatgggttctatgggtgcattttggtcaactcaacatgctcaggagctatcttttgctgatgacaaggagccagcttttgataaagagcccattgatcaagtcagatcaaagcaatcacaggctaagaaccagaacacagcagctcgcaattcatctcggaagtctctgtctgcatcagttgatagttcccctggggatttcgaaattaggttttctgcaaatggctcggagtctaggttggaggaaaccaaaacggtaataacagagaataaaacaaagatacaaactactgccttcaactcctgtgcgtcagactttgataatatcaaaatgaactcacgaaacactactgacagtataaacataactagcaaattgaaagagcttcaattggaagcagaagtaactttactcaaggaacaattaaagatagcaaacctggagaaggaagaaatttcgttgaagtttgataagttgtctgccatttgctcctctcagaggcgagagatacaagagcttaagcaagctttggctgcagcttatgttacgccaccagctaaacagttcagagaaaattcaagtgttgaagtcaccccacccagcaaaagcctcgacactccgccgagggagaagattgaaggaacccctccagagctccggcaaggcctgtttacttcaagcccaggaacaccaagccctgacctgaaaacatggtcagctttccttgaagagccaaaatctcaagcagctgtgaagagtgtccaccccaggtcagtccgaactctgcgtgcatcaaacagcaacaaagccagctcgttgggacagtcaaatataagttctagcaccgatccatttgcgtttggtcaagatagttttaaggctgctccttctggaactgtacttcccctgttatcaaacatggggaatacttctcagctcagtaatctgaatatagaagaaaagaaagacggatcctaccaaccagatggatggactgggttttgattgtgctatagtaatttatgtgccaaaagagtcaagagttcatatggtcttggtggtgtggtatactgaaggtgcagagaggaatgcctgaactggtgtaggtatgtgtgacaatgctttttgtacaattgttctggtcctgagctagcatcgtgatgcgttcagttgtaactgtagtgcaaatgtaagttgcaacttgcaattaattgctagatattagatataggaagatgtttttttttcttatgtagacaagcttgtggtgtcatgaattttggaggcatgctatatagatatagccatctattataccatatcatgaataaagggttatcatttagtgacaattggccaatatactcactttaatactat

SEQ ID NO: 21341 - DNA, 2918 bp, Zea Mays
gttcctttcttctcccaccgtcgctgccgccagctgcccagctgcgcctcgtcgtcagagggttccctttcctgttcgatgtgacgcagccccccgctgcgccccgacggcggcggcctcaccggctggcgatgggcacgacaaactgagacctccctttccacccaagttctctttcctccttctctctctctctccctctctctgcggaaggtggcggtgctgcactctgttggtacaagagtctggagtgcagtgcagatccacccggccggacctggatcgatatctccgtttgttggttcaataaaaccaataaattctggggttcaactgaacccccaatccgagtataacggccactctgtgctgcaaggtttgtctaagattttcgtgcaataacggccatgtggaggctcaagcagttcatccccaaggagcagcccagccccagcggcctcgagggtcggacggtcgatgttggcaatgtcaaggtgcacgtccgagaggccattgctgagggtgggttctcatctgtctatgctgctcgagacctggtaaacccagcgaagcagtacgccctcaagcgcgtgattgtccaggacgaggagtcgctgaacctggtccagaaggagatcacggtgatgcggtcgctcaaggggcaccctaatgtggtcacactggttgcacacgccatactggacatgggacggatgagggaggcactgctgctcatggagttctgcgggaagtcactggtttctgtgttggagggcagaggagcaggttactttgatgaggagaaggtggcgctgatcttccgggatgtttgcaatgctgtctttgcgatgcattgccagacgccacctcttgctcacaggctcttgggtgtctcttgtatagaatttgctacttcaaatcagcatttgatggagaatcaaagctccaaatacttaacgggaactatcgcatcccagaattgccgaagtacagttcttctattacaacacttatcaaagacatgcttaattcttctccagatgccagaccggacatcacacaggtgtggttccgtattaatgagttacttccattggagctgcaaaaggatttacctgatggatctccatctggatcagcatttgaatctcacactgccactgatgaaggtttgcttattagcatattagcttttgtggaggaaatcattctctgctgtgtacctgattactgtttatctagtagatttatctagataaatattaggaggtgtaggaatgttgttgtgtggaatctcatattgtgtaaatagaaagccgtctgttttgttaattgctcatattgtttctctacatcttaaattttccttggcctgaaaataatacttctagtttgttcaatgacctaaattatttgttgcagtatcaatgaggccacagcagatgagtggctcttcatcaagagagaatatcaagaatacctctcttagtgattcttccaacataatggtacaaagtcctctgaaagctatagggaacatgggttctatgggtgcattttggtcaactcaacatgctcaggagctatcttttgctgatgacaaggagccagcttttgataaagagcccattgatcaagtcagatcaaagcaatcacaggctaagaaccagaacacagcagctcgcaattcatctcggaagtctctgtctgcatcagttgatagttcccctggggatttcgaaattaggttttctgcaaatggctcggagtctaggttggaggaaaccaaaacggtaataacagagaataaaacaaagatacaaactactgccttcaactcctgtgcgtcagactttgataatatcaaaatgaactcacgaaacactactgacagtataaacataactagcaaattgaaagagcttcaattggaagcagaagtaactttactcaaggaacaattaaagatagcaaacctggagaaggaagaaatttcgttgaagtttgataagttgtctgccatttgctcctctcagaggcgagagatacaagagcttaagcaagctttggctgcagcttatgttacgccaccagctaaacagttcagagaaaattcaagtgttgaagtcaccccacccagcaaaagcctcgacactccgccgagggagaagattgaaggaacccctccagagctccggcaaggcctgtttacttcaagcccaggaacaccaagccctgacctgaaaacatggtcagctttccttgaagagccaaaatctcaagcagctgtgaagagtgtccaccccaggtcagtccgaactctgcgtgcatcaaacagcaacaaagccagctcgttgggacagtcaaatataagttctagcaccgatccatttgcgtttggtcaagatagttttaaggctgctccttctggaactgtacttcccctgttatcaaacatggggaatacttctcagctcagtaatctgaatatagaagaaaagaaagacggatcctaccaaccagatggatggactgggttttgattgtgctatagtaatttatgtgccaaaagagtcaagagttcatatggtcttggtggtgtggtatactgaaggtgcagagaggaatgcctgaactggtgtaggtatgtgtgacaatgctttttgtacaattgttctggtcctgagctagcatcgtgatgcgttcagttgtaactgtagtgcaaatgtaagttgcaacttgcaattaattgctagatattagatataggaagatgtttttttttcttatgtagacaagcttgtggtgtcatgaattttggaggcatgctatatagatatagccatctattataccatatcatgaataaagggttatcatttagtgacaattggccaatatactcactttaatactat

SEQ ID NO: 21342 - DNA, 2961 bp, Zea Mays
gttcctttcttctcccaccgtcgctgccgccagctgcccagctgcgcctcgtcgtcagagggttccctttcctgttcgatgtgacgcagccccccgctgcgccccgacggcggcggcctcaccggctggcgatgggcacgacaaactgagacctccctttccacccaagttctctttcctccttctctctctctctccctctctctgcggaaggtggcggtgctgcactctgttggtacaagagtctggagtgcagtgcagatccacccggccggacctggatcgatatctccgtttgttggttcaataaaaccaataaattctggggttcaactgaacccccaatccgagtataacggccactctgtgctgcaaggtttgtctaagattttcgtgcaataacggccatgtggaggctcaagcagttcatccccaaggagcagcccagccccagcggcctcgagggtcggacggtcgatgttggcaatgtcaaggtgcacgtccgagaggccattgctgagggtgggttctcatctgtctatgctgctcgagacctggtaaacccagcgaagcagtacgccctcaagcgcgtgattgtccaggacgaggagtcgctgaacctggtccagaaggagatcacggtgatgcggtcgctcaaggggcaccctaatgtggtcacactggttgcacacgccatactggacatgggacggatgagggaggcactgctgctcatggagttctgcgggaagtcactggtttctgtgttggagggcagaggagcaggttactttgatgaggagaaggtggcgctgatcttccgggatgtttgcaatgctgtctttgcgatgcattgccagacgccacctcttgctcacaggctcttgggtgtctcttgtatagaatttgctacttcaaatcagcatttgatggagaatcaaagctccaaatacttaacgggaactatcgcatcccagaattgccgaagtacagttcttctattacaacacttatcaaagacatgcttaattcttctccagatgccagaccggacatcacacaggcaagggctttgcttgattggccattcacttccatgaacttaggtgtggttccgtattaatgagttacttccattggagctgcaaaaggatttacctgatggatctccatctggatcagcatttgaatctcacactgccactgatgaaggtttgcttattagcatattagcttttgtggaggaaatcattctctgctgtgtacctgattactgtttatctagtagatttatctagataaatattaggaggtgtaggaatgttgttgtgtggaatctcatattgtgtaaatagaaagccgtctgttttgttaattgctcatattgtttctctacatcttaaattttccttggcctgaaaataatacttctagtttgttcaatgacctaaattatttgttgcagtatcaatgaggccacagcagatgagtggctcttcatcaagagagaatatcaagaatacctctcttagtgattcttccaacataatggtacaaagtcctctgaaagctatagggaacatgggttctatgggtgcattttggtcaactcaacatgctcaggagctatcttttgctgatgacaaggagccagcttttgataaagagcccattgatcaagtcagatcaaagcaatcacaggctaagaaccagaacacagcagctcgcaattcatctcggaagtctctgtctgcatcagttgatagttcccctggggatttcgaaattaggttttctgcaaatggctcggagtctaggttggaggaaaccaaaacggtaataacagagaataaaacaaagatacaaactactgccttcaactcctgtgcgtcagactttgataatatcaaaatgaactcacgaaacactactgacagtataaacataactagcaaattgaaagagcttcaattggaagcagaagtaactttactcaaggaacaattaaagatagcaaacctggagaaggaagaaatttcgttgaagtttgataagttgtctgccatttgctcctctcagaggcgagagatacaagagcttaagcaagctttggctgcagcttatgttacgccaccagctaaacagttcagagaaaattcaagtgttgaagtcaccccacccagcaaaagcctcgacactccgccgagggagaagattgaaggaacccctccagagctccggcaaggcctgtttacttcaagcccaggaacaccaagccctgacctgaaaacatggtcagctttccttgaagagccaaaatctcaagcagctgtgaagagtgtccaccccaggtcagtccgaactctgcgtgcatcaaacagcaacaaagccagctcgttgggacagtcaaatataagttctagcaccgatccatttgcgtttggtcaagatagttttaaggctgctccttctggaactgtacttcccctgttatcaaacatggggaatacttctcagctcagtaatctgaatatagaagaaaagaaagacggatcctaccaaccagatggatggactgggttttgattgtgctatagtaatttatgtgccaaaagagtcaagagttcatatggtcttggtggtgtggtatactgaaggtgcagagaggaatgcctgaactggtgtaggtatgtgtgacaatgctttttgtacaattgttctggtcctgagctagcatcgtgatgcgttcagttgtaactgtagtgcaaatgtaagttgcaacttgcaattaattgctagatattagatataggaagatgtttttttttcttatgtagacaagcttgtggtgtcatgaattttggaggcatgctatatagatatagccatctattataccatatcatgaataaagggttatcatttagtgacaattggccaatatactcactttaatactat

SEQ ID NO: 21343 - DNA, 2726 bp, Zea Mays
gttcctttcttctcccaccgtcgctgccgccagctgcccagctgcgcctcgtcgtcagagggttccctttcctgttcgatgtgacgcagccccccgctgcgccccgacggcggcggcctcaccggctggcgatgggcacgacaaactgagacctccctttccacccaagttctctttcctccttctctctctctctccctctctctgcggaaggtggcggtgctgcactctgttggtacaagagtctggagtgcagtgcagatccacccggccggacctggatcgatatctccgtttgttggttctttccatcgtgcaggttcaataaaaccaataaattctggggttcaactgaacccccaatccgagtataacggccactctgtgctgcaaggtttgtctaagattttcgtgcaataacggccatgtggaggctcaagcagttcatccccaaggagcagcccagccccagcggcctcgagggtcggacggtcgatgttggcaatgtcaaggtgcacgtccgagaggccattgctgagggtgggttctcatctgtctatgctgctcgagacctggtaaacccagcgaagcagtacgccctcaagcgcgtgattgtccaggacgaggagtcgctgaacctggtccagaaggagatcacggtgatgcggtcgctcaaggggcaccctaatgtggtcacactggttgcacacgccatactggacatgggacggatgagggaggcactgctgctcatggagttctgcgggaagtcactggtttctgtgttggagggcagaggagcaggttactttgatgaggagaaggtggcgctgatcttccgggatgtttgcaatgctgtctttgcgatgcattgccagacgccacctcttgctcacaggctcttgggtgtctcttgtatagaatttgctacttcaaatcagcatttgatggagaatcaaagctccaaatacttaacgggaactatcgcatcccagaattgccgaagtacagttcttctattacaacacttatcaaagacatgcttaattcttctccagatgccagaccggacatcacacaggcaagggctttgcttgattggccattcacttccatgaacttaggtgtggttccgtattaatgagttacttccattggagctgcaaaaggatttacctgatggatctccatctggatcagcatttgaatctcacactgccactgatgaagtatcaatgaggccacagcagatgagtggctcttcatcaagagagaatatcaagaatacctctcttagtgattcttccaacataatggtacaaagtcctctgaaagctatagggaacatgggttctatgggtgcattttggtcaactcaacatgctcaggagctatcttttgctgatgacaaggagccagcttttgataaagagcccattgatcaagtcagatcaaagcaatcacaggctaagaaccagaacacagcagctcgcaattcatctcggaagtctctgtctgcatcagttgatagttcccctggggatttcgaaattaggttttctgcaaatggctcggagtctaggttggaggaaaccaaaacggtaataacagagaataaaacaaagatacaaactactgccttcaactcctgtgcgtcagactttgataatatcaaaatgaactcacgaaacactactgacagtataaacataactagcaaattgaaagagcttcaattggaagcagaagtaactttactcaaggaacaattaaagatagcaaacctggagaaggaagaaatttcgttgaagtttgataagttgtctgccatttgctcctctcagaggcgagagatacaagagcttaagcaagctttggctgcagcttatgttacgccaccagctaaacagttcagagaaaattcaagtgttgaagtcaccccacccagcaaaagcctcgacactccgccgagggagaagattgaaggaacccctccagagctccggcaaggcctgtttacttcaagcccaggaacaccaagccctgacctgaaaacatggtcagctttccttgaagagccaaaatctcaagcagctgtgaagagtgtccaccccaggtcagtccgaactctgcgtgcatcaaacagcaacaaagccagctcgttgggacagtcaaatataagttctagcaccgatccatttgcgtttggtcaagatagttttaaggctgctccttctggaactgtacttcccctgttatcaaacatggggaatacttctcagctcagtaatctgaatatagaagaaaagaaagacggatcctaccaaccagatggatggactgggttttgattgtgctatagtaatttatgtgccaaaagagtcaagagttcatatggtcttggtggtgtggtatactgaaggtgcagagaggaatgcctgaactggtgtaggtatgtgtgacaatgctttttgtacaattgttctggtcctgagctagcatcgtgatgcgttcagttgtaactgtagtgcaaatgtaagttgcaacttgcaattaattgctagatattagatataggaagatgtttttttttcttatgtagacaagcttgtggtgtcatgaattttggaggcatgctatatagatatagccatctattataccatatcatgaataaagggttatcatttagtgacaattggccaatatactcactttaatactat

SEQ ID NO: 21344 - DNA, 2494 bp, Zea Mays
ctttcttctcccaccgtcgctgccgccagctgcccagctgcgcctcgtcgtcagagggttccctttcctgttcgatgtgacgcagccccccgctgcgccccgacggcggcggcctcaccggctggcgatgggcacgacaaactgagacctccctttccacccaagttctctttcctccttctctctctctctccctctctctgcggaaggtggcggtgctgcactctgttggtacaagagtctggagtgcagtgcagatccacccggccggacctggatcgatatctccgtttgttggttcaataaaaccaataaattctggggttcaactgaacccccaatccgagtataacggccactctgtgctgcaaggtttgtctaagattttcgtgcaataacggccatgtggaggctcaagcagttcatccccaaggagcagcccagccccagcggcctcgagggtcggacggtcgatgttggcaatgtcaaggtgcacgtccgagaggccattgctgagggtgggttctcatctgtctatgctgctcgagacctggtaaacccagcgaagcagtacgccctcaagcgcgtgattgtccaggacgaggagtcgctgaacctggtccagaaggagatcacggtgatgcggtcgctcaaggggcaccctaatgtggtcacactggttgcacacgccatactggacatgggacggatgagggaggcactgctgctcatggagttctgcgggaagtcactggtttctgtgttggagggcagaggagcaggttactttgatgaggagaaggtggcgctgatcttccgggatgtttgcaatgctgtctttgcgatgcattgccagacgccacctcttgctcacaggctcttgggtgtctcttgtatagaatttgctacttcaaatcagcatttgatggagaatcaaagctccaaatacttaacgggaactatcgcatcccagaattgccgaagtacagtgtggttccgtattaatgagttacttccattggagctgcaaaaggatttacctgatggatctccatctggatcagcatttgaatctcacactgccactgatgaagtatcaatgaggccacagcagatgagtggctcttcatcaagagagaatatcaagaatacctctcttagtgattcttccaacataatggagccagcttttgataaagagcccattgatcaagtcagatcaaagcaatcacaggctaagaaccagaacacagcagctcgcaattcatctcggaagtctctgtctgcatcagttgatagttcccctggggatttcgaaattaggttttctgcaaatggctcggagtctaggttggaggaaaccaaaacggtaataacagagaataaaacaaagatacaaactactgccttcaactcctgtgcgtcagactttgataatatcaaaatgaactcacgaaacactactgacagtataaacataactagcaaattgaaagagcttcaattggaagcagaagtaactttactcaaggaacaattaaagatagcaaacctggagaaggaagaaatttcgttgaagtttgataagttgtctgccatttgctcctctcagaggcgagagatacaagagcttaagcaagctttggctgcagcttatgttacgccaccagctaaacagttcagagaaaattcaagtgttgaagtcaccccacccagcaaaagcctcgacactccgccgagggagaagattgaaggaacccctccagagctccggcaaggcctgtttacttcaagcccaggaacaccaagccctgacctgaaaacatggtcagctttccttgaagagccaaaatctcaagcagctgtgaagagtgtccaccccaggtcagtccgaactctgcgtgcatcaaacagcaacaaagccagctcgttgggacagtcaaatataagttctagcaccgatccatttgcgtttggtcaagatagttttaaggctgctccttctggaactgtacttcccctgttatcaaacatggggaatacttctcagctcagtaatctgaatatagaagaaaagaaagacggatcctaccaaccagatggatggactgggttttgattgtgctatagtaatttatgtgccaaaagagtcaagagttcatatggtcttggtggtgtggtatactgaaggtgcagagaggaatgcctgaactggtgtaggtatgtgtgacaatgctttttgtacaattgttctggtcctgagctagcatcgtgatgcgttcagttgtaactgtagtgcaaatgtaagttgcaacttgcaattaattgctagatattagatataggaagatgtttttttttcttatgtagacaagcttgtggtgtcatgaattttggaggcatgctatatagatatagccatctattataccatatcatgaataaagggttatcatttagtgacaattggccaatatactcactttaatactat

SEQ ID NO: 21345 - DNA, 2553 bp, Zea Mays
ttcttctcccaccgtcgctgccgccagctgcccagctgcgcctcgtcgtcagagggttccctttcctgttcgatgtgacgcagccccccgctgcgccccgacggcggcggcctcaccggctggcgatgggcacgacaaactgagacctccctttccacccaagttctctttcctccttctctctctctctccctctctctgcggaaggtggcggtgctgcactctgttggtacaagagtctggagtgcagtgcagatccacccggccggacctggatcgatatctccgtttgttggttcaataaaaccaataaattctggggttcaactgaacccccaatccgagtataacggccactctgtgctgcaaggtttgtctaagattttcgtgcaataacggccatgtggaggctcaagcagttcatccccaaggagcagcccagccccagcggcctcgagggtcggacggtcgatgttggcaatgtcaaggtgcacgtccgagaggccattgctgagggtgggttctcatctgtctatgctgctcgagacctggtaaacccagcgaagcagtacgccctcaagcgcgtgattgtccaggacgaggagtcgctgaacctggtccagaaggagatcacggtgatgcggtcgctcaaggggcaccctaatgtggtcacactggttgcacacgccatactggacatgggacggatgagggaggcactgctgctcatggagttctgcgggaagtcactggtttctgtgttggagggcagaggagcaggttactttgatgaggagaaggtggcgctgatcttccgggatgtttgcaatgctgtctttgcgatgcattgccagacgccacctcttgctcacaggctcttgggtgtctcttgtatagaatttgctacttcaaatcagcatttgatggagaatcaaagctccaaatacttaacgggaactatcgcatcccagaattgccgaagtacagttcttctattacaacacttatcaaagacatgcttaattcttctccagatgccagaccggacatcacacagtatcaatgaggccacagcagatgagtggctcttcatcaagagagaatatcaagaatacctctcttagtgattcttccaacataatggtacaaagtcctctgaaagctatagggaacatgggttctatgggtgcattttggtcaactcaacatgctcaggagctatcttttgctgatgacaaggagccagcttttgataaagagcccattgatcaagtcagatcaaagcaatcacaggctaagaaccagaacacagcagctcgcaattcatctcggaagtctctgtctgcatcagttgatagttcccctggggatttcgaaattaggttttctgcaaatggctcggagtctaggttggaggaaaccaaaacggtaataacagagaataaaacaaagatacaaactactgccttcaactcctgtgcgtcagactttgataatatcaaaatgaactcacgaaacactactgacagtataaacataactagcaaattgaaagagcttcaattggaagcagaagtaactttactcaaggaacaattaaagatagcaaacctggagaaggaagaaatttcgttgaagtttgataagttgtctgccatttgctcctctcagaggcgagagatacaagagcttaagcaagctttggctgcagcttatgttacgccaccagctaaacagttcagagaaaattcaagtgttgaagtcaccccacccagcaaaagcctcgacactccgccgagggagaagattgaaggaacccctccagagctccggcaaggcctgtttacttcaagcccaggaacaccaagccctgacctgaaaacatggtcagctttccttgaagagccaaaatctcaagcagctgtgaagagtgtccaccccaggtcagtccgaactctgcgtgcatcaaacagcaacaaagccagctcgttgggacagtcaaatataagttctagcaccgatccatttgcgtttggtcaagatagttttaaggctgctccttctggaactgtacttcccctgttatcaaacatggggaatacttctcagctcagtaatctgaatatagaagaaaagaaagacggatcctaccaaccagatggatggactgggttttgattgtgctatagtaatttatgtgccaaaagagtcaagagttcatatggtcttggtggtgtggtatactgaaggtgcagagaggaatgcctgaactggtgtaggtatgtgtgacaatgctttttgtacaattgttctggtcctgagctagcatcgtgatgcgttcagttgtaactgtagtgcaaatgtaagttgcaacttgcaattaattgctagatattagatataggaagatgtttttttttcttatgtagacaagcttgtggtgtcatgaattttggaggcatgctatatagatatagccatctattataccatatcatgaataaagggttatcatttagtgacaattggccaatatactcactttaatactat

SEQ ID NO: 21346 - DNA, 1893 bp, Zea Mays
ggatcttccggtggtccagcgacgtttgcaggatgcacccacatcacggctgtaaaatccgctgcaacacagctagctctcctccccagaatctcgccggattccgccccccgccgcgccctcgcttccgccgcaggttcgcgtctgtgcccgcgcgtgttgtactaccggcggacggcggtgttggtggtggttggtggagttgccgacgacggtaggctatggactaccggccctccgacagcagcggaactgatgatgatcttccacaatttccacataagagtatcagaggcagcggacgtgtcagtggtaatgggcgagctgttgttcctgctggttcatatgctagggcaccaactgatatggtagcacaagttcaacaacttgagcaagaagcatatcgctcagtccttcgtgcattcaaagcccagtctgatgccattacatgggagaaggaaggtctcatgactgaacttaggaaggagctaagagtatctgacaaagcacacagggaactgttaaatagagtcaacaacgataatattatatgtagcataagggaatggagatcaacaggagggcttcaggcaagcttgtctaataacccacaactgattcatgactctgttcccagtcctaccacctctggccgtaagaggcaaaagacatctcaatctgttcctgctttacctgcaccgcctcctgcgatgcattcacaacagctggctacaccaacacagccatcatcttcaactgctaggaaagcagtacccccaggccataaaggcaaaaagatgaaaccaggtcagaaggtaccaggtggctctgcagccaagcctataccatcttcagcaggtcctagtggaagaggaccgcacatgaataggggtggttctgctcctgaagctcaagctcagaatgtcgatccattgattggtcgtaaagtgatgagtcggtggcctgaagacaatagtttctatgaagcagtcatatacgaatatgatgctgaaacgggccttcatgcactggtttatgacatcgatacggcagatgaaacctgggagtgggttgatcttaaagagatgggacctgaagacataagatggcaagaggatgactctgggatagaccctgttacatatctgcgcagccggggtggcccaactagtggcgttaggaagccagcaggtcgcggtgggcccatgccaggttctgtaagaggaagaggattacagaaaaacatgcctaagaaagattttccacctccacaaaatggtgttggcaagagaagttccgatgacattgatatccttcataccgagagcctaataaaagaggtggggaaagtttttagcgttagcaatcctgatccacaggaagtagaaaaggcaaagaaagcactgaaggagcaagaacagtcgttgattgacgccatagcaaggcttgctgaggcatcagatggtgaaagtgacgggcacaatcgtgggcgaaggaacttgtatgctgctaaccagcatcaagcaagctacgttggtgccatgcccgtcggtgacagagctggtgccatgtaaacactgcatgaacgcatgcacaacataaaataactgcctgttgtacaatccatcgcctaatatttatcctggatttaggtctctgtaggctcttttgctttgggatgcttttttttttacaattgtaattcagaacgctgaccatgtaaagcttgtagatgcgtgtttctgtctctagctttttgttagtgtggtctcggcttcaatatgcatgataaagggaaaaagaaaaagatcacatttgttaaacaggtgtttcaccattttaatgcagcaatcattcgtcatgaccatgaatgcgcaaaaaaaaaaaaaaaaa

SEQ ID NO: 21347 - DNA, 1888 bp, Zea Mays
ggatcttccggtggtccagcgacgtttgcaggatgcacccacatcacggctgtaaaatccgctgcaactagctctcctccccagaatctcgccggattccgccccccgccgcgccctcgcttccgccgcaggttcgcgtctgtgcccgcgcgtgttgtactaccggcggacggcggtgttggtggtggttggtggagttgccgacgacggtaggctatggactaccggccctccgacagcagcggaactgatgatgatcttccacaatttccacataagagtatcagaggcagcggacgtgtcagtggtaatgggcgagctgttgttcctgctggttcatatgctagggcaccaactgatatggtagcacaagttcaacaacttgagcaagaagcatatcgctcagtccttcgtgcattcaaagcccagtctgatgccattacatgggagaaggaaggtctcatgactgaacttaggaaggagctaagagtatctgacaaagcacacagggaactgttaaatagagtcaacaacgataatattatatgtagcataagggaatggagatcaacaggagggcttcaggcaagcttgtctaataacccacaactgattcatgactctgttcccagtcctaccacctctggccgtaagaggcaaaagacatctcaatctgttcctgctttacctgcaccgcctcctgcgatgcattcacaacagctggctacaccaacacagccatcatcttcaactgctaggaaagcagtacccccaggccataaaggcaaaaagatgaaaccaggtcagaaggtaccaggtggctctgcagccaagcctataccatcttcagcaggtcctagtggaagaggaccgcacatgaataggggtggttctgctcctgaagctcaagctcagaatgtcgatccattgattggtcgtaaagtgatgagtcggtggcctgaagacaatagtttctatgaagcagtcatatacgaatatgatgctgaaacgggccttcatgcactggtttatgacatcgatacggcagatgaaacctgggagtgggttgatcttaaagagatgggacctgaagacataagatggcaagaggatgactctgggatagaccctgttacatatctgcgcagccggggtggcccaactagtggcgttaggaagccagcaggtcgcggtgggcccatgccaggttctgtaagaggaagaggattacagaaaaacatgcctaagaaagattttccacctccacaaaatggtgttggcaagagaagttccgatgacattgatatccttcataccgagagcctaataaaagaggtggggaaagtttttagcgttagcaatcctgatccacaggaagtagaaaaggcaaagaaagcactgaaggagcaagaacagtcgttgattgacgccatagcaaggcttgctgaggcatcagatggtgaaagtgacgggcacaatcgtgggcgaaggaacttgtatgctgctaaccagcatcaagcaagctacgttggtgccatgcccgtcggtgacagagctggtgccatgtaaacactgcatgaacgcatgcacaacataaaataactgcctgttgtacaatccatcgcctaatatttatcctggatttaggtctctgtaggctcttttgctttgggatgcttttttttttacaattgtaattcagaacgctgaccatgtaaagcttgtagatgcgtgtttctgtctctagctttttgttagtgtggtctcggcttcaatatgcatgataaagggaaaaagaaaaagatcacatttgttaaacaggtgtttcaccattttaatgcagcaatcattcgtcatgaccatgaatgcgcaaaaaaaaaaaaaaaaa

SEQ ID NO: 21348 - DNA, 1805 bp, Zea Mays
gcgacgtttgcaggatgcacccacatcacggctgtaaaatccgctgcaagtccgtcgattgttgttttatctttcctctttctctatcgaaaacggagcgcctgatacgatagtagcagcacagctagctctcctccccagaatctcgccggattccgccccccgccgcgccctcgcttccgccgcaggttcgcgtctgtgcccgcgcgtgttgtactaccggcggacggcggtgttggtggtggttggtggagttgccgacgacggtaggctatggactaccggccctccgacagcagcggaactgatgatgatcttccacaatttccacataagagtatcagaggcagcggacgtgtcagtggagaaggaaggtctcatgactgaacttaggaaggagctaagagtatctgacaaagcacacagggaactgttaaatagagtcaacaacgataatattatatgtagcataagggaatggagatcaacaggagggcttcaggcaagcttgtctaataacccacaactgattcatgactctgttcccagtcctaccacctctggccgtaagaggcaaaagacatctcaatctgttcctgctttacctgcaccgcctcctgcgatgcattcacaacagctggctacaccaacacagccatcatcttcaactgctaggaaagcagtacccccaggccataaaggcaaaaagatgaaaccaggtcagaaggtaccaggtggctctgcagccaagcctataccatcttcagcaggtcctagtggaagaggaccgcacatgaataggggtggttctgctcctgaagctcaagctcagaatgtcgatccattgattggtcgtaaagtgatgagtcggtggcctgaagacaatagtttctatgaagcagtcatatacgaatatgatgctgaaacgggccttcatgcactggtttatgacatcgatacggcagatgaaacctgggagtgggttgatcttaaagagatgggacctgaagacataagatggcaagaggatgactctgggatagaccctgttacatatctgcgcagccggggtggcccaactagtggcgttaggaagccagcaggtcgcggtgggcccatgccaggttctgtaagaggaagaggattacagaaaaacatgcctaagaaagattttccacctccacaaaatggtgttggcaagagaagttccgatgacattgatatccttcataccgagagcctaataaaagaggtggggaaagtttttagcgttagcaatcctgatccacaggaagtagaaaaggcaaagaaagcactgaaggagcaagaacagtcgttgattgacgccatagcaaggcttgctgaggcatcagatggtgaaagtgacgggcacaatcgtgggcgaaggaacttgtatgctgctaaccagcatcaagcaagctacgttggtgccatgcccgtcggtgacagagctggtgccatgtaaacactgcatgaacgcatgcacaacataaaataactgcctgttgtacaatccatcgcctaatatttatcctggatttaggtctctgtaggctcttttgctttgggatgcttttttttttacaattgtaattcagaacgctgaccatgtaaagcttgtagatgcgtgtttctgtctctagctttttgttagtgtggtctcggcttcaatatgcatgataaagggaaaaagaaaaagatcacatttgttaaacaggtgtttcaccattttaatgcagcaatcattcgtcatgaccatgaatgcgcaaaaaaaaaaaaaaaaa

SEQ ID NO: 21349 - DNA, 2134 bp, Zea Mays
atttgacaatgtttggagagcagatagcctaatgccaaaatagcaaatttctcagccgtgacaacacagcctgcgctccccttctttcccgttcggctcacagcgaagaaggaagccggttagggtttccacctcctttcccctcctctccttcagcgacgaccgcgggccacaccctcgatatccttcccctcggacccggaggcgagcagcagcctccagcgcctgccacgcctgcccgtctcgttattgggaggattcgccatgtctgacatggagtccgtcgcagctcttatgaactcgacaagctccaagatacagcagcttcaggaggcatttgctgagcttgagagccagagcacggtttccatgaacctcaagtggaagcagcttgaagaccactttcgtggtcttgaacagtccctcaagaaaaagtttgacgagctaaaagagcaggagaaggagttccaggagactgtcgcaaaatcagagcagattctggagcagcgggaggcagctgttgtggcaaaggaactgacctctttggagaagttgcaggagaagagggaagctgcattagctatgatctttagcaagtccaggctttccttacctgttcctaccatcaacccaatgaacaaggcgctgaataatcttggtgtcaagtggccaaaaccggcatctgaggagagtgtgcacttgcaagttgataatgctgtagtgacgcctcgttctgagcttgttgcactctgtgaggaaatgaatgtgaaggggcttcataagttcatatccgacaacaggaagaacttggctgccatccgcgaggaaattcccagtgcactgaagaaaacatctcatccgtatggcttggtgttggattccctggaagacttctattctggagataatcttgtattagatggcaaaaaggatggggaccttctgggtgttagaaggacgtgcctgatgttgttggagtcactcggacagttgcacactgctggtataacttgtttctctttggagggtcacatgcttacaactaatatcatagagcgagcaaagaagattgcatttgagtggaagtccaagttagataatcttgagattgatgctagtaatgggaactgtcttgaagctcatgcatttcttcaactcctggcaacctttggtatttctgctgaatataatgaagatgacctgtgcaaattgcttccatatgtcagtcgtcgtcgtcagacacctgaactttgtcgattgcttgggttgtcacagaaaatgccaggtgtcattgaagttctggtgaaaagtggaagaactattgatgcaattaatttagcttacgtgtttgagcttactgaacagtttgaaccagtgcaactgcttaaagcatatctgagggatgttaagaaactgtcacatgccaggaatgtcaaaatttctcctggagcacagatcataaacttgaggagcagtaccctgtggacccacttcagaaaagggttttgcagctagagaaagcaaaggcagacaagaggagggctgttgaagcagccaagccacagtccaagaggcctcgtgccaatggatcgacctttgcaccccgtgctacaggctttgctgacaagagcttctacccagcaaccccagagaggcatccctccaacccttacgagaggcagtttgtgtatggtgctgaggctcatcttcctccaatgatgagttcagcgtcttacccgatgcaacctgcccatggaccttattacggcaatggctacccagtacagtaccaggtcccgtatatccactaatggagacagccaggtgcaggtgctctttcctaactatctagcttagcctgctgccccttgttgtagtcctatcagttactctgctagtttgcctagatggaaatagttggaccactcaatgtgtgtgctctgagtggctgttgtgaaatctgttaattttatgccctaatgacatgacataaattactcctaatacttagctatcgatgaatctccctatgtactttcattcggcttgtgaaatgaactatggcggttttcgacttccgtgcactacatgtaaatatcatgtcgtcatgtacacctgaactgtcatttgcagc

SEQ ID NO: 21350 - DNA, 1642 bp, Zea Mays
tgtttggagagcagatagcctaatgccaaaatagcaaatttctcagccgtgacaacacagcctgcgctccccttctttcccgttcggctcacagcgaagaaggaagccggttagggtttccacctcctttcccctcctctccttcagcgacgaccgcgggccacaccctcgatatccttcccctcggacccggaggcgagcagcagcctccagcgcctgccacgcctgcccgtctcgttattgggtgagtgcccgattttgctctcttcagtcacagatccagacattttccctcccatttattagtattcgggtagccccgtggtggggtagcgaaaccttgattagtttggtccatcgaggaggattcgccatgtctgacatggagtccgtcgcagctcttatgaactcgacaagctccaagatacagcagcttcaggaggcatttgctgagcttgagagccagagcacggtttccatgaacctcaagtggaagcagcttgaagaccactttcgtggtcttgaacagtccctcaagaaaaagtttgacgagctaaaagagcaggagaaggagttccaggagactgtcgcaaaatcagagcagattctggagcagcgggaggcagctgttgtggcaaaggaactgacctctttggagaagttgcaggagaagagggaagctgcattagctatgatctttagcaagtccaggctttccttacctgttcctaccatcaacccaatgaacaaggcgctgaataatcttggtgtcaagtggccaaaaccggcatctgaggagagtgtgcacttgcaagttgataatgctgtagtgacgcctcgttctgagcttgttgcactctgtgaggaaatgaatgtgaaggggcttcataagttcatatccgacaacaggaagaacttggctgccatccgcgaggaaattcccagtgcactgaagaaaacatctcatccgtatggcttggtgttggattccctggaagacttctattctggagataatcttgtattagatggcaaaaaggatggggaccttctgggtgttagaaggacgtgcctgatgttgttggagtcactcggacagttgcacactgctggtataacttgtttctctttggagggtcacatgcttacaactaatatcatagagcgagcaaagaagattgcatttgagtggaagtccaagttagataatcttgagattgatgctagtaatgggaactgtcttgaagctcatgcatttcttcaactcctggcaacctttggtatttctgctgaatataatgaagatgacctgtgcaaattgcttccatatgtcagtcgtcgtcgtcagacacctgaactttgtcgattgcttgggttgtcacagaaaatgccaggtgtcattgaagttctggtgaaaagtggaagaactattgatgcaattaatttagcttacgtgtttgagcttactgaacagtttgaaccagtgcaactgcttaaagcatatctgagggatgttaagaaactgtcacatgccaggaatgtcaaaatttctcctggagcacagtttgtttctcatcgtacatacctcttatgacaaagtgaccgctggccagtcgttgcaccctcagtggagagctctgat

SEQ ID NO: 21351 - DNA, 1783 bp, Zea Mays
tgtttggagagcagatagcctaatgccaaaatagcaaatttctcagccgtgacaacacagcctgcgctccccttctttcccgttcggctcacagcgaagaaggaagccggttagggtttccacctcctttcccctcctctccttcagcgacgaccgcgggccacaccctcgatatccttcccctcggacccggaggcgagcagcagcctccagcgcctgccacgcctgcccgtctcgttattgggtgagtgcccgattttgctctcttcagtcacagatccagacattttccctcccatttattagtattcgggtagccccgtggtggggtagcgaaaccttgattagtttggtccatcgaggtacccatttttcccgagcgggaccgaccttcattcccatctgcgtttgtacatctttctgtggaattctaggaacgccttgtagatgcttgcttgtggtgctgtgttcttaattgtagttgctctttgaggaggattcgccatgtctgacatggagtccgtcgcagctcttatgaactcgacaagctccaagatacagcagcttcaggaggcatttgctgagcttgagagccagagcacggtttccatgaacctcaagtggaagcagcttgaagaccactttcgtggtcttgaacagtccctcaagaaaaagtttgacgagctaaaagagcaggagaaggagttccaggagactgtcgcaaaatcagagcagattctggagcagcgggaggcagctgttgtggcaaaggaactgacctctttggagaagttgcaggagaagagggaagctgcattagctatgatctttagcaagtccaggctttccttacctgttcctaccatcaacccaatgaacaaggcgctgaataatcttggtgtcaagtggccaaaaccggcatctgaggagagtgtgcacttgcaagttgataatgctgtagtgacgcctcgttctgagcttgttgcactctgtgaggaaatgaatgtgaaggggcttcataagttcatatccgacaacaggaagaacttggctgccatccgcgaggaaattcccagtgcactgaagaaaacatctcatccgtatggcttggtgttggattccctggaagacttctattctggagataatcttgtattagatggcaaaaaggatggggaccttctgggtgttagaaggacgtgcctgatgttgttggagtcactcggacagttgcacactgctggtataacttgtttctctttggagggtcacatgcttacaactaatatcatagagcgagcaaagaagattgcatttgagtggaagtccaagttagataatcttgagattgatgctagtaatgggaactgtcttgaagctcatgcatttcttcaactcctggcaacctttggtatttctgctgaatataatgaagatgacctgtgcaaattgcttccatatgtcagtcgtcgtcgtcagacacctgaactttgtcgattgcttgggttgtcacagaaaatgccaggtgtcattgaagttctggtgaaaagtggaagaactattgatgcaattaatttagcttacgtgtttgagcttactgaacagtttgaaccagtgcaactgcttaaagcatatctgagggatgttaagaaactgtcacatgccaggaatgtcaaaatttctcctggagcacagccatccagccatgctgaatgccaaaaaagagccttggtgccatctccaagtccaagtgtaatctttgttgcttctgtgaagagttgct

SEQ ID NO: 21352 - DNA, 3328 bp, Zea Mays
tgtttggagagcagatagcctaatgccaaaatagcaaatttctcagccgtgacaacacagcctgcgctccccttctttcccgttcggctcacagcgaagaaggaagccggttagggtttccacctcctttcccctcctctccttcagcgacgaccgcgggccacaccctcgatatccttcccctcggacccggaggcgagcagcagcctccagcgcctgccacgcctgcccgtctcgttattgggaggattcgccatgtctgacatggagtccgtcgcagctcttatgaactcgacaagctccaagatacagcagcttcaggaggcatttgctgagcttgagagccagagcacggtttccatgaacctcaagtggaagcagcttgaagaccactttcgtggtcttgaacagtccctcaagaaaaagtttgacgagctaaaagagcaggagaaggagttccaggagactgtcgcaaaatcagagcagattctggagcagcgggaggcagctgttgtggcaaaggaactgacctctttggagaagttgcaggagaagagggaagctgcattagctatgatctttagcaagtccaggctttccttacctgttcctaccatcaacccaatgaacaaggcgctgaataatcttggtgtcaagtggccaaaaccggcatctgaggagagtgtgcacttgcaagttgataatgctgtagtgacgcctcgttctgagcttgttgcactctgtgaggaaatgaatgtgaaggggcttcataagttcatatccgacaacaggaagaacttggctgccatccgcgaggaaattcccagtgcactgaagaaaacatctcatccgtatggcttggtgttggattccctggaagacttctattctggagataatcttgtattagatggcaaaaaggatggggaccttctgggtgttagaaggacgtgcctgatgttgttggagtcactcggacagttgcacactgctggtataacttgtttctctttggagggtcacatgcttacaactaatatcatagagcgagcaaagaagattgcatttgagtggaagtccaagttagataatcttgagattgatgctagtaatgggaactgtcttgaagctcatgcatttcttcaactcctggcaacctttggtatttctgctgaatataatgaagatgacctgtgcaaattgcttccatatgtcagtcgtcgtcgtcagacacctgaactttgtcgattgcttgggttgtcacagaaaatgccaggtgtcattgaagttctggtgaaaagtggaagaactattgatgcaattaatttagcttacgtgtttgagcttactgaacagtttgaaccagtgcaactgcttaaagcatatctgagggatgttaagaaactgtcacatgccaggaatgtcaaaatttctcctggagcacaggcagaggatggagggggcaggcaaggatggcaacccgttgaggaattatcggattggcaagactctcggaattggctcattcgggaaggtgaaaattgcggagcatatcagcactggacacaaggtggcaatcaagattctcaaccgccgtaaaatcagaggcatggagatggaagagaaagttaaaagagagattaagatattgaggttatttatgcatccacatattatccgcctctatgaggttatagacacaccggctgatatttatgttgttatggagtatgttaagtgtggggaattatttgattacattgttgagaaaggtaggctgcaggaggaagaggctcgccgtttcttccaacagattatatccggtgttgaatattgccatagaaacatggtggtgcatcgtgatctaaagccagaaaacctcctattggattcaaaatgcaatgttaagattgcagattttggcttaagtaatgttatgcgggatggtcattttctgaagacaagttgtggtagcccaaattatgctgctcctgaggtgatatctggtaaactatatgctggacctgaagttgatgtgtggagctgtggggttattctttatgctcttttatgtggtactctgccatttgatgacgagaacataccaaacctttttaagaaaataaagggtggaatatatacccttcccagccatttgtctggtgcagcaagggatttgattccaagaatgctagttgtcgatcctatgaagcggatcaccattcgtgaaattcgcgaacatgattggttcaaaattcttctcccgcgctatttgactgtgcctcctccagatagtgcgcaacaagtcaaaaaggttgatgaggaaactctccgtgaggttttaggtatgggatatgacaagaacctgttggtggaatcaatccaaaaaaggctgcaaaatgaggcaactgttgcatattacttactcttggacaataggctccgtacaaccagtggctatcttggagctgaatgtcaagaagctatggactcctcattctcaaacatcgcatcatatgaaacaccaagttcagcacgtgggaatagacagcaaatatttatggagtctccagttggcttgagaccacatcttccagctgagaggaaatgggctcttggtcttcagtctcgagcacatccaaaagaaataatgtctgaagtgctgaaagctctgcaagaattaaatgtttactggaaaaagataggtcactataacatgaagtgcagatggagtcctggctttcctgctcaaattcataacaatcataacttcagtgcagggtccattgaaactgatagcctgagtgagaggttaagtttaattaagtttgaaattcagctgtacaaaacaagagacgagaaatacctcctcgatttgcaaagagtcagtgggccacagctcctctttctggacttgtgcgcggcctttctaactcaactgagagttctttgatttctggtgtcagctttccatcagttgcattccttgcgtttcactagaggaatgtctaaatcgctcacaaagctgtaaatagtaatctccagtagattggattttctggagtatgtagatggtaggcatgagaagatgttatgcctggcggcgatcttctgaaccagactgtgtggagtaacttatctcctaattctttacggctggccagctgccggtgaattagatcagtgcttttgctggcataatgtctatctacattaataatttcagctattacaacggttaattaaatgctgtgctgcttacaggccaaatgagattatgttttgaaggcaactctttttttttgcattaattgattggagttgtttg

SEQ ID NO: 21353 - DNA, 2160 bp, Zea Mays
cgcggccccaccgcaccagcgagccgcccgcacggggaagcacacgcatctccgcgcgccacggacgcccgaggcctcccgtcgcggtggtcgctttcggccctggaccccgctgccggaatcgaatctcctcccctcctttctcctccgacctcccccttccccccatccgcggctccgccccgacccgtgacgcctcgcttcgcacccctctcgcatctccgccgcatctccgccgcgatcctcccgactagccgcgactgcctcccctccagcggccagaggatggagggggcaggcaaggatggcaacccgttgaggaattatcggattggcaagactctcggaattggctcattcgggaaggtgaaaattgcggagcatatcagcactggacacaaggtggcaatcaagattctcaaccgccgtaaaatcagaggcatggagatggaagagaaagttaaaagagagattaagatattgaggttatttatgcatccacatattatccgcctctatgaggttatagacacaccggctgatatttatgttgttatggagtatgttaagtgtggggaattatttgattacattgttgagaaaggtaggctgcaggaggaagaggctcgccgtttcttccaacagattatatccggtgttgaatattgccatagaaacatggtggtgcatcgtgatctaaagccagaaaacctcctattggattcaaaatgcaatgttaagattgcagattttggcttaagtaatgttatgcgggatggtcattttctgaagacaagttgtggtagcccaaattatgctgctcctgaggtgatatctggtaaactatatgctggacctgaagttgatgtgtggagctgtggggttattctttatgctcttttatgtggtactctgccatttgatgacgagaacataccaaacctttttaagaaaataaagggtggaatatatacccttcccagccatttgtctggtgcagcaagggatttgattccaagaatgctagttgtcgatcctatgaagcggatcaccattcgtgaaattcgcgaacatgattggttcaaaattcttctcccgcgctatttgactgtgcctcctccagatagtgcgcaacaagtcaaaaaggttgatgaggaaactctccgtgaggttttaggtatgggatatgacaagaacctgttggtggaatcaatccaaaaaaggctgcaaaatgaggcaactgttgcatattacttactcttggacaataggctccgtacaaccagtggctatcttggagctgaatgtcaagaagctatggactcctcattctcaaacatcgcatcatatgaaacaccaagttcagcacgtgggaatagacagcaaatatttatggagtctccagttggcttgagaccacatcttccagctgagaggaaatgggctcttggtcttcagtctcgagcacatccaaaagaaataatgtctgaagtgctgaaagctctgcaagaattaaatgtttactggaaaaagataggtcactataacatgaagtgcagatggagtcctggctttcctgctcaaattcataacaatcataacttcagtgcagggtccattgaaactgatagcctgagtgagaggttaagtttaattaagtttgaaattcagctgtacaaaacaagagacgagaaatacctcctcgatttgcaaagagtcagtgggccacagctcctctttctggacttgtgcgcggcctttctaactcaactgagagttctttgatttctggtgtcagctttccatcagttgcattccttgcgtttcactagaggaatgtctaaatcgctcacaaagctgtaaatagtaatctccagtagattggattttctggagtatgtagatggtaggcatgagaagatgttatgcctggcggcgatcttctgaaccagactgtgtggagtaacttatctcctaattctttacggctggccagctgccggtgaattagatcagtgcttttgctggcataatgtctatctacattaataatttcagctattacaacggttaattaaatgctgtgctgcttacaggccaaatgagattatgttttgaaggcaactctttttttttgcattaattgattggagttgtttg

SEQ ID NO: 21354 - DNA, 1666 bp, Zea Mays
gcccgaggcctcccgtcgcggtggtcgctttcggccctggaccccgctgccggaatcgaatctcctcccctcctttctcctccgacctcccccttccccccatccgcggctccgccccgacccgtgacgcctcgcttcgcacccctctcgcatctccgccgcatctccgccgcgatcctcccgactagccgcgactgcctcccctccagcggccagaggatggagggggcaggcaaggatggcaacccgttgaggaattatcggattggcaagactctcggaattggctcattcgggaaggtgaaaattgcggagcatatcagcactggacacaaggtggcaatcaagattctcaaccgccgtaaaatcagaggcatggagatggaagagaaagttaaaagagagattaagatattgaggttatttatgcatccacatattatccgcctctatgaggttatagacacaccggctgatatttatgttgttatggagtatgttaagtgtggggaattatttgattacattgttgagaaaggtaggctgcaggaggaagaggctcgccgtttcttccaacagattatatccggtgttgaatattgccatagaaacatggtggtgcatcgtgatctaaagccagaaaacctcctattggattcaaaatgcaatgttaagattgcagattttggcttaagtaatgttatgcgggatggtcattttctgaagacaagttgtggtagcccaaattatgctgctcctgaggtgatatctggtaaactatatgctggacctgaagttgatgtgtggagctgtggggttattctttatgctcttttatgtggtactctgccatttgatgacgagaacataccaaacctttttaagaaaataaagggtggaatatatacccttcccagccatttgtctggtgcagcaagggatttgattccaagaatgctagttgtcgatcctatgaagcggatcaccattcgtgaaattcgcgaacatgattggttcaaaattcttctcccgcgctatttgactgtgcctcctccagatagtgcgcaacaagtcaaaaaggttgatgaggaaactctccgtgaggttttaggtatgggatatgacaagaacctgttggtggaatcaatccaaaaaaggctgcaaaatgaggcaactgttgcatattacttactcttggacaataggctccgtacaaccagtggctatcttggagctgaatgtcaagaagctatggactcctcattctcaaacatcgcatcatatgaaacaccaagttcagcacgtgggaatagacagcaaatatttatggagtctccagttggcttgagaccacatcttccagctgagaggaaatgggctcttggtcttcagtctcgagcacatccaaaagaaataatgtctgaagtgctgaaagctctgcaagaattaaatgtttactggaaaaagataggtcactataacatgaagtgcagatggagtcctggctttcctgctcaaattcataacaatcataacttcagtgcagggtccattgaaactgatagcctgagtgagaggttaagtttaattaagtttgaaattcagagattgaacgtgtgttcatatgccatgaattctgctttcctaatgtttcgcgccaataaag

SEQ ID NO: 21355 - DNA, 1881 bp, Zea Mays
gcccgaggcctcccgtcgcggtggtcgctttcggccctggaccccgctgccggaatcgaatctcctcccctcctttctcctccgacctcccccttccccccatccgcggctccgccccgacccgtgacgcctcgcttcgcacccctctcgcatctccgccgcatctccgccgcgatcctcccgactagccgcgactgcctcccctccagcggccagaggatggagggggcaggcaaggatggcaacccgttgaggaattatcggattggcaagactctcggaattggctcattcgggaaggtgaaaattgcggagcatatcagcactggacacaaggtggcaatcaagattctcaaccgccgtaaaatcagaggcatggagatggaagagaaagttaaaagagagattaagatattgaggttatttatgcatccacatattatccgcctctatgaggttatagacacaccggctgatatttatgttgttatggagtatgttaagtgtggggaattatttgattacattgttgagaaaggtaggctgcaggaggaagaggctcgccgtttcttccaacagattatatccggtgttgaatattgccatagaaacatggtggtgcatcgtgatctaaagccagaaaacctcctattggattcaaaatgcaatgttaagattgcagattttggcttaagtaatgttatgcgggatggtcattttctgaagacaagttgtggtagcccaaattatgctgctcctgaggtgatatctggtaaactatatgctggacctgaagttgatgtgtggagctgtggggttattctttatgctcttttatgtggtactctgccatttgatgacgagaacataccaaacctttttaagaaaataaagggtggaatatatacccttcccagccatttgtctggtgcagcaagggatttgattccaagaatgctagttgtcgatcctatgaagcggatcaccattcgtgaaattcgcgaacatgattggttcaaaattcttctcccgcgctatttgactgtgcctcctccagatagtgcgcaacaagtcaaaaaggttgatgaggaaactctccgtgaggttttaggtatgggatatgacaagaacctgttggtggaatcaatccaaaaaaggctgcaaaatgaggcaactgttgcatattacttactcttggacaataggctccgtacaaccagtggctatcttggagctgaatgtcaagaagctatggactcctcattctcaaacatcgcatcatatgaaacaccaagttcagcacgtgggaatagacagcaaatatttatggagtctccagttggcttgagaccacatcttccagctgagaggaaatgggctcttggtcttcagctgtacaaaacaagagacgagaaatacctcctcgatttgcaaagagtcagtgggccacagctcctctttctggacttgtgcgcggcctttctaactcaactgagagttctttgatttctggtgtcagctttccatcagttgcattccttgcgtttcactagaggaatgtctaaatcgctcacaaagctgtaaatagtaatctccagtagattggattttctggagtatgtagatggtaggcatgagaagatgttatgcctggcggcgatcttctgaaccagactgtgtggagtaacttatctcctaattctttacggctggccagctgccggtgaattagatcagtgcttttgctggcataatgtctatctacattaataatttcagctattacaacggttaattaaatgctgtgctgcttacaggccaaatgagattatgttttgaaggcaactctttttttttgcattaattgattggagttgtttg

SEQ ID NO: 21356 - DNA, 2006 bp, Zea Mays
ccacctcatcgtcgccctcccatttatccacctcctactcctccccgatctggagattcggcgatgcgcttggatttcgggccattggtgctacctgtttcgatctggaagcgtgcgagatgcggcagaggatggagggggcaggcaaggatggcaacccgttgaggaattatcggattggcaagactctcggaattggctcattcgggaaggtgaaaattgcggagcatatcagcactggacacaaggtggcaatcaagattctcaaccgccgtaaaatcagaggcatggagatggaagagaaagttaaaagagagattaagatattgaggttatttatgcatccacatattatccgcctctatgaggttatagacacaccggctgatatttatgttgttatggagtatgttaagtgtggggaattatttgattacattgttgagaaaggtaggctgcaggaggaagaggctcgccgtttcttccaacagattatatccggtgttgaatattgccatagaaacatggtggtgcatcgtgatctaaagccagaaaacctcctattggattcaaaatgcaatgttaagattgcagattttggcttaagtaatgttatgcgggatggtcattttctgaagacaagttgtggtagcccaaattatgctgctcctgaggtgatatctggtaaactatatgctggacctgaagttgatgtgtggagctgtggggttattctttatgctcttttatgtggtactctgccatttgatgacgagaacataccaaacctttttaagaaaataaagggtggaatatatacccttcccagccatttgtctggtgcagcaagggatttgattccaagaatgctagttgtcgatcctatgaagcggatcaccattcgtgaaattcgcgaacatgattggttcaaaattcttctcccgcgctatttgactgtgcctcctccagatagtgcgcaacaagtcaaaaaggttgatgaggaaactctccgtgaggttttaggtatgggatatgacaagaacctgttggtggaatcaatccaaaaaaggctgcaaaatgaggcaactgttgcatattacttactcttggacaataggctccgtacaaccagtggctatcttggagctgaatgtcaagaagctatggactcctcattctcaaacatcgcatcatatgaaacaccaagttcagcacgtgggaatagacagcaaatatttatggagtctccagttggcttgagaccacatcttccagctgagaggaaatgggctcttggtcttcagtctcgagcacatccaaaagaaataatgtctgaagtgctgaaagctctgcaagaattaaatgtttactggaaaaagataggtcactataacatgaagtgcagatggagtcctggctttcctgctcaaattcataacaatcataacttcagtgcagggtccattgaaactgatagcctgagtgagaggttaagtttaattaagtttgaaattcagctgtacaaaacaagagacgagaaatacctcctcgatttgcaaagagtcagtgggccacagctcctctttctggacttgtgcgcggcctttctaactcaactgagagttctttgatttctggtgtcagctttccatcagttgcattccttgcgtttcactagaggaatgtctaaatcgctcacaaagctgtaaatagtaatctccagtagattggattttctggagtatgtagatggtaggcatgagaagatgttatgcctggcggcgatcttctgaaccagactgtgtggagtaacttatctcctaattctttacggctggccagctgccggtgaattagatcagtgcttttgctggcataatgtctatctacattaataatttcagctattacaacggttaattaaatgctgtgctgcttacaggccaaatgagattatgttttgaaggcaactctttttttttgcattaattgattggagttgtttg

SEQ ID NO: 21357 - DNA, 1566 bp, Zea Mays
cctgtttcgatctggaagcgtgcgagatgcgaggatggagggggcaggcaaggatggcaacccgttgaggaattatcggattggcaagactctcggaattggctcattcgggaaggtgaaaattgcggagcatatcagcactggacacaaggtggcaatcaagattctcaaccgccgtaaaatcagaggcatggagatggaagagaaagttaaaagagagattaagatattgaggttatttatgcatccacatattatccgcctctatgaggttatagacacaccggctgatatttatgttgttatggagtatgttaagtgtggggaattatttgattacattgttgagaaaggtaggctgcaggaggaagaggctcgccgtttcttccaacagattatatccggtgttgaatattgccatagaaacatggtggtgcatcgtgatctaaagccagaaaacctcctattggattcaaaatgcaatgttaagattgcagattttggcttaagtaatgttatgcgggatggtcattttctgaagacaagttgtggtagcccaaattatgctgctcctgaggtgatatctggtaaactatatgctggacctgaagttgatgtgtggagctgtggggttattctttatgctcttttatgtggtactctgccatttgatgacgagaacataccaaacctttttaagaaaataaagggtggaatatatacccttcccagccatttgtctggtgcagcaagggatttgattccaagaatgctagttgtcgatcctatgaagcggatcaccattcgtgaaattcgcgaacatgattggttcaaaattcttctcccgcgctatttgactgtgcctcctccagatagtgcgcaacaagtcaaaaaggttgatgaggaaactctccgtgaggttttaggtatgggatatgacaagaacctgttggtggaatcaatccaaaaaaggctgcaaaatgaggcaactgttgcatattacttactcttggacaataggctccgtacaaccagtggctatcttggagctgaatgtcaagaagctatggactcctcattctcaaacatcgcatcatatgaaacaccaagttcagcacgtgggaatagacagcaaatatttatggagtctccagttggcttgagaccacatcttccagctgagaggaaatgggctcttggtcttcagtctcgagcacatccaaaagaaataatgtctgaagtgctgaaagctctgcaagaattaaatgtttactggaaaaagataggtcactataacatgaagtgcagatggagtcctggctttcctgctcaaattcataacaatcataacttcagtgcagggtccattgaaactgatagcctgagtgagaggttaagtttaattaagtttgaaattcagaaacattgaccctggactcctggagggcatatttggtgttgttttaatcttcgaacctaatatggttctagactccaaagcaatgcagcaagcatgctaaattgcgtaacagatgagcgaggtcgacattggcatcaaatttgtcg

SEQ ID NO: 21358 - DNA, 1909 bp, Zea Mays
cctgtttcgatctggaagcgtgcgagatgcgaggatggagggggcaggcaaggatggcaacccgttgaggaattatcggattggcaagactctcggaattggctcattcgggaaggtgaaaattgcggagcatatcagcactggacacaaggtggcaatcaagattctcaaccgccgtaaaatcagaggcatggagatggaagagaaagttaaaagagagattaagatattgaggttatttatgcatccacatattatccgcctctatgaggttatagacacaccggctgatatttatgttgttatggagtatgttaagtgtggggaattatttgattacattgttgagaaaggtaggctgcaggaggaagaggctcgccgtttcttccaacagattatatccggtgttgaatattgccatagaaacatggtggtgcatcgtgatctaaagccagaaaacctcctattggattcaaaatgcaatgttaagattgcagattttggcttaagtaatgttatgcgggatggtcattttctgaagacaagttgtggtagcccaaattatgctgctcctgaggtgatatctggtaaactatatgctggacctgaagttgatgtgtggagctgtggggttattctttatgctcttttatgtggtactctgccatttgatgacgagaacataccaaacctttttaagaaaataaagggtggaatatatacccttcccagccatttgtctggtgcagcaagggatttgattccaagaatgctagttgtcgatcctatgaagcggatcaccattcgtgaaattcgcgaacatgattggttcaaaattcttctcccgcgctatttgactgtgcctcctccagatagtgcgcaacaagtcaaaaaggttgatgaggaaactctccgtgaggttttaggtatgggatatgacaagaacctgttggtggaatcaatccaaaaaaggctgcaaaatgaggcaactgttgcatattacttactcttggacaataggctccgtacaaccagtggctatcttggagctgaatgtcaagaagctatggactcctcattctcaaacatcgcatcatatgaaacaccaagttcagcacgtgggaatagacagcaaatatttatggagtctccagttggcttgagaccacatcttccagctgagaggaaatgggctcttggtcttcagtctcgagcacatccaaaagaaataatgtctgaagtgctgaaagctctgcaagaattaaatgtttactggaaaaagataggtcactataacatgaagtgcagatggagtcctggctttcctgctcaaattcataacaatcataacttcagtgcagggtccattgaaactgatagcctgagtgagaggttaagtttaattaagtttgaaattcagctgtacaaaacaagagacgagaaatacctcctcgatttgcaaagagtcagtgggccacagctcctctttctggacttgtgcgcggcctttctaactcaactgagagttctttgatttctggtgtcagctttccatcagttgcattccttgcgtttcactagaggaatgtctaaatcgctcacaaagctgtaaatagtaatctccagtagattggattttctggagtatgtagatggtaggcatgagaagatgttatgcctggcggcgatcttctgaaccagactgtgtggagtaacttatctcctaattctttacggctggccagctgccggtgaattagatcagtgcttttgctggcataatgtctatctacattaataatttcagctattacaacggttaattaaatgctgtgctgcttacaggccaaatgagattatgttttgaaggcaactctttttttttgcattaattgattggagttgtttg

SEQ ID NO: 21359 - DNA, 1943 bp, Zea Mays
ctcagatggacgaaccagctggatctggcctgctcaaatggaaccgcgagctttcattgcgcctgaggatggagggggcaggcaaggatggcaacccgttgaggaattatcggattggcaagactctcggaattggctcattcgggaaggtgaaaattgcggagcatatcagcactggacacaaggtggcaatcaagattctcaaccgccgtaaaatcagaggcatggagatggaagagaaagttaaaagagagattaagatattgaggttatttatgcatccacatattatccgcctctatgaggttatagacacaccggctgatatttatgttgttatggagtatgttaagtgtggggaattatttgattacattgttgagaaaggtaggctgcaggaggaagaggctcgccgtttcttccaacagattatatccggtgttgaatattgccatagaaacatggtggtgcatcgtgatctaaagccagaaaacctcctattggattcaaaatgcaatgttaagattgcagattttggcttaagtaatgttatgcgggatggtcattttctgaagacaagttgtggtagcccaaattatgctgctcctgaggtgatatctggtaaactatatgctggacctgaagttgatgtgtggagctgtggggttattctttatgctcttttatgtggtactctgccatttgatgacgagaacataccaaacctttttaagaaaataaagggtggaatatatacccttcccagccatttgtctggtgcagcaagggatttgattccaagaatgctagttgtcgatcctatgaagcggatcaccattcgtgaaattcgcgaacatgattggttcaaaattcttctcccgcgctatttgactgtgcctcctccagatagtgcgcaacaagtcaaaaaggttgatgaggaaactctccgtgaggttttaggtatgggatatgacaagaacctgttggtggaatcaatccaaaaaaggctgcaaaatgaggcaactgttgcatattacttactcttggacaataggctccgtacaaccagtggctatcttggagctgaatgtcaagaagctatggactcctcattctcaaacatcgcatcatatgaaacaccaagttcagcacgtgggaatagacagcaaatatttatggagtctccagttggcttgagaccacatcttccagctgagaggaaatgggctcttggtcttcagtctcgagcacatccaaaagaaataatgtctgaagtgctgaaagctctgcaagaattaaatgtttactggaaaaagataggtcactataacatgaagtgcagatggagtcctggctttcctgctcaaattcataacaatcataacttcagtgcagggtccattgaaactgatagcctgagtgagaggttaagtttaattaagtttgaaattcagctgtacaaaacaagagacgagaaatacctcctcgatttgcaaagagtcagtgggccacagctcctctttctggacttgtgcgcggcctttctaactcaactgagagttctttgatttctggtgtcagctttccatcagttgcattccttgcgtttcactagaggaatgtctaaatcgctcacaaagctgtaaatagtaatctccagtagattggattttctggagtatgtagatggtaggcatgagaagatgttatgcctggcggcgatcttctgaaccagactgtgtggagtaacttatctcctaattctttacggctggccagctgccggtgaattagatcagtgcttttgctggcataatgtctatctacattaataatttcagctattacaacggttaattaaatgctgtgctgcttacaggccaaatgagattatgttttgaaggcaactctttttttttgcattaattgattggagttgtttg

SEQ ID NO: 21360 - DNA, 525 bp, Zea Mays
gactgaatagcgcgccctcacggagtaacgggccagctgtacaaaacaagagacgagaaatacctcctcgatttgcaaagagtcagtgggccacagctcctctttctggacttgtgcgcggcctttctaactcaactgagagttctttgatttctggtgtcagctttccatcagttgcattccttgcgtttcactagaggaatgtctaaatcgctcacaaagctgtaaatagtaatctccagtagattggattttctggagtatgtagatggtaggcatgagaagatgttatgcctggcggcgatcttctgaaccagactgtgtggagtaacttatctcctaattctttacggctggccagctgccggtgaattagatcagtgcttttgctggcataatgtctatctacattaataatttcagctattacaacggttaattaaatgctgtgctgcttacaggccaaatgagattatgttttgaaggcaactctttttttttgcattaattgattggagttgtttg

SEQ ID NO: 21361 - DNA, 517 bp, Zea Mays
tgaaaacacctcaactaaaaaaactcagctgtacaaaacaagagacgagaaatacctcctcgatttgcaaagagtcagtgggccacagctcctctttctggacttgtgcgcggcctttctaactcaactgagagttctttgatttctggtgtcagctttccatcagttgcattccttgcgtttcactagaggaatgtctaaatcgctcacaaagctgtaaatagtaatctccagtagattggattttctggagtatgtagatggtaggcatgagaagatgttatgcctggcggcgatcttctgaaccagactgtgtggagtaacttatctcctaattctttacggctggccagctgccggtgaattagatcagtgcttttgctggcataatgtctatctacattaataatttcagctattacaacggttaattaaatgctgtgctgcttacaggccaaatgagattatgttttgaaggcaactctttttttttgcattaattgattggagttgtttg

SEQ ID NO: 21362 - DNA, 1047 bp, Zea Mays
aataacctctctcaaaataaaacccgatagagatacagaagaaaagagagaaaaaaactaagctcgcctgatcctttttaagagacgggacccctcaccactctgtaggtcccgaaggcccgaaccttaggatcgccggcgaaccaccggagctgagccccacaaacatcactgtaccacacggtttggtggtgtggcgactggcgacgaagcgcacaagaacaaaacaagagggcgagaaacatagggagaaaggaggagaggaacggagagctggaaaaggcaggaaagacccggcttttgaccccaagtaccctgttgagggcaatggcggccacctccgaggaggcaatcaagcagttctcggcgctcatggagcagctagaggagccgctaaagagcacattccagaatgtgcatcaaggaaatctgagagggactttgatgcgttttctgaaggctagagaatggagtgtgcctaaagcttataaaatgctaatggattgcttaaactggagagtacagaatgagattgacatcgtgttagctaaacccattctgccatctgatatatatagagttattcgggacacgttacttgttggattgacagggtactccaagcagggacaacctgtttatgcatttggtgtgggtcttagtactttcgacaaggcctcggtgaactactatgtgcaatcacacatacagatgaatgaatatcgagatcgtgttgtcctgccggctgcatcaaagaagtttgggagacagattaatacctgcttgaaggttatggatatgactggcctcaagctgtctgcactgagccaaataaagatgttgacgatgattactactgttgatgaccttaattatcctgagaaaacggaaacttattacattgtaaatgctccatatgttttttcagcgtgttggaaggttgtgaagccactcttacaagaaagaactaaaaagaagatccaagtcctgtatggctctgggagggatgagttactgaagatccctgttcgaaatgttttgagcttt

SEQ ID NO: 21363 - DNA, 1768 bp, Zea Mays
ctcaaaataaaacccgatagagatacagaagaaaagagagaaaaaaactaagctcgcctgatcctttttaagagacgggacccctcaccactctgtaggtcccgaaggcccgaaccttaggatcgccggcgaaccaccggagctgagccccacaaacatcactgtaccacacggtttggtggtgtggcgactggcgacgaagcgcacaagaacaaaacaagagggcgagaaacatagggagaaaggaggagaggaacggagagctggaaaaggcaggaaagacccggcttttgaccccaagtaccctgttgagggcaatggcggccacctccgaggaggcaatcaagcagttctcggcgctcatggagcagcaatgtgcatcaaggaaatctgagagggactttgatgcgttttctgaaggctagagaatggagtgtgcctaaagcttataaaatgctaatggattgcttaaactggagagtacagaatgagattgacatcgtgttagctaaacccattctgccatctgatatatatagagttattcgggacacgttacttgttggattgacagggtactccaagcagggacaacctgtttatgcatttggtgtgggtcttagtactttcgacaaggcctcggtgaactactatgtgcaatcacacatacagatgaatgaatatcgagatcgtgttgtcctgccggctgcatcaaagaagtttgggagacagattaatacctgcttgaaggttatggatatgactggcctcaagctgtctgcactgagccaaataaagatgttgacgatgattactactgttgatgaccttaattatcctgagaaaacggaaacttattacattgtaaatgctccatatgttttttcagcgtgttggaaggttgtgaagccactcttacaagaaagaactaaaaagaagatccaagtcctgtatggctctgggagggatgagttactgaaggtcatggactacgagtcacttccgcacttctgcaagagagaagggtcaggttcatccagcgactcgctggatggagtagattgctactcctacgaccaccctttccaccagcagctgtacaactacatgaagcagcagcaatctctgaatcaggactccgttggtcccagaaaacaaggctcggtccacgtggatgtgccctcgcctggccttgaggaggccaagattgcggagacgatcaaagcagagctccagaatttgaggggaagcggcggtctcgcccattcattcagcagcatccagatcgaaggtccatgagggcgcgcgccagtgacccgaagagaagctcttggtaatggtgcctcctgcttgcagtcactggctgcaggcttgaccggggcgaatagagagcgggattctaataactgtatccgcgattgttgtgatttctaattaaccaagtgggcgtgtatcgccatgcttgtactatccctgtatgtatgtatatataacggccaactggacggagtttatgtaactccctgctaattacttagaatgctcatcttttattttactccaatatagtgaaaatttcgcttagggcccgtttggttccttgaaatggtgacctcgaatgatttctagccactttcaacaatttctagccagattgctttgtgtaaattctagagaggaacgaacgaggccatcttttattgttatcgaatatttgtcgctctaaaatactataaataaaaaagaatggaggaagtataatgtagtg

SEQ ID NO: 21364 - DNA, 1868 bp, Zea Mays
caaaataaaacccgatagagatacagaagaaaagagagaaaaaaactaagctcgcctgatcctttttaagagacgggacccctcaccactctgtaggtcccgaaggcccgaaccttaggatcgccggcgaaccaccggagctgagccccacaaacatcactgtaccacacggtttggtggtgtggcgactggcgacgaagcgcacaagaacaaaacaagagggcgagaaacatagggagaaaggaggagaggaacggagagctggaaaaggcaggaaagacccggcttttgaccccaagtaccctgttgagggcaatggcggccacctccgaggaggcaatcaagcagttctcggcgctcatggagcagctagaggagccgctaaagagcacattccaggtgtcgatctgctccgctcgctgttcggctgttcctgttggatatctgccgttttgtgattgatttggttctgaatgtgcatcaaggaaatctgagagggactttgatgcgttttctgaaggctagagaatggagtgtgcctaaagcttataaaatgctaatggattgcttaaactggagagtacagaatgagattgacatcgtgttagctaaacccattctgccatctgatatatatagagttattcgggacacgttacttgttggattgacagggtactccaagcagggacaacctgtttatgcatttggtgtgggtcttagtactttcgacaaggcctcggtgaactactatgtgcaatcacacatacagatgaatgaatatcgagatcgtgttgtcctgccggctgcatcaaagaagtttgggagacagattaatacctgcttgaaggttatggatatgactggcctcaagctgtctgcactgagccaaataaagatgttgacgatgattactactgttgatgaccttaattatcctgagaaaacggaaacttattacattgtaaatgctccatatgttttttcagcgtgttggaaggttgtgaagccactcttacaagaaagaactaaaaagaagatccaagtcctgtatggctctgggagggatgagttactgaaggtcatggactacgagtcacttccgcacttctgcaagagagaagggtcaggttcatccagcgactcgctggatggagtagattgctactcctacgaccaccctttccaccagcagctgtacaactacatgaagcagcagcaatctctgaatcaggactccgttggtcccagaaaacaaggctcggtccacgtggatgtgccctcgcctggccttgaggaggccaagattgcggagacgatcaaagcagagctccagaatttgaggggaagcggcggtctcgcccattcattcagcagcatccagatcgaaggtccatgagggcgcgcgccagtgacccgaagagaagctcttggtaatggtgcctcctgcttgcagtcactggctgcaggcttgaccggggcgaatagagagcgggattctaataactgtatccgcgattgttgtgatttctaattaaccaagtgggcgtgtatcgccatgcttgtactatccctgtatgtatgtatatataacggccaactggacggagtttatgtaactccctgctaattacttagaatgctcatcttttattttactccaatatagtgaaaatttcgcttagggcccgtttggttccttgaaatggtgacctcgaatgatttctagccactttcaacaatttctagccagattgctttgtgtaaattctagagaggaacgaacgaggccatcttttattgttatcgaatatttgtcgctctaaaatactataaataaaaaagaatggaggaagtataatgtagtg

SEQ ID NO: 21365 - DNA, 3332 bp, Zea Mays
aaaacccgatagagatacagaagaaaagagagaaaaaaactaagctcgcctgatcctttttaagagacgggacccctcaccactctgtaggtcccgaaggcccgaaccttaggatcgccggcgaaccaccggagctgagccccacaaacatcactgtaccacacggtttggtggtgtggcgactggcgacgaagcgcacaagaacaaaacaagagggcgagaaacatagggagaaaggaggagaggaacggagagctggaaaaggcaggaaagacccggcttttgaccccaagtaccctgttgagggcaatggcggccacctccgaggaggcaatcaagcagttctcggcgctcatggagcagctagaggagccgctaaagagcacattccaggtgtcgatctgctccgctcgctgttcggctgttcctgttggatatctgccgttttgtgattgatttggttctggttgttttctgaacgaataccccggcagattttgcgcatgtttttcaaagtcgagttttgctttagttctcgcattttttgtggacttggggtgctgctgagcgcttcaacataaaaaaatctgaagaactgcgagttagtctgttgccctgttagctgcgtagggcttagatctttggttttcattatgtccagagctcaatttcgctgaccttttactgccgatctcgttggaatttccatcgaattgaaaattgagcatgctttaatttctttcgtttcctgcccccgctacttatttctgttatttggtctggcgtacatcaaatttggatcttagacttcttgttttgattcttttcatgagagaagctcattttacggcttgtgctcgagtatactttttgtctgtgctcattatttcgaattttcggcagaggtagaattttggccttttccctcgactttcttgtgttgtggattgaagtgattttgagctctcaacttggttctgtaaagaacgtctttttgttgccgtaaagcttaataaacttgttctgtgtctgagtgtttttggaataatcaatttggtgcttttagaaacacctttatgatttcgaaaatgaacttttccttttttgtttgggttgcatactgagatatttgtttcgatatgtcacgaggtatatagatgaaagtagtactctggttgggtcctcactgcaactgcaattttggtacaagttgtggtgtcgatgtcatgtgctgttcccagttcaccatttggagcccaaatactcctcctcatgtttgactcgcaactaattctggtcttggctgccggctaggaggccgtctagacttcctactttctaagcatgtgttggaatactagaaatattttagggtcagacactcccaagacaagagattatataaagtattggtttggtgtgttgcatgctgcattagtcttttaacccatgagaggactctgtccaagcctgtagttggacgtgtgctgatggtggacctggatgttgacgtgttcctgacatctgtggcctggactgttcctggtggagatgtttcaattgtagattcggatttttatttggtccttaagtccttgtcatgactcatgataagtgtgacaaggcccatggttggtctcagaaccgaggacgtgtgcggttgtgcaaccactctggaatcacaatatgccccactaagaaacaatgtttttttttctttcttttttacgtcagcatgctggcatcagaaggctggtgctagatgcattctgttagcttatgtgttttggacatgtctattgcaatttgttgtttggttctatcgaccttgttctttcatcagtggacatcatttttttttctgtagacacttgatataatattttaaaatacgaataatatcaccaaaaagtgattggttgaaatatgtttgcagaatgtgcatcaaggaaatctgagagggactttgatgcgttttctgaaggctagagaatggagtgtgcctaaagcttataaaatgctaatggattgcttaaactggagagtacagaatgagattgacatcgtgttagctaaacccattctgccatctgatatatatagagttattcgggacacgttacttgttggattgacagggtactccaagcagggacaacctgtttatgcatttggtgtgggtcttagtactttcgacaaggcctcggtgaactactatgtgcaatcacacatacagatgaatgaatatcgagatcgtgttgtcctgccggctgcatcaaagaagtttgggagacagattaatacctgcttgaaggttatggatatgactggcctcaagctgtctgcactgagccaaataaagatgttgacgatgattactactgttgatgaccttaattatcctgagaaaacggaaacttattacattgtaaatgctccatatgttttttcagcgtgttggaaggttgtgaagccactcttacaagaaagaactaaaaagaagatccaagtcctgtatggctctgggagggatgagttactgaaggtcatggactacgagtcacttccgcacttctgcaagagagaagggtcaggttcatccagcgactcgctggatggagtagattgctactcctacgaccaccctttccaccagcagctgtacaactacatgaagcagcagcaatctctgaatcaggactccgttggtcccagaaaacaaggctcggtccacgtggatgtgccctcgcctggccttgaggaggccaagattgcggagacgatcaaagcagagctccagaatttgaggggaagcggcggtctcgcccattcattcagcagcatccagatcgaaggtccatgagggcgcgcgccagtgacccgaagagaagctcttggtaatggtgcctcctgcttgcagtcactggctgcaggcttgaccggggcgaatagagagcgggattctaataactgtatccgcgattgttgtgatttctaattaaccaagtgggcgtgtatcgccatgcttgtactatccctgtatgtatgtatatataacggccaactggacggagtttatgtaactccctgctaattacttagaatgctcatcttttattttactccaatatagtgaaaatttcgcttagggcccgtttggttccttgaaatggtgacctcgaatgatttctagccactttcaacaatttctagccagattgctttgtgtaaattctagagaggaacgaacgaggccatcttttattgttatcgaatatttgtcgctctaaaatactataaataaaaaagaatggaggaagtataatgtagtg

SEQ ID NO: 21366 - DNA, 1832 bp, Zea Mays
aaaacccgatagagatacagaagaaaagagagaaaaaaactaagctcgcctgatcctttttaagagacgggacccctcaccactctgtaggtcccgaaggcccgaaccttaggatcgccggcgaaccaccggagctgagccccacaaacatcactgtaccacacggtttggtggtgtggcgactggcgacgaagcgcacaagaacaaaacaagagggcgagaaacatagggagaaaggaggagaggaacggagagctggaaaaggcaggaaagacccggcttttgaccccaagtaccctgttgagggcaatggcggccacctccgaggaggcaatcaagcagttctcggcgctcatggagcagctagaggagccgctaaagagcacattccagaatgtgcatcaaggaaatctgagagggactttgatgcgttttctgaaggctagagaatggagtgtgcctaaagcttataaaatgctaatggattgcttaaactggagagtacagaatgagattgacatcgtgttagctaaacccattctgccatctgatatatatagagttattcgggacacgttacttgttggattgacagggtactccaagcagggacaacctgtttatgcatttggtgtgggtcttagtactttcgacaaggcctcggtgaactactatgtgcaatcacacatacagatgaatgaatatcgagatcgtgttgtcctgccggctgcatcaaagaagtttgggagacagattaatacctgcttgaaggttatggatatgactggcctcaagctgtctgcactgagccaaataaaggaagatacgttgcagtaacacttcaatacttctccatatgcagatgttgacgatgattactactgttgatgaccttaattatcctgagaaaacggaaacttattacattgtaaatgctccatatgttttttcagcgtgttggaaggttgtgaagccactcttacaagaaagaactaaaaagaagatccaagtcctgtatggctctgggagggatgagttactgaaggtcatggactacgagtcacttccgcacttctgcaagagagaagggtcaggttcatccagcgactcgctggatggagtagattgctactcctacgaccaccctttccaccagcagctgtacaactacatgaagcagcagcaatctctgaatcaggactccgttggtcccagaaaacaaggctcggtccacgtggatgtgccctcgcctggccttgaggaggccaagattgcggagacgatcaaagcagagctccagaatttgaggggaagcggcggtctcgcccattcattcagcagcatccagatcgaaggtccatgagggcgcgcgccagtgacccgaagagaagctcttggtaatggtgcctcctgcttgcagtcactggctgcaggcttgaccggggcgaatagagagcgggattctaataactgtatccgcgattgttgtgatttctaattaaccaagtgggcgtgtatcgccatgcttgtactatccctgtatgtatgtatatataacggccaactggacggagtttatgtaactccctgctaattacttagaatgctcatcttttattttactccaatatagtgaaaatttcgcttagggcccgtttggttccttgaaatggtgacctcgaatgatttctagccactttcaacaatttctagccagattgctttgtgtaaattctagagaggaacgaacgaggccatcttttattgttatcgaatatttgtcgctctaaaatactataaataaaaaagaatggaggaagtataatgtagtg

SEQ ID NO: 21367 - DNA, 1774 bp, Zea Mays
aaaacccgatagagatacagaagaaaagagagaaaaaaactaagctcgcctgatcctttttaagagacgggacccctcaccactctgtaggtcccgaaggcccgaaccttaggatcgccggcgaaccaccggagctgagccccacaaacatcactgtaccacacggtttggtggtgtggcgactggcgacgaagcgcacaagaacaaaacaagagggcgagaaacatagggagaaaggaggagaggaacggagagctggaaaaggcaggaaagacccggcttttgaccccaagtaccctgttgagggcaatggcggccacctccgaggaggcaatcaagcagttctcggcgctcatggagcagctagaggagccgctaaagagcacattccagaatgtgcatcaaggaaatctgagagggactttgatgcgttttctgaaggctagagaatggagtgtgcctaaagcttataaaatgctaatggattgcttaaactggagagtacagaatgagattgacatcgtgttagctaaacccattctgccatctgatatatatagagttattcgggacacgttacttgttggattgacagggtactccaagcagggacaacctgtttatgcatttggtgtgggtcttagtactttcgacaaggcctcggtgaactactatgtgcaatcacacatacagatgaatgaatatcgagatcgtgttgtcctgaagtttgggagacagattaatacctgcttgaaggttatggatatgactggcctcaagctgtctgcactgagccaaataaagatgttgacgatgattactactgttgatgaccttaattatcctgagaaaacggaaacttattacattgtaaatgctccatatgttttttcagcgtgttggaaggttgtgaagccactcttacaagaaagaactaaaaagaagatccaagtcctgtatggctctgggagggatgagttactgaaggtcatggactacgagtcacttccgcacttctgcaagagagaagggtcaggttcatccagcgactcgctggatggagtagattgctactcctacgaccaccctttccaccagcagctgtacaactacatgaagcagcagcaatctctgaatcaggactccgttggtcccagaaaacaaggctcggtccacgtggatgtgccctcgcctggccttgaggaggccaagattgcggagacgatcaaagcagagctccagaatttgaggggaagcggcggtctcgcccattcattcagcagcatccagatcgaaggtccatgagggcgcgcgccagtgacccgaagagaagctcttggtaatggtgcctcctgcttgcagtcactggctgcaggcttgaccggggcgaatagagagcgggattctaataactgtatccgcgattgttgtgatttctaattaaccaagtgggcgtgtatcgccatgcttgtactatccctgtatgtatgtatatataacggccaactggacggagtttatgtaactccctgctaattacttagaatgctcatcttttattttactccaatatagtgaaaatttcgcttagggcccgtttggttccttgaaatggtgacctcgaatgatttctagccactttcaacaatttctagccagattgctttgtgtaaattctagagaggaacgaacgaggccatcttttattgttatcgaatatttgtcgctctaaaatactataaataaaaaagaatggaggaagtataatgtagtg

SEQ ID NO: 21368 - DNA, 1960 bp, Zea Mays
ccaacatgcagtggcctgattcctaatttttccctgtgctggtatcctatgtggacttaagggagtgtgtccacgtgctgtgctcatgcaattgttgtcctcaagtccttcttcactgtgttcctgtgaagacccgtcgagcatgtctctttgctctttgctataaagctggggcagggaagtattcccttgatgtccctgtgattcttaaccaaagcatgtttgtgtgacgcatgcccatgctcttgtgaccaaagtgtgttagcttaagttatcattccaccctaggaaccctcttatgccctctaaatcctacatgtggtgacaaaaacccagcagatctcccacctcaccatgcccaaggattttcaaaggttttctcagtcatgtgacgtttgttccgtgctcatctaagaacacctagaagaagtggtgtttgaaggagtctactccagtggctgctgatcaagtggaggagccatctaactgtgtattgggtagagggttctagagcctcttctctgcaacaaaggcaagccccggtgcatttgccccttccttgtatttttaaaaaagacttttatacacttaagtctagtgaaatgtgcattaagtttataggaattgcttggaaactatttgatgcatcgcttaccttgatatccatgcctttatagatacttctgatggagtatcaaaatatgatttacaaaaaaaatgcttagccctgcttagatcttgtggatagaggttgccctttgcaataatgcctagctcaggggttatcccgaggaaggatgacttctacctgcaagaatattttcattgggagcatggtgtgatcttactgcaaagttcactataatgctcttttcatcctaaggaacacaaaacaatcctaagggtggaagtacttaactcgagacttgggctaggaacaggtgatgctccacccaggttaattaaggattggatgcgtatgtaggcctatatgatcaaggactattttaactggccacatgccgtggatatgggacagggtaagcttgaacctaactattccatacgtgaaaagataaccgcgcactgggcgtgggagatggtgggagtagcgtgtaccctcctggctagaggctggacggaggagtattgtgctcccaggtagcgcggaccggttcacgttgtggaggatctatgggaacggttgacatatgcaagggttaagtgctacatatgtcgtgtggttagagatcctcaactgagtaaatcgatttggatcgccgttatatccccggatagtgaagacttgatctctgacctacaacctaagtcaggatgtgaacattatgaataaaaatgatgttgtattgatgagatggtgaaattagactagatgcaaacagagtctattaatatttaatctggcgttaaaatgttgaaagtaaggactcactttagtaggctatttctgcaaaagtacctaagttgattcttgctaaagccttttccttgattcctatttaaccagcatatccttgagagtcatttttccttagtcgggtaagacttgcgaaagtacacttcgtactcagggttttcgaacccatgttgttgtaggtgatgaggagtactctaggtgttcctgtggctggagggcgtttccagttctggaagaggattagttaggcttgtgtataagttttggagggttcctaccttcctgctattgtaataagttatgcactttgagtatatcaggacttgtaataaatgtaactcttcctatgtaataaacttcagttttagaaatgaaaagaatgttttataaagtcttccgctcttatcttcgaagtgtgtgtatcgaatgtgattactgtaatatgcatgtatggtgggagatccttgggatgatgagttcaagttgttgaactcgtgatagccttgttaagttacctggtac

SEQ ID NO: 21369 - DNA, 3002 bp, Zea Mays
ccaacatgcagtggcctgattcctaatttttccctgtgctggtatcctatgtggacttaagggagtgtgtccacgtgctgtgctcatgcaattgttgtcctcaagtccttcttcactgtgttcctgtgaagacccgtcgagcatgtctctttgctctttgctataaagctggggcagggaagtattcccttgatgtccctgtgattcttaaccaaagcatgtttgtgtgacgcatgcccatgctcttgtgaccaaagtgtgttagcttaagttatcattccaccctaggaaccctcttatgccctctaaatcctacatgtggtgacaaaaacccagcagatctcccacctcaccatgcccaaggattttcaaaggttttctcagtcatgtgacgtttgttccgtgctcatctaaggtcagtggtgctcgccaagttagttttcctaactctactgctttgtattgctctgaacgtggtcgtgccaccgtggtctggcgccacggacggtcctgccgtcgacccgtcagctggcgctttccctgagcaacttcataggaaggtccgcagtgctctatgtgcttctagttggagctctactgtactgttgtcctaggatcgagtttatcatgtcggatctcactggcgtcgtggtcagagcctatgagtgtctgacatgggtgttgaagggttgtgcccgggttgtgttggccgcggacatgtctcagtagtagttgggggacgccggagagcagcgccgacgcggtcgtaggcgccgggtcaccggagtagcacgacgggcatctggttcaagtttttctgaagttggttgtgaagccgggttggatgtgttaaaccaagatctctctaagtgaagttggttgtaggatttttagagctgttagtaaatattaagtgaattaagggtgctcttaaaggactatttgaattttagaaataagaattgagcaccaaaaaaatcatggaatttttttgagaaatttgttatcagaagcttatcacttggtaaaagtttggggctgtttggaacctttttgctctagaaaccttgtaagccccaaaatagagtggttaatccctaatcaagtgtgggttaatgctttggaaaggagataaggttatctagggaagagatgcagttgcttaagaagttttaagcttttggatgagatataagttggattagttccttggtttacctaagtgaattcaattggtcacttttattgaatgctaggttgtgtagaagtatgtgtatacttgtcatgtacttatttaggagtgtttatgttccccacttctccttatgagagtttgcattccatatcattacataagcatacatgtatttgtaattgacttgtagaacacctagaagaagtggtgtttgaaggagtctactccagtggctgctgatcaagtggaggagccatctaactgtgtattgggtagagggttctagagcctcttctctgcaacaaaggcaagccccggtgcatttgccccttccttgtatttttaaaaaagacttttatacacttaagtctagtgaaatgtgcattaagtttataggaattgcttggaaactatttgatgcatcgcttaccttgatatccatgcctttatagatacttctgatggagtatcaaaatatgatttacaaaaaaaatgcttagccctgcttagatcttgtggatagaggttgccctttgcaataatgcctagctcaggggttatcccgaggaaggatgacttctacctgcaagaatattttcattgggagcatggtgtgatcttactgcaaagttcactataatgctcttttcatcctaaggaacacaaaacaatcctaagggtggaagtacttaactcgagacttgggctaggaacaggtgatgctccacccaggttaattaaggattggatgcgtatgtaggcctatatgatcaaggactattttaactggccacatgccgtggatatgggacagggtaagcttgaacctaactattccatacgtgaaaagataaccgcgcactgggcgtgggagatggtgggagtagcgtgtaccctcctggctagaggctggacggaggagtattgtgctcccaggtagcgcggaccggttcacgttgtggaggatctatgggaacggttgacatatgcaagggttaagtgctacatatgtcgtgtggttagagatcctcaactgagtaaatcgatttggatcgccgttatatccccggatagtgaagacttgatctctgacctacaacctaagtcaggatgtgaacattatgaataaaaatgatgttgtattgatgagatggtgaaattagactagatgcaaacagagtctattaatatttaatctggcgttaaaatgttgaaagtaaggactcactttagtaggctatttctgcaaaagtacctaagttgattcttgctaaagccttttccttgattcctatttaaccagcatatccttgagagtcatttttccttagtcgggtaagacttgcgaaagtacacttcgtactcagggttttcgaacccatgttgttgtaggtgatgaggagtactctaggtgttcctgtggctggagggcgtttccagttctggaagaggattagttaggcttgtgtataagttttggagggttcctaccttcctgctattgtaataagttatgcactttgagtatatcaggacttgtaataaatgtaactcttcctatgtaataaacttcagttttagaaatgaaaagaatgttttataaagtcttccgctcttatcttcgaagtgtgtgtatcgaatgtgattactgtaatatgcatgtatggtgggagatccttgggatgatgagttcaagttgttgaactcgtgatagccttgttaagttacctggtacatgtgcatagccatctgaggccatcaaggcaaggattggtgcatgtgggcccgataacttgggagggctgcc

SEQ ID NO: 21370 - DNA, 1655 bp, Zea Mays
cacggccggacatggctaggggtatgagaaagtgcatcattcaaagccaagaagagtatttggtagaggagcctattggggaaacaagtcatcggccacgagatgcagcatatgaccaccatccttctgctagagaacgccaaaaagaaagcgacaatggtaatgagttcaatgacctagatcatcataaaaaagatacaacatcttttgagactacttctggagtgtacccttctcctgatgatgcagatatagaggattctgttgaaggtcaaactaatgaagcaataagtcgtggtccgaacaaacttaaacatgtttggaaccttcaaaaaggaaaacgaattgtagttaactgtaacgagctcggccaacctattggagaggaggcaggagtcttaggaaaattccttggcatggttgctaggaatggctgcttatgtagcttaagcttcaaaggttggagattactgataggaaagaaggacaggaacaatgaacaaaaaaacaagcaagatgtactgaagcaagtaaagatgagattcctataccctgcccgcatggaaaagtggatacttcgaactattggtgaaagatggagacaacacaagtccaatctaaaatccttacattttgatgcgcataggagcaaggaaaataatctaaaaaatgttccaaaaggcgtcttagatgatcaatgggtcgctcttgtgaataattggtttacaacacaatcacaggatatcagtgaggcaaataggataaactgcgcaaaaaggaaggcgacccatacatcaggaacaaagagttttgctcagaacagggaagatatggtatttctacaaacatagttgccaatgcaatgcttattccaattctcgaacatgcattattgtccttacatttattaaggatcatttatttggtacagagggaacaagatccagaaaagaaatacccccatagggctgtattgtatatcaatacacacaagagtaacatcacaaagaacacaaacccacatgtggttgcgttgaaggaactattagtccaacaaccaagtttagctgacactagtcatggaaaggttgcatggaaaggagatgcgcttagccaaattttaggagaagagaagcctggccatatccatggtcttggccttgttccgaatccagatcaagaatgtctagatgaacctttgtcggcatcaaaagatcttcagccgactatgaatcaaaaagttaatcttcttgacgaactgaatagcacaatggcggatgaaatcgaacatgatgggtacgaggagctgcaagcccagtgcaaaaaatctaaaattcaagaaaagggcaagccaccaatgccacgaggaggactccaaggtggtagagtttctacatcgttaaatgtaaaaaatagaagtaatgcagccaaggtgatgaaccaggacactgctcgaaattcctctaatcatgaaccatacaagaacaaggtagtaaaaaagtttattcggtataattttagttattttctagtgtggtttttgtagaaattgcattcgtaatttgcagggatctctagaaaattatttgccaagtactaaagacgatcagtctacatcaaaacgaaaacgagtatatggtcaatttcaaagtgag

SEQ ID NO: 21371 - DNA, 11996 bp, Zea Mays
acgacacgcgcatctccctacctcgatacgattcttcgtcttctcttccccgcgatcgcgccagcgcccccgaaaaaccctaactacctggagcctcgacggcacctgccgcaggcgacggcgagcgaccccaggcggtggtagacggcgcagcgggttgccccttgtggaggcggacggcacggcgcaggtccttgccttcccggctatgcgaattgcggtatgaagctcaagcggcgacgcgcggtagaagtgcctccaagtataaaatctttcatcaacagtgttaccactgttcctcttgaggatgtagaattgccgctgaaggattttgcatgggaatttgacaagggggattttcatcactggttggaccttttcaatcattttgattctttctttgagagttatatcaaatcaaggaaagatttgcatcttgaagataattttcttgatgtggatcccccatttcctcgagaagcactacttcaaattctccgtgtatcaaaacttatattggaaaattgtacaaatagacacttctctagtttttttgagcatctgtctgcccttctagcatcaacagatgcggatattgttgaagcaagcttgcagacattaatggcatttgtagacaagtcagttgggaaaagctcaatacgcagtgcatctctcgcttcaaagttatttgccttatctcaaggctggggtggaaaagaaggtggtcttggattagtagcatgttctctacccagtgtatctgatccagtttccactgaggttggatccacactccattttgagttctatcgtgctgctgataaatcagagaaatcccagtgtctagagaaagagaacaagttggaagtaattcatttatcgaatgtcaattcgtgcaaggaggcagatcttgaaatattggacaggttggtcaaggattacagtgtgccacaagctttaaggtttcttcttcttacaagactgagatttgcaagggcttttgactctttaacatgtcgacaccagtatatctgtatccgcttgtatgcttttattgttcttgtccaagcaggccatgatctggaagttgtatcaacatttttgaacaatgaaccagaattcattgatgagctgttatcactacttagctatgaggatgagatacccgaaaagattcggatactgggagtcctttcattagtcgcactgtgccaagatcgacctcaccagcctactgtattgtcctcggtaacttctggtggtcatcggggtatccttcctattctcatgcagaatacagtggattctatcatcaatggttctatgaaatggtccataatatttgctgaagcacttctttcgcttgtatctatgctggtatcatcaacaccaggttctctagctctacaagaagcaggttttataccaactattttgcctcttctcaaagacacaaacacgcaacatttacatctagttagtaaggcagtgcatgttattgagagcttcctggattatcacaatccttcttcagcagtgttcagagatctaggtggactagatgacactattgctcgtcttaagctagaagtatctcaagttgaggttgattcaaaactaattgaccattctaccaatgaaggaaacgaggttgaaagttatccacctgtgcaagatatacaaccttcatgttctgaatccttgattttgtatcataggaagaacttaataaaagttttattacgtacaatatctctggcaacatatgtgcctggtagttctgctcgtgttgatggttcagaagagaatgtgttacctccatgtttatgtgcgatttttaagagaggcaaggacttcggtggtggtgttttctcacttgctgcaaatgttatgagtgatctcatacataaagatccaacatgctatactgttcttgattcagctggtttgccacaagcatttcttgatgccataatgtgtggtggactttacaactccgatgcagtctcatgtataccacagtgtttggatgcattgtgcctgaacaataatggtcttcaattggtaaaggaccggaatgctttaagatgttttgtgaaaatctttacgtctagatcatatatgaaagctcttagtggtgacacagcgggagctttatcaagtggacttgatgaattaatgcgtcatgcaccatcattacgatcctctggagttagcatgtttattgaaatcttgaacactatttttaaagtgtggtgtggtgtagactctatcccctataaggaatctgataattactctgcagttattcccatggatactgatgtggtggttgctacctcacagagtgagggtgtacctcctgaggtaggatgctcaggcgaaacagttgatgctcctttagatgctgtaacatcatcatccattgagttatttcttcctgagtgcatatgcaatgttgctcgcctgcttgaaactgttctgcaaaatgctgatatatgtaggctatttattgagaaaaaaggcatagaagctgttcttcaactgtttaagttgccatcaatacctgtatctgtctcaattggtcagagtatttctgttgcattcaaaaacttctcacctcagcattctgtttctcttgcacgagcagtgtgctcattctttagagaccaccttaaaataaccaatgaactgttgggttcgatctctggaactatgctggttggtagtgaacctgcaaagcaatcagctcttctgaagccactttctacccttgaagggcttttgtctattgccaattttctcctgaagggaactaccattatggtctcagaactggcttttgctgatgccgagatattgaaggaattggggaaggtttatattgaagtcacatggcagatatctttactcagtgattctaaggtggatacgcaagatgcagatcaagatgatttggctgaggaagcttcaatttctgaaagggatagtgatgatgacacaaatacagcaccactttcaagatatatgaatcctgtttcagcaagggcttctatatcaccgtggagcatggagcaagattttgtatcaactgtgcgatctgtttcccacatgcaccaccatggtcgacactcattatcaaggataagtgggcgcctaaatggagtgttgaatgcaacaagtactgatttggatggtccttgttttccagcagagacatcaaggcgtcatgatgctctaaagagaatccctgatgatgttgtttctgaacttctgaagaaattttgttgtaccatgcgttccttcctttctacccttgtcaaaggattaccggctcatcgtcggcctgactctaaccttaacccaaattcgagaagtcttgtgactgcactagctcaatttttccttagtgctcttggtttctctgggcattctactgctggttttgagatgtctttatctgtgaaatgccgttaccttggaaaggttgtggaagacatggctgtgcttacatttgacagtagacgtcgcttatgcaattctgcactcgttaatagcttctatgttaatggaacattcaaggatgttctaacgacctttgaagcaaccagtcagctactgtggacacttcctttctctgtccttgctgctgccacagatcaaggttcctctattaatgagaaggtgtctcacaattcctggctgctggatacgttacagagttactgtaaatttctggaatattatgtgaactccacgttcttattgtctccatcctcttctcataatcggcttcttgtccagcctattgtaactgagctgtcaattaatctattccctgtgccttcagatccagaatcatttgcgcgcatgctccaatctcaagttcttgatgcagttcttcctgtttggaatcatacaatgtttcctgtgtgcaacccagcttttgttacctccctggtgtcaattatgaacaatatatgctctgttgttggagatatgaagcaaagccgcagtagtgttggagttgccaatcagcgtgttactggcccccctcttgatgaatctgctattgctacaattgttgaaatgggattttcaagggctagggcagaagaatctcttagaagtgtgagaactaacagcgtggagatggcaacagattggttattcaaccatccagaagattctgtccaggaagatgtgcagcttgcacaagcgttagctttgtcacttggaagctccattgaaacacccaaggaggatggaagcaataagaatgatacagtcattgctgaagaaaaaggtgtatttgtgcttcctttggatgacatccttactgtatcgaccaagcttttccagtctagtgattccaccttggctttcccattgactgaccttctagcgacactgtgcaaccggaataagagcgaatactgcaagcgagtagtattgtatctttttgagcagttaagacatttttcgtcagatgccacggatatgggtgctttgtattctgttgctcatgtgctggctttgcttctgagtgaagacagtggcatacgtgaaactagtgctgaaaatggtgtcatctcccaagttcttaacatattaggaagtcttaaatcaaggacagaccagacagatcatacttggaattctatcagtgctctgttgcttatattgtataacatgctacaatttaatccaaaactcagtatggaaacaatggatggtatatccaagtcaatttctgatgcatccagtgctgacagcgaggaaaatccattaccaactgctgaacatagaactgaaattattgattcagcagatgatgcaagtgcaaatgtttttaaaaagattttagggaaatctactggctatttgaatgatcaagagagccaaaaggcactggttttctgctgtgaattcattaagctatgtgtgcctgcaacagttatgcatgctgtgcttcagctcagtgctcgcttgacaaaaacacacgcgcttgctgctctattctttgaaagtggtgggttagcatctctcttaaatctcccaggcacttgcatctttcctggctttgagaccttagcatctgctattgtgcggcacctcattgaggatccccagaccttgcagagtgccatggaattggagatacgacagtcattaagtaaccatggcagtcgtactccaagctcatttcttacaaatatggcaccactgatatctagagatcctgtgatcttcatgaaggctgcaacttcagtctgccaattggattattcaggagggagattgaatgtagtcttgttgaaggacaaggagaaagacagagagaaacagaatgttcctgtaacagaaagtggtgtgccatgtaatgagcctgttcgggtgactgctgaggttaagacggttgatacaccaaacagatgttcacggaaccacaaaaaggttcctgctagtcttcctcaagtgattgatcagcttcttgagatcatcatgagctatccatctgcaagcaaagaacatgggtttgatggttattccctgttgactccaatggatgttgatgaaccaaatacaaagggcaaatctaaagttggtgatggccaagaactggatggtgatgctttctctgagaggtctgccttgctatcaaagtttgcatttgtccttaagttgatgagtgaaatactccttatgtatgtgcatgcagtagggataattctgagacgggatacagagatatcagtgtcacgaagttgcgctcaaggtgctggacacagtggtttactgcatcatatattctatctgctacttcctctaccttcagtcaaaattgctgatacctcagatgattggattggtaatttgtctgagagagcttcctggttcttggtagctttatgctgcagatctgctgaaggtcgtagaagggttgtttctgaaattgtaaaggcacttaaccaattcattggttcagcaagcaacacctccagaggatctttaatacctgacagaaaagttttggctttctctgagcttgtgaattccatattgtcaaggaatagtcagagcaatttgcctgttcttggctgctcacctgatattgcaaaacctatggtagatggtggaatggtgcaatctctttctgttttgctgaaagtaattgatcttgaccacccagatgctgtaagggttgtcaacctgatattgaaggctttggatagcctcactaggactgcttacaccaccgatcaagtcctcaattcagatcgatttaccaagaacagattaccagggtcacatgaacaaacacatgaagctgatgacattgtaatccctgaacaaactacatacgattcacatcatcatactaatgacatcgaatctgcaagtcagcaagctcaagaactgtctcatgttggtggaaataataacgaaaaccttgaccaacctgctgaacaagaaatgggagttgatctagcagacaatagtacttctaatggcaatcctccaacaagagctgtgcagttcatgcgggaagaacctattgaaggtaatgtaatggctcctagtactgatattggtttggctttctcaatgcaacatcaagttgatggaatgggtgtggaagacgaggatcttggggaggaaagtgaggacgaagaagatgaggaaatagcagctgagggagctggtttgatgtccatagctgacacagatatcgaggaccaggagaacaatgcaattggtgatgattacaatgatgaccttatggatgaagaagatgacgactttcttgagaaccatgttatagaagtaagatggagggagagcttaactcgaatggattatgatcatcatctgagattttccaggggtcgtgcagactccagtggttttattgatatatcttctgagtcatttcatggtgtggggacagttgattcatttaatctgcatcgttcgtttggtcttgaacggcggcgccaaatcggaagtaggtcgcttcttgatcgaccaaggaccgatgtgaatgcctttcttcatccactgcttgtcaggccagcacagtctagggagggaactaattcagcgtggccctctggaggaacttcctcaagagattttcacatgctgtcttttgacatcccctcgtacatgttagatgctggcttttcaccagaaactgctcccccagtgtttggtgaacgtgttgtcagtactgctccaccacctttgatagatttctcacttggtatggattcccttagaattaggcggggccctggagataatttgtggaccgatgatggtcaaccacaggcaggtaatcatgcagctgctattgcccaggcagtggaggatcattttgtgtcacagttaactgtggctaataattcaaatagtgctcctcaggtgcggcctgaacagactggcaacggtgcgaatgcgcactcagagttaccagatacaggaaatgctgaacctgttacaaccgatccactttctcaacctgttggtcggcatcagctagtttgtactgttaaccaaggacctgtccctgctaatgatgtcctctgtcctacagatgtgcacgtaaatcagcaccttgttgattccatttatgatagccgcgttgtagaaccggtgcagcaaacagcagccggtgatcctaacactatacctcagagtgatgaaatgatgtgtattgctggtacacagcttggtggtcatcctgaaagagattccttgtctggtaatggaagttatggtaatattatgcaaaatgagattgaagcacctcaacaagttcacttgggtaatgatcctagggaacccccatctgatctggagtcaagttgccatgcacttgtcacttctgcaagtgctgctcctgagctgagtgatgctcatgtagattcttcagcagtcaatgctgatgttgacatgaacatcgttgatattgctgaaaatgaagttgggaactcagctcctgcttctgatggcaatgatttgtcttctaggagatatgaagatgctcttcaagagcctcagacagtgcaaactaatgctattaatgaggcctccagcgctaatgaaattgatcccacatttcttgaagcattgcctgaggatcttcgggcagaagtccttgcttctcagcagaaccgttctgccccagctgcttcctatactcccccagctgcagaagaaatagatcctgagtttttggctgctcttccaccagacatacaggctgaggttctagcccagcagcgagcacagaggattgcccactctcaaccagctggacagccagtagatatggataatgcttcaattatagcaactttccctcctgatttacgtgaagaggtgcttttgacctcatcagaagctgttctgtctgcccttccttcagctttacttgctgaagctcaaatgctacgggacagagagttgagtcgctatcgtgctagagggagcctttttggtggaagctacaggcttggagggaggaggctgccaactgataatcagacagttatagacagagctgttggtgttactgtgggtagaagggttatttctactacatgcagttcaaagggtaaagatgtggaggggaccccacttctagactcagaagctcttcgggcacttattcgccttctgcagcttgctccaccactcagcagaggccttcttcaaaggcttatgtccaatttatgtgcacatagtgtcacacgtgtcaccttggttggccatctgctcaacatgattaaacctgaatatgaggggcttagcgtatctgattgcatggctacatatagattacatggatgtcattggaacattgtttatgcacaatcttgctctgcaaatggtgtaccaccacttgtaacacgccgacttcttgaaatattgacatatcttgcttcagctagtccttctgttgtggatcttttgatctatttcaatccttcagctagtccaaactgtttgacattacagcacaataaagagacatctcaagaaagttcaatgcagaatatgatgccaccatattcaaaggcttatacacctattatattgcttcttaagcttctaaataaacccttatttctgcggagtcgagtataccttgagaaggtgttgtatttgcttgaagtagttattaacaatgctgcatcccaagttgattgtccacctcactctgtacagataactaacaattcagatattgaattcgttgatgggacaccatatcaaacacaggtggaaccatctactttggaacaaggtcatatcccggataataaccaaagtagagatgttgaggtcccaccatcttgtgctaaactggatgttaatgtgcatgcaatccttacccaacttcctgatgctgaattgcataatctgtgcaatattcttgcacttgagggtcttccagataaagtgtactcacttgcggcagaggtggtgaaaaaattggctagtgttgcagcatcgcatcggaaattcttttccattgagttagctggtgttgctcagagtttaagttcttctgccgttgaggagcttgtaaccctgaagaacactcaaatgcttgggctcagtacttgctctatggctggagctgcgattttgcggatactgcaagtcctatctacactaacttcgtgtgtgatggatagtagacatgagcaagatttaggacaggaagagcagtcttttttgtgggatctgaatgctggtcttcaacctttgtggcaagagttaagtgattgtataagtgccacagaggcaaaacttgtacacaattcatcattcgcttcccatgccccatcggtggatgctttagcagttagtgcttcatcatctgtttcttcaccgcttcctccaggcactcagcgcttgttgccgttcatagaatcattctttgtcctatgtgagaagcttcaaacaaatcaaccagttgcacaatcagattacactgttattgcccctgaagtaaaagaatctgctggaagttcatcttcaccttcactgaagactggtggaacttgcaatgttacttttataaggattgctgaaaagcatcgacggctgctcaacgttttcattagacaaaacccaagcatactggagaagtcactttctatgatgttgaaagtgccaaggctgatagattttgacaacaaacgtgcttactttcggtcacgtatcagacagcagcatgatcagcaccttccagctcctctacacattagtgttcgcagggcttatgttttggatgactcatataatcagttgagattacgtcgtacccaggatctcaaaggtcgtttgactgtgcaatttcaaggggaagagggcatagatgcaggaggactaactagggagtggtatcaactgctctctagagttatttttgacaaaggaactcttcttttcactacagttggaaacaatgcgactttccagcctaatccaaactcagattttcaaacggagcacctttcttacttcaagtttgttggtcgagtggttgctaaagcgttatttgatggccaattgttggacgtccacttcacccgttcattttacaaacatatcttaggtgctaaagtaacatatcatgatatagaggctattgatcctgattactacagaaatttgaagtggatgctggagaatgatgtaagtgaccttccctatttaacatttagcatggatcctgatgaggaaaaacatattctctatgagaagaccgaggttaccgattatgagctaaaaccgggtggaagaaacatcagggttactgaggaaacaaaacaagaatatgttgaccttgtagctgaacatatactgaccacagcaattcgtcctcaaatcaatggtttccttgaaggcttcacagagttagttccaagggatctaatatcgctattcaatgataaagaacttgaactgctgatcagtggtcttcctgaaattgacttggatgatctgaaggccaacacggaatatataggatattcagctgcatctcctgttatccagtggttctgggaagttgttagagcattcagcaaggaggacatggcgagactactacagttcgttaccggaacatctaaggtaccattggagggtttcaaagcgctacaaggtatctctggcccccagagatttcagatttacaaggcgtatggatctcctggtcgacttccatctgctcatacctgctttaaccagttggatttaccggaatatacctcaaaggagcaattagaagaacgactgcttcttgccattcatgaagctagtgaaggttttggctttggttgattggttcctcgggaggttgtaaagcgtgcactgggtcattggttttctgcttgacatgtacagattttgaaggcaattgagatggtcagtgctatgcataacatagatcgatccattggtctttttaggagtgctcatgctgcagtagggatctaatttattattccggatagtcgatgagtatgtcgatcgggttgggtacagtagtagagctctgcgacaagagcgctgatacaactagcttccttttgccttctaattaaaaggttgaatgtaaattcgtttaatgctgataccagttctgatgatttttgtactggttcctccgattctggaggccagtgcaatttctgcaaataaataagccttctggtgaagcaatggttcttatcggtgcgcgttctcataaagctaaagtgttcagcattttctctttattatcttgggcggaagaggttacggttcgttatgtttgaatcacattatgaattcgtatcctttatttggtattttttttgtcgagaggaactctatttgttgtttattcggcgcttttcttcgaagatgggacatgagatgaaagtaaattggatgcataataaagggtccaagtgagaaatggtaaaaaa

SEQ ID NO: 21372 - DNA, 11927 bp, Zea Mays
acgacacgcgcatctccctacctcgatacgattcttcgtcttctcttccccgcgatcgcgccagcgcccccgaaaaaccctaactacctggagcctcgacggcacctgccgcaggcgacggcgagcgaccccaggcggtggtagacggcgcagcgggttgccccttgtggaggcggacggcacggcgcaggtccttgccttcccggctatgcgaattgcggtatgaagctcaagcggcgacgcgcggtagaagtgcctccaagtataaaatctttcatcaacagtgttaccactgttcctcttgaggatgtagaattgccgctgaaggattttgcatgggaatttgacaagggggattttcatcactggttggaccttttcaatcattttgattctttctttgagagttatatcaaatcaaggaaagatttgcatcttgaagataattttcttgatgtggatcccccatttcctcgagaagcactacttcaaattctccgtgtatcaaaacttatattggaaaattgtacaaatagacacttctctagtttttttgagcagcatctgtctgcccttctagcatcaacagatgcggatattgttgaagcaagcttgcagacattaatggcatttgtagacaagtcagttgggaaaagctcaatacgcagtgcatctctcgcttcaaagttatttgccttatctcaaggctggggtggaaaagaaggtggtcttggattagtagcatgttctctacccagtgtatctgatccagtttccactgaggttggatccacactccattttgagttctatcgtgctgctgataaatcagagaaatcccagtgtctagagaaagagaacaagttggaagtaattcatttatcgaatgtcaattcgtgcaaggaggcagatcttgaaatattggacaggttggtcaaggattacagtgtgccacaagctttaaggtttcttcttcttacaagactgagatttgcaagggcttttgactctttaacatgtcgacaccagtatatctgtatccgcttgtatgcttttattgttcttgtccaagcaggccatgatctggaagttgtatcaacatttttgaacaatgaaccagaattcattgatgagctgttatcactacttagctatgaggatgagatacccgaaaagattcggatactgggagtcctttcattagtcgcactgtgccaagatcgacctcaccagcctactgtattgtcctcggtaacttctggtggtcatcggggtatccttcctattctcatgcagaatacagtggattctatcatcaatggttctatgaaatggtccataatatttgctgaagcacttctttcgcttgtatctatgctggtatcatcaacaccaggttctctagctctacaagaagcaggttttataccaactattttgcctcttctcaaagacacaaacacgcaacatttacatctagttagtaaggcagtgcatgttattgagagcttcctggattatcacaatccttcttcagcagtgttcagagatctaggtggactagatgacactattgctcgtcttaagctagaagtatctcaagttgaggttgattcaaaactaattgaccattctaccaatgaaggaaacgaggttgaaagttatccacctgtgcaagatatacaaccttcatgttctgaatccttgattttgtatcataggaagaacttaataaaagttttattacgtacaatatctctggcaacatatgtgcctggtagttctgctcgtgttgatggttcagaagagaatgtgttacctccatgtttatgtgcgatttttaagagaggcaaggacttcggtggtggtgttttctcacttgctgcaaatgttatgagtgatctcatacataaagatccaacatgctatactgttcttgattcagctggtttgccacaagcatttcttgatgccataatgtgtggtggactttacaactccgatgcagtctcatgtataccacagtgtttggatgcattgtgcctgaacaataatggtcttcaattggtaaaggaccggaatgctttaagatgttttgtgaaaatctttacgtctagatcatatatgaaagctcttagtggtgacacagcgggagctttatcaagtggacttgatgaattaatgcgtcatgcaccatcattacgatcctctggagttagcatgtttattgaaatcttgaacactatttttaaagtgtggtgtggtgtagactctatcccctataaggaatctgataattactctgcagttattcccatggatactgatgtggtggttgctacctcacagagtgagggtgtacctcctgaggtaggatgctcaggcgaaacagttgatgctcctttagatgctgtaacatcatcatccattgagttatttcttcctgagtgcatatgcaatgttgctcgcctgcttgaaactgttctgcaaaatgctgatatatgtaggctatttattgagaaaaaaggcatagaagctgttcttcaactgtttaagttgccatcaatacctgtatctgtctcaattggtcagagtatttctgttgcattcaaaaacttctcacctcagcattctgtttctcttgcacgagcagtgtgctcattctttagagaccaccttaaaataaccaatgaactgttgggttcgatctctggaactatgctggttggtagtgaacctgcaaagcaatcagctcttctgaagccactttctacccttgaagggcttttgtctattgccaattttctcctgaagggaactaccattatggtctcagaactggcttttgctgatgccgagatattgaaggaattggggaaggtttatattgaagtcacatggcagatatctttactcagtgattctaaggtggatacgcaagatgcagatcaagatgatttggctgaggaagcttcaatttctgaaagggatagtgatgatgacacaaatacagcaccactttcaagatatatgaatcctgtttcagcaagggcttctatatcaccgtggagcatggagcaagattttgtatcaactgtgcgatctgtttcccacatgcaccaccatggtcgacactcattatcaaggataagtgggcgcctaaatggagtgttgaatgcaacaagtactgatttggatggtccttgttttccagcagagacatcaaggcgtcatgatgctctaaagagaatccctgatgatgttgtttctgaacttctgaagaaattttgttgtaccatgcgttccttcctttctacccttgtcaaaggattaccggctcatcgtcggcctgactctaaccttaacccaaattcgagaagtcttgtgactgcactagctcaatttttccttagtgctcttggtttctctgggcattctactgctggttttgagatgtctttatctgtgaaatgccgttaccttggaaaggttgtggaagacatggctgtgcttacatttgacagtagacgtcgcttatgcaattctgcactcgttaatagcttctatgttaatggaacattcaaggatgttctaacgacctttgaagcaaccagtcagctactgtggacacttcctttctctgtccttgctgctgccacagatcaaggttcctctattaatgagaaggtgtctcacaattcctggctgctggatacgttacagagttactgtaaatttctggaatattatgtgaactccacgttcttattgtctccatcctcttctcataatcggcttcttgtccagcctattgtaactgagctgtcaattaatctattccctgtgccttcagatccagaatcatttgcgcgcatgctccaatctcaagttcttgatgcagttcttcctgtttggaatcatacaatgtttcctgtgtgcaacccagcttttgttacctccctggtgtcaattatgaacaatatatgctctgttgttggagatatgaagcaaagccgcagtagtgttggagttgccaatcagcgtgttactggcccccctcttgatgaatctgctattgctacaattgttgaaatgggattttcaagggctagggcagaagaatctcttagaagtgtgagaactaacagcgtggagatggcaacagattggttattcaaccatccagaagattctgtccaggaagatgtgcagcttgcacaagcgttagctttgtcacttggaagctccattgaaacacccaaggaggatggaagcaataagaatgatacagtcattgctgaagaaaaaggtgtatttgtgcttcctttggatgacatccttactgtatcgaccaagcttttccagtctagtgattccaccttggctttcccattgactgaccttctagcgacactgtgcaaccggaataagagcgaatactgcaagcgagtagtattgtatctttttgagcagttaagacatttttcgtcagatgccacggatatgggtgctttgtattctgttgctcatgtgctggctttgcttctgagtgaagacagtggcatacgtgaaactagtgctgaaaatggtgtcatctcccaagttcttaacatattaggaagtcttaaatcaaggacagaccagacagatcatacttggaattctatcagtgctctgttgcttatattgtataacatgctacaatttaatccaaaactcagtatggaaacaatggatggtatatccaagtcaatttctgatgcatccagtgctgacagcgaggaaaatccattaccaactgctgaacatagaactgaaattattgattcagcagatgatgcaagtgcaaatgtttttaaaaagattttagggaaatctactggctatttgaatgatcaagagagccaaaaggcactggttttctgctgtgaattcattaagctatgtgtgcctgcaacagttatgcatgctgtgcttcagctcagtgctcgcttgacaaaaacacacgcgcttgctgctctattctttgaaagtggtgggttagcatctctcttaaatctcccaggcacttgcatctttcctggctttgagaccttagcatctgctattgtgcggcacctcattgaggatccccagaccttgcagagtgccatggaattggagatacgacagtcattaagtaaccatggcagtcgtactccaagctcatttcttacaaatatggcaccactgatatctagagatcctgtgatcttcatgaaggctgcaacttcagtctgccaattggattattcaggagggagattgaatgtagtcttgttgaaggacaaggagaaagacagagagaaacagaatgttcctgtaacagaaagtggtgtgccatgtaatgagcctgttcgggtgactgctgaggttaagacggttgatacaccaaacagatgttcacggaaccacaaaaaggttcctgctagtcttcctcaagtgattgatcagcttcttgagatcatcatgagctatccatctgcaagcaaagaacatgggtttgatggttattccctgttgactccaatggatgttgatgaaccaaatacaaagggcaaatctaaagttggtgatggccaagaactggatggtgatgctttctctgagaggtctgccttgctatcaaagtttgcatttgtccttaagttgatgagtgaaatactccttatgtatgtgcatgcagtagggataattctgagacgggatacagagatatcagtgtcacgaagttgcgctcaaggtgctggacacagtggtttactgcatcatatattctatctgctacttcctctaccttcagtcaaaattgctgatacctcagatgattggattggtaatttgtctgagagagcttcctggttcttggtagctttatgctgcagatctgctgaaggtcgtagaagggttgtttctgaaattgtaaaggcacttaaccaattcattggttcagcaagcaacacctccagaggatctttaatacctgacagaaaagttttggctttctctgagcttgtgaattccatattgtcaaggaatagtcagagcaatttgcctgttcttggctgctcacctgatattgcaaaacctatggtagatggtggaatggtgcaatctctttctgttttgctgaaagtaattgatcttgaccacccagatgctgtaagggttgtcaacctgatattgaaggctttggatagcctcactaggactgcttacaccaccgatcaagtcctcaattcagatcgatttaccaagaacagattaccagggtcacatgaacaaacacatgaagctgatgacattgtaatccctgaacaaactacatacgattcacatcatcatactaatgacatcgaatctgcaagtcagcaagctcaagaactgtctcatgttggtggaaataataacgaaaaccttgaccaacctgctgaacaagaaatgggagttgatctagcagacaatagtacttctaatggcaatcctccaacaagagctgtgcagttcatgcgggaagaacctattgaaggtaatgtaatggctcctagtactgatattggtttggctttctcaatgcaacatcaagttgatggaatgggtgtggaagacgaggatcttggggaggaaagtgaggacgaagaagatgaggaaatagcagctgagggagctggtttgatgtccatagctgacacagatatcgaggaccaggagaacaatgcaattggtgatgattacaatgatgaccttatggatgaagaagatgacgactttcttgagaaccatgttatagaagtaagatggagggagagcttaactcgaatggattatgatcatcatctgagattttccaggggtcgtgcagactccagtggttttattgatatatcttctgagtcatttcatggtgtggggacagttgattcatttaatctgcatcgttcgtttggtcttgaacggcggcgccaaatcggaagtaggtcgcttcttgatcgaccaaggaccgatgtgaatgcctttcttcatccactgcttgtcaggccagcacagtctagggagggaactaattcagcgtggccctctggaggaacttcctcaagagattttcacatgctgtcttttgacatcccctcgtacatgttagatgctggcttttcaccagaaactgctcccccagtgtttggtgaacgtgttgtcagtactgctccaccacctttgatagatttctcacttggtatggattcccttagaattaggcggggccctggagataatttgtggaccgatgatggtcaaccacaggcaggtaatcatgcagctgctattgcccaggcagtggaggatcattttgtgtcacagttaactgtggctaataattcaaatagtgctcctcaggtgcggcctgaacagactggcaacggtgcgaatgcgcactcagagttaccagatacaggaaatgctgaacctgttacaaccgatccactttctcaacctgttggtcggcatcagctagtttgtactgttaaccaaggacctgtccctgctaatgatgtcctctgtcctacagatgtgcacgtaaatcagcaccttgttgattccatttatgatagccgcgttgtagaaccggtgcagcaaacagcagccggtgatcctaacactatacctcagagtgatgaaatgatgtgtattgctggtacacagcttggtggtcatcctgaaagagattccttgtctggtaatggaagttatggtaatattatgcaaaatgagattgaagcacctcaacaagttcacttgggtaatgatcctagggaacccccatctgatctggagtcaagttgccatgcacttgtcacttctgcaagtgctgctcctgagctgagtgatgctcatgtagattcttcagcagtcaatgctgatgttgacatgaacatcgttgatattgctgaaaatgaagttgggaactcagctcctgcttctgatggcaatgatttgtcttctaggagatatgaagatgctcttcaagagcctcagacagtgcaaactaatgctattaatgaggcctccagcgctaatgaaattgatcccacatttcttgaagcattgcctgaggatcttcgggcagaagtccttgcttctcagcagaaccgttctgccccagctgcttcctatactcccccagctgcagaagaaatagatcctgagtttttggctgctcttccaccagacatacaggctgaggttctagcccagcagcgagcacagaggattgcccactctcaaccagctggacagccagtagatatggataatgcttcaattatagcaactttccctcctgatttacgtgaagaggtgcttttgacctcatcagaagctgttctgtctgcccttccttcagctttacttgctgaagctcaaatgctacgggacagagagttgagtcgctatcgtgctagagggagcctttttggtggaagctacaggcttggagggaggaggctgccaactgataatcagacagttatagacagagctgttggtgttactgtgggtagaagggttatttctactacatgcagttcaaagggtaaagatgtggaggggaccccacttctagactcagaagctcttcgggcacttattcgccttctgcagcttgctccaccactcagcagaggccttcttcaaaggcttatgtccaatttatgtgcacatagtgtcacacgtgtcaccttggttggccatctgctcaacatgattaaacctgaatatgaggggcttagcgtatctgattgcatggctacatatagattacatggatgtcattggaacattgtttatgcacaatcttgctctgcaaatggtgtaccaccacttgtaacacgccgacttcttgaaatattgacatatcttgcttcagctagtccttctgttgtggatcttttgatctatttcaatccttcagctagtccaaactgtttgacattacagcacaataaagagacatctcaagaaagttcaatgcagaatatgatgccaccatattcaaaggcttatacacctattatattgcttcttaagcttctaaataaacccttatttctgcggagtcgagtataccttgagaagataactaacaattcagatattgaattcgttgatgggacaccatatcaaacacaggtggaaccatctactttggaacaaggtcatatcccggataataaccaaagtagagatgttgaggtcccaccatcttgtgctaaactggatgttaatgtgcatgcaatccttacccaacttcctgatgctgaattgcataatctgtgcaatattcttgcacttgagggtcttccagataaagtgtactcacttgcggcagaggtggtgaaaaaattggctagtgttgcagcatcgcatcggaaattcttttccattgagttagctggtgttgctcagagtttaagttcttctgccgttgaggagcttgtaaccctgaagaacactcaaatgcttgggctcagtacttgctctatggctggagctgcgattttgcggatactgcaagtcctatctacactaacttcgtgtgtgatggatagtagacatgagcaagatttaggacaggaagagcagtcttttttgtgggatctgaatgctggtcttcaacctttgtggcaagagttaagtgattgtataagtgccacagaggcaaaacttgtacacaattcatcattcgcttcccatgccccatcggtggatgctttagcagttagtgcttcatcatctgtttcttcaccgcttcctccaggcactcagcgcttgttgccgttcatagaatcattctttgtcctatgtgagaagcttcaaacaaatcaaccagttgcacaatcagattacactgttattgcccctgaagtaaaagaatctgctggaagttcatcttcaccttcactgaagactggtggaacttgcaatgttacttttataaggattgctgaaaagcatcgacggctgctcaacgttttcattagacaaaacccaagcatactggagaagtcactttctatgatgttgaaagtgccaaggctgatagattttgacaacaaacgtgcttactttcggtcacgtatcagacagcagcatgatcagcaccttccagctcctctacacattagtgttcgcagggcttatgttttggatgactcatataatcagttgagattacgtcgtacccaggatctcaaaggtcgtttgactgtgcaatttcaaggggaagagggcatagatgcaggaggactaactagggagtggtatcaactgctctctagagttatttttgacaaaggaactcttcttttcactacagttggaaacaatgcgactttccagcctaatccaaactcagattttcaaacggagcacctttcttacttcaagtttgttggtcgagtggttgctaaagcgttatttgatggccaattgttggacgtccacttcacccgttcattttacaaacatatcttaggtgctaaagtaacatatcatgatatagaggctattgatcctgattactacagaaatttgaagtggatgctggagaatgatgtaagtgaccttccctatttaacatttagcatggatcctgatgaggaaaaacatattctctatgagaagaccgaggttaccgattatgagctaaaaccgggtggaagaaacatcagggttactgaggaaacaaaacaagaatatgttgaccttgtagctgaacatatactgaccacagcaattcgtcctcaaatcaatggtttccttgaaggcttcacagagttagttccaagggatctaatatcgctattcaatgataaagaacttgaactgctgatcagtggtcttcctgaaattgacttggatgatctgaaggccaacacggaatatataggatattcagctgcatctcctgttatccagtggttctgggaagttgttagagcattcagcaaggaggacatggcgagactactacagttcgttaccggaacatctaaggtaccattggagggtttcaaagcgctacaaggtatctctggcccccagagatttcagatttacaaggcgtatggatctcctggtcgacttccatctgctcatacctgctttaaccagttggatttaccggaatatacctcaaaggagcaattagaagaacgactgcttcttgccattcatgaagctagtgaaggttttggctttggttgattggttcctcgggaggttgtaaagcgtgcactgggtcattggttttctgcttgacatgtacagattttgaaggcaattgagatggtcagtgctatgcataacatagatcgatccattggtctttttaggagtgctcatgctgcagtagggatctaatttattattccggatagtcgatgagtatgtcgatcgggttgggtacagtagtagagctctgcgacaagagcgctgatacaactagcttccttttgccttctaattaaaaggttgaatgtaaattcgtttaatgctgataccagttctgatgatttttgtactggttcctccgattctggaggccagtgcaatttctgcaaataaataagccttctggtgaagcaatggttcttatcggtgcgcgttctcataaagctaaagtgttcagcattttctctttattatcttgggcggaagaggttacggttcgttatgtttgaatcacattatgaattcgtatcctttatttggtattttttttgtcgagaggaactctatttgttgtttattcggcgcttttcttcgaagatgggacatgagatgaaagtaaattggatgcataataaagggtccaagtgagaaatggtaaaaaa

SEQ ID NO: 21373 - DNA, 11911 bp, Zea Mays
acgacacgcgcatctccctacctcgatacgattcttcgtcttctcttccccgcgatcgcgccagcgcccccgaaaaaccctaactacctggagcctcgacggcacctgccgcaggcgacggcgagcgaccccaggcggtggtagacggcgcagcgggttgccccttgtggaggcggacggcacggcgcaggtccttgccttcccggctatgcgaattgcggtatgaagctcaagcggcgacgcgcggtagaagtgcctccaagtataaaatctttcatcaacagtgttaccactgttcctcttgaggatgtagaattgccgctgaaggattttgcatgggaatttgacaagggggattttcatcactggttggaccttttcaatcattttgattctttctttgagagttatatcaaatcaaggaaagatttgcatcttgaagataattttcttgatgtggatcccccatttcctcgagaagcactacttcaaattctccgtgtatcaaaacttatattggaaaattgtacaaatagacacttctctagtttttttgagcagcatctgtctgcccttctagcatcaacagatgcggatattgttgaagcaagcttgcagacattaatggcatttgtagacaagtcagttgggaaaagctcaatacgcagtgcatctctcgcttcaaagttatttgccttatctcaaggctggggtggaaaagaaggtggtcttggattagtagcatgttctctacccagtgtatctgatccagtttccactgaggttggatccacactccattttgagttctatcgtgctgctgataaatcagagaaatcccagtgtctagagaaagagaacaagttggaagtaattcatttatcgaatgtcaattcgtgcaaggaggcagatcttgaaatattggacaggttggtcaaggattacagtgtgccacaagctttaaggtttcttcttcttacaagactgagatttgcaagggcttttgactctttaacatgtcgacaccagtatatctgtatccgcttgtatgcttttattgttcttgtccaagcaggccatgatctggaagttgtatcaacatttttgaacaatgaaccagaattcattgatgagctgttatcactacttagctatgaggatgagatacccgaaaagattcggatactgggagtcctttcattagtcgcactgtgccaagatcgacctcaccagcctactgtattgtcctcggtaacttctggtggtcatcggggtatccttcctattctcatgcagaatacagtggattctatcatcaatggttctatgaaatggtccataatatttgctgaagcacttctttcgcttgtatctatgctggtatcatcaacaccaggttctctagctctacaagaagcaggttttataccaactattttgcctcttctcaaagacacaaacacgcaacatttacatctagttagtaaggcagtgcatgttattgagagcttcctggattatcacaatccttcttcagcagtgttcagagatctaggtggactagatgacactattgctcgtcttaagctagaagtatctcaagttgaggttgattcaaaactaattgaccattctaccaatgaaggaaacgaggttgaaagttatccacctgtgcaagatatacaaccttcatgttctgaatccttgattttgtatcataggaagaacttaataaaagttttattacgtacaatatctctggcaacatatgtgcctggtagttctgctcgtgttgatggttcagaagagaatgtgttacctccatgtttatgtgcgatttttaagagaggcaaggacttcggtggtggtgttttctcacttgctgcaaatgttatgagtgatctcatacataaagatccaacatgctatactgttcttgattcagctggtttgccacaagcatttcttgatgccataatgtgtggtggactttacaactccgatgcagtctcatgtataccacagtgtttggatgcattgtgcctgaacaataatggtcttcaattggtaaaggaccggaatgctttaagatgttttgtgaaaatctttacgtctagatcatatatgaaagctcttagtggtgacacagcgggagctttatcaagtggacttgatgaattaatgcgtcatgcaccatcattacgatcctctggagttagcatgtttattgaaatcttgaacactatttttaaagtgtggtgtggtgtagactctatcccctataaggaatctgataattactctgcagttattcccatggatactgatgtggtggttgctacctcacagagtgagggtgtacctcctgaggtaggatgctcaggcgaaacagttgatgctcctttagatgctgtaacatcatcatccattgagttatttcttcctgagtgcatatgcaatgttgctcgcctgcttgaaactgttctgcaaaatgctgatatatgtaggctatttattgagaaaaaaggcatagaagctgttcttcaactgtttaagttgccatcaatacctgtatctgtctcaattggtcagagtatttctgttgcattcaaaaacttctcacctcagcattctgtttctcttgcacgagcagtgtgctcattctttagagaccaccttaaaataaccaatgaactgttgggttcgatctctggaactatgctggttggtagtgaacctgcaaagcaatcagctcttctgaagccactttctacccttgaagggcttttgtctattgccaattttctcctgaagggaactaccattatggtctcagaactggcttttgctgatgccgagatattgaaggaattggggaaggtttatattgaagtcacatggcagatatctttactcagtgattctaaggtggatacgcaagatgcagatcaagatgatttggctgaggaagcttcaatttctgaaagggatagtgatgatgacacaaatacagcaccactttcaagatatatgaatcctgtttcagcaagggcttctatatcaccgtggagcatggagcaagattttgtatcaactgtgcgatctgtttcccacatgcaccaccatggtcgacactcattatcaaggataagtgggcgcctaaatggagtgttgaatgcaacaagtactgatttggatggtccttgttttccagcagagacatcaaggcgtcatgatgctctaaagagaatccctgatgatgttgtttctgaacttctgaagaaattttgttgtaccatgcgttccttcctttctacccttgtcaaaggattaccggctcatcgtcggcctgactctaaccttaacccaaattcgagaagtcttgtgactgcactagctcaatttttccttagtgctcttggtttctctgggcattctactgctggttttgagatgtctttatctgtgaaatgccgttaccttggaaaggttgtggaagacatggctgtgcttacatttgacagtagacgtcgcttatgcaattctgcactcgttaatagcttctatgttaatggaacattcaaggatgttctaacgacctttgaagcaaccagtcagctactgtggacacttcctttctctgtccttgctgctgccacagatcaaggttcctctattaatgagaaggtgtctcacaattcctggctgctggatacgttacagagttactgtaaatttctggaatattatgtgaactccacgttcttattgtctccatcctcttctcataatcggcttcttgtccagcctattgtaactgagctgtcaattaatctattccctgtgccttcagatccagaatcatttgcgcgcatgctccaatctcaagttcttgatgcagttcttcctgtttggaatcatacaatgtttcctgtgtgcaacccagcttttgttacctccctggtgtcaattatgaacaatatatgctctgttgttggagatatgaagcaaagccgcagtagtgttggagttgccaatcagcgtgttactggcccccctcttgatgaatctgctattgctacaattgttgaaatgggattttcaagggctagggcagaagaatctcttagaagtgtgagaactaacagcgtggagatggcaacagattggttattcaaccatccagaagattctgtccaggaagatgtgcagcttgcacaagcgttagctttgtcacttggaagctccattgaaacacccaaggaggatggaagcaataagaatgatacagtcattgctgaagaaaaaggtgtatttgtgcttcctttggatgacatccttactgtatcgaccaagcttttccagtctagtgattccaccttggctttcccattgactgaccttctagcgacactgtgcaaccggaataagagcgaatactgcaagcgagtagtattgtatctttttgagcagttaagacatttttcgtcagatgccacggatatgggtgctttgtattctgttgctcatgtgctggctttgcttctgagtgaagacagtggcatacgtgaaactagtgctgaaaatggtgtcatctcccaagttcttaacatattaggaagtcttaaatcaaggacagaccagacagatcatacttggaattctatcagtgctctgttgcttatattgtataacatgctacaatttaatccaaaactcagtatggaaacaatggatggtatatccaagtcaatttctgatgcatccagtgctgacagcgaggaaaatccattaccaactgctgaacatagaactgaaattattgattcagcagatgatgcaagtgcaaatgtttttaaaaagattttagggaaatctactggctatttgaatgatcaagagagccaaaaggcactggttttctgctgtgaattcattaagctatgtgtgcctgcaacagttatgcatgctgtgcttcagctcagtgctcgcttgacaaaaacacacgcgcttgctgctctattctttgaaagtggtgggttagcatctctcttaaatctcccaggcacttgcatctttcctggctttgagaccttagcatctgctattgtgcggcacctcattgaggatccccagaccttgcagagtgccatggaattggagatacgacagtcattaagtaaccatggcagtcgtactccaagctcatttcttacaaatatggcaccactgatatctagagatcctgtgatcttcatgaaggctgcaacttcagtctgccaattggattattcaggagggagattgaatgtagtcttgttgaaggacaaggagaaagacagagagaaacagaatgttcctgtaacagaaagtggtgtgccatgtaatgagcctgttcgggtgactgctgaggttaagacggttgatacaccaaacagatgttcacggaaccacaaaaaggttcctgctagtcttcctcaagtgattgatcagcttcttgagatcatcatgagctatccatctgcaagcaaagaacatgggtttgatggttattccctgttgactccaatggatgttgatgaaccaaatacaaagggcaaatctaaagttggtgatggccaagaactggatggtgatgctttctctgagaggtctgccttgctatcaaagtttgcatttgtccttaagttgatgagtgaaatactccttatgtatgtgcatgcagtagggataattctgagacgggatacagagatatcagtgtcacgaagttgcgctcaaggtgctggacacagtggtttactgcatcatatattctatctgctacttcctctaccttcagtcaaaattgctgatacctcagatgattggattggtaatttgtctgagagagcttcctggttcttggtagctttatgctgcagatctgctgaaggtcgtagaagggttgtttctgaaattgtaaaggcacttaaccaattcattggttcagcaagcaacacctccagaggatctttaatacctgacagaaaagttttggctttctctgagcttgtgaattccatattgtcaaggaatagtcagagcaatttgcctgttcttggctgctcacctgatattgcaaaacctatggtagatggtggaatggtgcaatctctttctgttttgctgaaagtaattgatcttgaccacccagatgctgtaagggttgtcaacctgatattgaaggctttggatagcctcactaggactgcttacaccaccgatcaagtcctcaattcagatcgatttaccaagaacagattaccagggtcacatgaacaaacacatgaagctgatgacattgtaatccctgaacaaactacatacgattcacatcatcatactaatgacatcgaatctgcaagtcagcaagctcaagaactgtctcatgttggtggaaataataacgaaaaccttgaccaacctgctgaacaagaaatgggagttgatctagcagacaatagtacttctaatggcaatcctccaacaagagctgtgcagttcatgcgggaagaacctattgaaggtaatgtaatggctcctagtactgatattggtttggctttctcaatgcaacatcaagttgatggaatgggtgtggaagacgaggatcttggggaggaaagtgaggacgaagaagatgaggaaatagcagctgagggagctggtttgatgtccatagctgacacagatatcgaggaccaggagaacaatgcaattggtgatgattacaatgatgaccttatggatgaagaagatgacgactttcttgagaaccatgttatagaagtaagatggagggagagcttaactcgaatggattatgatcatcatctgagattttccaggggtcgtgcagactccagtggttttattgatatatcttctgagtcatttcatggtgtggggacagttgattcatttaatctgcatcgttcgtttggtcttgaacggcggcgccaaatcggaagtaggtcgcttcttgatcgaccaaggaccgatgtgaatgcctttcttcatccactgcttgtcaggccagcacagtctagggagggaactaattcagcgtggccctctggaggaacttcctcaagagattttcacatgctgtcttttgacatcccctcgtacatgttagatgctggcttttcaccagaaactgctcccccagtgtttggtgaacgtgttgtcagtactgctccaccacctttgatagatttctcacttggtatggattcccttagaattaggcggggccctggagataatttgtggaccgatgatggtcaaccacaggcaggtaatcatgcagctgctattgcccaggcagtggaggatcattttgtgtcacagttaactgtggctaataattcaaatagtgctcctcaggtgcggcctgaacagactggcaacggtgcgaatgcgcactcagagttaccagatacaggaaatgctgaacctgttacaaccgatccactttctcaacctgttggtcggcatcagctagtttgtactgttaaccaaggacctgtccctgctaatgatgtcctctgtcctacagatgtgcacgtaaatcagcaccttgttgattccatttatgatagccgcgttgtagaaccggtgcagcaaacagcagccggtgatcctaacactatacctcagagtgatgaaatgatgtgtattgctggtacacagcttggtggtcatcctgaaagagattccttgtctggtaatggaagttatggtaatattatgcaaaatgagattgaagcacctcaacaagttcacttgggtaatgatcctagggaacccccatctgatctggagtcaagttgccatgcacttgtcacttctgcaagtgctgctcctgagctgagtgatgctcatgtagattcttcagcagtcaatgctgatgttgacatgaacatcgttgatattgctgaaaatgaagttgggaactcagctcctgcttctgatggcaatgatttgtcttctaggagatatgaagatgctcttcaagagcctcagacagtgcaaactaatgctattaatgaggcctccagcgctaatgaaattgatcccacatttcttgaagcattgcctgaggatcttcgggcagaagtccttgcttctcagcagaaccgttctgccccagctgcttcctatactcccccagctgcagaagaaatagatcctgagtttttggctgctcttccaccagacatacaggctgaggttctagcccagcagcgagcacagaggattgcccactctcaaccagctggacagccagtagatatggataatgcttcaattatagcaactttccctcctgatttacgtgaagaggtgcttttgacctcatcagaagctgttctgtctgcccttccttcagctttacttgctgaagctcaaatgctacgggacagagagttgagtcgctatcgtgctagagggagcctttttggtggaagctacaggcttggagggaggaggctgccaactgataatcagacagttatagacagagctgttggtgttactgtgggtagaagggttatttctactacatgcagttcaaaggaggccttcttcaaaggcttatgtccaatttatgtgcacatagtgtcacacgtgtcaccttggttggccatctgctcaacatgattaaacctgaatatgaggggcttagcgtatctgattgcatggctacatatagattacatggatgtcattggaacattgtttatgcacaatcttgctctgcaaatggtgtaccaccacttgtaacacgccgacttcttgaaatattgacatatcttgcttcagctagtccttctgttgtggatcttttgatctatttcaatccttcagctagtccaaactgtttgacattacagcacaataaagagacatctcaagaaagttcaatgcagaatatgatgccaccatattcaaaggcttatacacctattatattgcttcttaagcttctaaataaacccttatttctgcggagtcgagtataccttgagaaggtgttgtatttgcttgaagtagttattaacaatgctgcatcccaagttgattgtccacctcactctgtacagataactaacaattcagatattgaattcgttgatgggacaccatatcaaacacaggtggaaccatctactttggaacaaggtcatatcccggataataaccaaagtagagatgttgaggtcccaccatcttgtgctaaactggatgttaatgtgcatgcaatccttacccaacttcctgatgctgaattgcataatctgtgcaatattcttgcacttgagggtcttccagataaagtgtactcacttgcggcagaggtggtgaaaaaattggctagtgttgcagcatcgcatcggaaattcttttccattgagttagctggtgttgctcagagtttaagttcttctgccgttgaggagcttgtaaccctgaagaacactcaaatgcttgggctcagtacttgctctatggctggagctgcgattttgcggatactgcaagtcctatctacactaacttcgtgtgtgatggatagtagacatgagcaagatttaggacaggaagagcagtcttttttgtgggatctgaatgctggtcttcaacctttgtggcaagagttaagtgattgtataagtgccacagaggcaaaacttgtacacaattcatcattcgcttcccatgccccatcggtggatgctttagcagttagtgcttcatcatctgtttcttcaccgcttcctccaggcactcagcgcttgttgccgttcatagaatcattctttgtcctatgtgagaagcttcaaacaaatcaaccagttgcacaatcagattacactgttattgcccctgaagtaaaagaatctgctggaagttcatcttcaccttcactgaagactggtggaacttgcaatgttacttttataaggattgctgaaaagcatcgacggctgctcaacgttttcattagacaaaacccaagcatactggagaagtcactttctatgatgttgaaagtgccaaggctgatagattttgacaacaaacgtgcttactttcggtcacgtatcagacagcagcatgatcagcaccttccagctcctctacacattagtgttcgcagggcttatgttttggatgactcatataatcagttgagattacgtcgtacccaggatctcaaaggtcgtttgactgtgcaatttcaaggggaagagggcatagatgcaggaggactaactagggagtggtatcaactgctctctagagttatttttgacaaaggaactcttcttttcactacagttggaaacaatgcgactttccagcctaatccaaactcagattttcaaacggagcacctttcttacttcaagtttgttggtcgagtggttgctaaagcgttatttgatggccaattgttggacgtccacttcacccgttcattttacaaacatatcttaggtgctaaagtaacatatcatgatatagaggctattgatcctgattactacagaaatttgaagtggatgctggagaatgatgtaagtgaccttccctatttaacatttagcatggatcctgatgaggaaaaacatattctctatgagaagaccgaggttaccgattatgagctaaaaccgggtggaagaaacatcagggttactgaggaaacaaaacaagaatatgttgaccttgtagctgaacatatactgaccacagcaattcgtcctcaaatcaatggtttccttgaaggcttcacagagttagttccaagggatctaatatcgctattcaatgataaagaacttgaactgctgatcagtggtcttcctgaaattgacttggatgatctgaaggccaacacggaatatataggatattcagctgcatctcctgttatccagtggttctgggaagttgttagagcattcagcaaggaggacatggcgagactactacagttcgttaccggaacatctaaggtaccattggagggtttcaaagcgctacaaggtatctctggcccccagagatttcagatttacaaggcgtatggatctcctggtcgacttccatctgctcatacctgctttaaccagttggatttaccggaatatacctcaaaggagcaattagaagaacgactgcttcttgccattcatgaagctagtgaaggttttggctttggttgattggttcctcgggaggttgtaaagcgtgcactgggtcattggttttctgcttgacatgtacagattttgaaggcaattgagatggtcagtgctatgcataacatagatcgatccattggtctttttaggagtgctcatgctgcagtagggatctaatttattattccggatagtcgatgagtatgtcgatcgggttgggtacagtagtagagctctgcgacaagagcgctgatacaactagcttccttttgccttctaattaaaaggttgaatgtaaattcgtttaatgctgataccagttctgatgatttttgtactggttcctccgattctggaggccagtgcaatttctgcaaataaataagccttctggtgaagcaatggttcttatcggtgcgcgttctcataaagctaaagtgttcagcattttctctttattatcttgggcggaagaggttacggttcgttatgtttgaatcacattatgaattcgtatcctttatttggtattttttttgtcgagaggaactctatttgttgtttattcggcgcttttcttcgaagatgggacatgagatgaaagtaaattggatgcataataaagggtccaagtgagaaatggtaaaaaa

SEQ ID NO: 21374 - DNA, 11792 bp, Zea Mays
acgacacgcgcatctccctacctcgatacgattcttcgtcttctcttccccgcgatcgcgccagcgcccccgaaaaaccctaactacctggagcctcgacggcacctgccgcaggcgacggcgagcgaccccaggcggtggtagacggcgcagcgggttgccccttgtggaggcggacggcacggcgcaggtccttgccttcccggctatgcgaattgcggtatgaagctcaagcggcgacgcgcggtagaagtgcctccaagtataaaatctttcatcaacagtgttaccactgttcctcttgaggatgtagaattgccgctgaaggattttgcatgggaatttgacaagcagcatctgtctgcccttctagcatcaacagatgcggatattgttgaagcaagcttgcagacattaatggcatttgtagacaagtcagttgggaaaagctcaatacgcagtgcatctctcgcttcaaagttatttgccttatctcaaggctggggtggaaaagaaggtggtcttggattagtagcatgttctctacccagtgtatctgatccagtttccactgaggttggatccacactccattttgagttctatcgtgctgctgataaatcagagaaatcccagtgtctagagaaagagaacaagttggaagtaattcatttatcgaatgtcaattcgtgcaaggaggcagatcttgaaatattggacaggttggtcaaggattacagtgtgccacaagctttaaggtttcttcttcttacaagactgagatttgcaagggcttttgactctttaacatgtcgacaccagtatatctgtatccgcttgtatgcttttattgttcttgtccaagcaggccatgatctggaagttgtatcaacatttttgaacaatgaaccagaattcattgatgagctgttatcactacttagctatgaggatgagatacccgaaaagattcggatactgggagtcctttcattagtcgcactgtgccaagatcgacctcaccagcctactgtattgtcctcggtaacttctggtggtcatcggggtatccttcctattctcatgcagaatacagtggattctatcatcaatggttctatgaaatggtccataatatttgctgaagcacttctttcgcttgtatctatgctggtatcatcaacaccaggttctctagctctacaagaagcaggttttataccaactattttgcctcttctcaaagacacaaacacgcaacatttacatctagttagtaaggcagtgcatgttattgagagcttcctggattatcacaatccttcttcagcagtgttcagagatctaggtggactagatgacactattgctcgtcttaagctagaagtatctcaagttgaggttgattcaaaactaattgaccattctaccaatgaaggaaacgaggttgaaagttatccacctgtgcaagatatacaaccttcatgttctgaatccttgattttgtatcataggaagaacttaataaaagttttattacgtacaatatctctggcaacatatgtgcctggtagttctgctcgtgttgatggttcagaagagaatgtgttacctccatgtttatgtgcgatttttaagagaggcaaggacttcggtggtggtgttttctcacttgctgcaaatgttatgagtgatctcatacataaagatccaacatgctatactgttcttgattcagctggtttgccacaagcatttcttgatgccataatgtgtggtggactttacaactccgatgcagtctcatgtataccacagtgtttggatgcattgtgcctgaacaataatggtcttcaattggtaaaggaccggaatgctttaagatgttttgtgaaaatctttacgtctagatcatatatgaaagctcttagtggtgacacagcgggagctttatcaagtggacttgatgaattaatgcgtcatgcaccatcattacgatcctctggagttagcatgtttattgaaatcttgaacactatttttaaagtgtggtgtggtgtagactctatcccctataaggaatctgataattactctgcagttattcccatggatactgatgtggtggttgctacctcacagagtgagggtgtacctcctgaggtaggatgctcaggcgaaacagttgatgctcctttagatgctgtaacatcatcatccattgagttatttcttcctgagtgcatatgcaatgttgctcgcctgcttgaaactgttctgcaaaatgctgatatatgtaggctatttattgagaaaaaaggcatagaagctgttcttcaactgtttaagttgccatcaatacctgtatctgtctcaattggtcagagtatttctgttgcattcaaaaacttctcacctcagcattctgtttctcttgcacgagcagtgtgctcattctttagagaccaccttaaaataaccaatgaactgttgggttcgatctctggaactatgctggttggtagtgaacctgcaaagcaatcagctcttctgaagccactttctacccttgaagggcttttgtctattgccaattttctcctgaagggaactaccattatggtctcagaactggcttttgctgatgccgagatattgaaggaattggggaaggtttatattgaagtcacatggcagatatctttactcagtgattctaaggtggatacgcaagatgcagatcaagatgatttggctgaggaagcttcaatttctgaaagggatagtgatgatgacacaaatacagcaccactttcaagatatatgaatcctgtttcagcaagggcttctatatcaccgtggagcatggagcaagattttgtatcaactgtgcgatctgtttcccacatgcaccaccatggtcgacactcattatcaaggataagtgggcgcctaaatggagtgttgaatgcaacaagtactgatttggatggtccttgttttccagcagagacatcaaggcgtcatgatgctctaaagagaatccctgatgatgttgtttctgaacttctgaagaaattttgttgtaccatgcgttccttcctttctacccttgtcaaaggattaccggctcatcgtcggcctgactctaaccttaacccaaattcgagaagtcttgtgactgcactagctcaatttttccttagtgctcttggtttctctgggcattctactgctggttttgagatgtctttatctgtgaaatgccgttaccttggaaaggttgtggaagacatggctgtgcttacatttgacagtagacgtcgcttatgcaattctgcactcgttaatagcttctatgttaatggaacattcaaggatgttctaacgacctttgaagcaaccagtcagctactgtggacacttcctttctctgtccttgctgctgccacagatcaaggttcctctattaatgagaaggtgtctcacaattcctggctgctggatacgttacagagttactgtaaatttctggaatattatgtgaactccacgttcttattgtctccatcctcttctcataatcggcttcttgtccagcctattgtaactgagctgtcaattaatctattccctgtgccttcagatccagaatcatttgcgcgcatgctccaatctcaagttcttgatgcagttcttcctgtttggaatcatacaatgtttcctgtgtgcaacccagcttttgttacctccctggtgtcaattatgaacaatatatgctctgttgttggagatatgaagcaaagccgcagtagtgttggagttgccaatcagcgtgttactggcccccctcttgatgaatctgctattgctacaattgttgaaatgggattttcaagggctagggcagaagaatctcttagaagtgtgagaactaacagcgtggagatggcaacagattggttattcaaccatccagaagattctgtccaggaagatgtgcagcttgcacaagcgttagctttgtcacttggaagctccattgaaacacccaaggaggatggaagcaataagaatgatacagtcattgctgaagaaaaaggtgtatttgtgcttcctttggatgacatccttactgtatcgaccaagcttttccagtctagtgattccaccttggctttcccattgactgaccttctagcgacactgtgcaaccggaataagagcgaatactgcaagcgagtagtattgtatctttttgagcagttaagacatttttcgtcagatgccacggatatgggtgctttgtattctgttgctcatgtgctggctttgcttctgagtgaagacagtggcatacgtgaaactagtgctgaaaatggtgtcatctcccaagttcttaacatattaggaagtcttaaatcaaggacagaccagacagatcatacttggaattctatcagtgctctgttgcttatattgtataacatgctacaatttaatccaaaactcagtatggaaacaatggatggtatatccaagtcaatttctgatgcatccagtgctgacagcgaggaaaatccattaccaactgctgaacatagaactgaaattattgattcagcagatgatgcaagtgcaaatgtttttaaaaagattttagggaaatctactggctatttgaatgatcaagagagccaaaaggcactggttttctgctgtgaattcattaagctatgtgtgcctgcaacagttatgcatgctgtgcttcagctcagtgctcgcttgacaaaaacacacgcgcttgctgctctattctttgaaagtggtgggttagcatctctcttaaatctcccaggcacttgcatctttcctggctttgagaccttagcatctgctattgtgcggcacctcattgaggatccccagaccttgcagagtgccatggaattggagatacgacagtcattaagtaaccatggcagtcgtactccaagctcatttcttacaaatatggcaccactgatatctagagatcctgtgatcttcatgaaggctgcaacttcagtctgccaattggattattcaggagggagattgaatgtagtcttgttgaaggacaaggagaaagacagagagaaacagaatgttcctgtaacagaaagtggtgtgccatgtaatgagcctgttcgggtgactgctgaggttaagacggttgatacaccaaacagatgttcacggaaccacaaaaaggttcctgctagtcttcctcaagtgattgatcagcttcttgagatcatcatgagctatccatctgcaagcaaagaacatgggtttgatggttattccctgttgactccaatggatgttgatgaaccaaatacaaagggcaaatctaaagttggtgatggccaagaactggatggtgatgctttctctgagaggtctgccttgctatcaaagtttgcatttgtccttaagttgatgagtgaaatactccttatgtatgtgcatgcagtagggataattctgagacgggatacagagatatcagtgtcacgaagttgcgctcaaggtgctggacacagtggtttactgcatcatatattctatctgctacttcctctaccttcagtcaaaattgctgatacctcagatgattggattggtaatttgtctgagagagcttcctggttcttggtagctttatgctgcagatctgctgaaggtcgtagaagggttgtttctgaaattgtaaaggcacttaaccaattcattggttcagcaagcaacacctccagaggatctttaatacctgacagaaaagttttggctttctctgagcttgtgaattccatattgtcaaggaatagtcagagcaatttgcctgttcttggctgctcacctgatattgcaaaacctatggtagatggtggaatggtgcaatctctttctgttttgctgaaagtaattgatcttgaccacccagatgctgtaagggttgtcaacctgatattgaaggctttggatagcctcactaggactgcttacaccaccgatcaagtcctcaattcagatcgatttaccaagaacagattaccagggtcacatgaacaaacacatgaagctgatgacattgtaatccctgaacaaactacatacgattcacatcatcatactaatgacatcgaatctgcaagtcagcaagctcaagaactgtctcatgttggtggaaataataacgaaaaccttgaccaacctgctgaacaagaaatgggagttgatctagcagacaatagtacttctaatggcaatcctccaacaagagctgtgcagttcatgcgggaagaacctattgaaggtaatgtaatggctcctagtactgatattggtttggctttctcaatgcaacatcaagttgatggaatgggtgtggaagacgaggatcttggggaggaaagtgaggacgaagaagatgaggaaatagcagctgagggagctggtttgatgtccatagctgacacagatatcgaggaccaggagaacaatgcaattggtgatgattacaatgatgaccttatggatgaagaagatgacgactttcttgagaaccatgttatagaagtaagatggagggagagcttaactcgaatggattatgatcatcatctgagattttccaggggtcgtgcagactccagtggttttattgatatatcttctgagtcatttcatggtgtggggacagttgattcatttaatctgcatcgttcgtttggtcttgaacggcggcgccaaatcggaagtaggtcgcttcttgatcgaccaaggaccgatgtgaatgcctttcttcatccactgcttgtcaggccagcacagtctagggagggaactaattcagcgtggccctctggaggaacttcctcaagagattttcacatgctgtcttttgacatcccctcgtacatgttagatgctggcttttcaccagaaactgctcccccagtgtttggtgaacgtgttgtcagtactgctccaccacctttgatagatttctcacttggtatggattcccttagaattaggcggggccctggagataatttgtggaccgatgatggtcaaccacaggcaggtaatcatgcagctgctattgcccaggcagtggaggatcattttgtgtcacagttaactgtggctaataattcaaatagtgctcctcaggtgcggcctgaacagactggcaacggtgcgaatgcgcactcagagttaccagatacaggaaatgctgaacctgttacaaccgatccactttctcaacctgttggtcggcatcagctagtttgtactgttaaccaaggacctgtccctgctaatgatgtcctctgtcctacagatgtgcacgtaaatcagcaccttgttgattccatttatgatagccgcgttgtagaaccggtgcagcaaacagcagccggtgatcctaacactatacctcagagtgatgaaatgatgtgtattgctggtacacagcttggtggtcatcctgaaagagattccttgtctggtaatggaagttatggtaatattatgcaaaatgagattgaagcacctcaacaagttcacttgggtaatgatcctagggaacccccatctgatctggagtcaagttgccatgcacttgtcacttctgcaagtgctgctcctgagctgagtgatgctcatgtagattcttcagcagtcaatgctgatgttgacatgaacatcgttgatattgctgaaaatgaagttgggaactcagctcctgcttctgatggcaatgatttgtcttctaggagatatgaagatgctcttcaagagcctcagacagtgcaaactaatgctattaatgaggcctccagcgctaatgaaattgatcccacatttcttgaagcattgcctgaggatcttcgggcagaagtccttgcttctcagcagaaccgttctgccccagctgcttcctatactcccccagctgcagaagaaatagatcctgagtttttggctgctcttccaccagacatacaggctgaggttctagcccagcagcgagcacagaggattgcccactctcaaccagctggacagccagtagatatggataatgcttcaattatagcaactttccctcctgatttacgtgaagaggtgcttttgacctcatcagaagctgttctgtctgcccttccttcagctttacttgctgaagctcaaatgctacgggacagagagttgagtcgctatcgtgctagagggagcctttttggtggaagctacaggcttggagggaggaggctgccaactgataatcagacagttatagacagagctgttggtgttactgtgggtagaagggttatttctactacatgcagttcaaagggtaaagatgtggaggggaccccacttctagactcagaagctcttcgggcacttattcgccttctgcagcttgctccaccactcagcagaggccttcttcaaaggcttatgtccaatttatgtgcacatagtgtcacacgtgtcaccttggttggccatctgctcaacatgattaaacctgaatatgaggggcttagcgtatctgattgcatggctacatatagattacatggatgtcattggaacattgtttatgcacaatcttgctctgcaaatggtgtaccaccacttgtaacacgccgacttcttgaaatattgacatatcttgcttcagctagtccttctgttgtggatcttttgatctatttcaatccttcagctagtccaaactgtttgacattacagcacaataaagagacatctcaagaaagttcaatgcagaatatgatgccaccatattcaaaggcttatacacctattatattgcttcttaagcttctaaataaacccttatttctgcggagtcgagtataccttgagaaggtgttgtatttgcttgaagtagttattaacaatgctgcatcccaagttgattgtccacctcactctgtacagataactaacaattcagatattgaattcgttgatgggacaccatatcaaacacaggtggaaccatctactttggaacaaggtcatatcccggataataaccaaagtagagatgttgaggtcccaccatcttgtgctaaactggatgttaatgtgcatgcaatccttacccaacttcctgatgctgaattgcataatctgtgcaatattcttgcacttgagggtcttccagataaagtgtactcacttgcggcagaggtggtgaaaaaattggctagtgttgcagcatcgcatcggaaattcttttccattgagttagctggtgttgctcagagtttaagttcttctgccgttgaggagcttgtaaccctgaagaacactcaaatgcttgggctcagtacttgctctatggctggagctgcgattttgcggatactgcaagtcctatctacactaacttcgtgtgtgatggatagtagacatgagcaagatttaggacaggaagagcagtcttttttgtgggatctgaatgctggtcttcaacctttgtggcaagagttaagtgattgtataagtgccacagaggcaaaacttgtacacaattcatcattcgcttcccatgccccatcggtggatgctttagcagttagtgcttcatcatctgtttcttcaccgcttcctccaggcactcagcgcttgttgccgttcatagaatcattctttgtcctatgtgagaagcttcaaacaaatcaaccagttgcacaatcagattacactgttattgcccctgaagtaaaagaatctgctggaagttcatcttcaccttcactgaagactggtggaacttgcaatgttacttttataaggattgctgaaaagcatcgacggctgctcaacgttttcattagacaaaacccaagcatactggagaagtcactttctatgatgttgaaagtgccaaggctgatagattttgacaacaaacgtgcttactttcggtcacgtatcagacagcagcatgatcagcaccttccagctcctctacacattagtgttcgcagggcttatgttttggatgactcatataatcagttgagattacgtcgtacccaggatctcaaaggtcgtttgactgtgcaatttcaaggggaagagggcatagatgcaggaggactaactagggagtggtatcaactgctctctagagttatttttgacaaaggaactcttcttttcactacagttggaaacaatgcgactttccagcctaatccaaactcagattttcaaacggagcacctttcttacttcaagtttgttggtcgagtggttgctaaagcgttatttgatggccaattgttggacgtccacttcacccgttcattttacaaacatatcttaggtgctaaagtaacatatcatgatatagaggctattgatcctgattactacagaaatttgaagtggatgctggagaatgatgtaagtgaccttccctatttaacatttagcatggatcctgatgaggaaaaacatattctctatgagaagaccgaggttaccgattatgagctaaaaccgggtggaagaaacatcagggttactgaggaaacaaaacaagaatatgttgaccttgtagctgaacatatactgaccacagcaattcgtcctcaaatcaatggtttccttgaaggcttcacagagttagttccaagggatctaatatcgctattcaatgataaagaacttgaactgctgatcagtggtcttcctgaaattgacttggatgatctgaaggccaacacggaatatataggatattcagctgcatctcctgttatccagtggttctgggaagttgttagagcattcagcaaggaggacatggcgagactactacagttcgttaccggaacatctaaggtaccattggagggtttcaaagcgctacaaggtatctctggcccccagagatttcagatttacaaggcgtatggatctcctggtcgacttccatctgctcatacctgctttaaccagttggatttaccggaatatacctcaaaggagcaattagaagaacgactgcttcttgccattcatgaagctagtgaaggttttggctttggttgattggttcctcgggaggttgtaaagcgtgcactgggtcattggttttctgcttgacatgtacagattttgaaggcaattgagatggtcagtgctatgcataacatagatcgatccattggtctttttaggagtgctcatgctgcagtagggatctaatttattattccggatagtcgatgagtatgtcgatcgggttgggtacagtagtagagctctgcgacaagagcgctgatacaactagcttccttttgccttctaattaaaaggttgaatgtaaattcgtttaatgctgataccagttctgatgatttttgtactggttcctccgattctggaggccagtgcaatttctgcaaataaataagccttctggtgaagcaatggttcttatcggtgcgcgttctcataaagctaaagtgttcagcattttctctttattatcttgggcggaagaggttacggttcgttatgtttgaatcacattatgaattcgtatcctttatttggtattttttttgtcgagaggaactctatttgttgtttattcggcgcttttcttcgaagatgggacatgagatgaaagtaaattggatgcataataaagggtccaagtgagaaatggtaaaaaa

SEQ ID NO: 21375 - DNA, 11991 bp, Zea Mays
acgacacgcgcatctccctacctcgatacgattcttcgtcttctcttccccgcgatcgcgccagcgcccccgaaaaaccctaactacctggagcctcgacggcacctgccgcaggcgacggcgagcgaccccaggcggtggtagacggcgcagcgggttgccccttgtggaggcggacggcacggcgcaggtccttgccttcccggctatgcgaattgcggtatgaagctcaagcggcgacgcgcggtagaagtgcctccaagtataaaatctttcatcaacagtgttaccactgttcctcttgaggatgtagaattgccgctgaaggattttgcatgggaatttgacaagggggattttcatcactggttggaccttttcaatcattttgattctttctttgagagttatatcaaatcaaggaaagatttgcatcttgaagataattttcttgatgtggatcccccatttcctcgagaagcactacttcaaattctccgtgtatcaaaacttatattggaaaattgtacaaatagacacttctctagtttttttgagcagcatctgtctgcccttctagcatcaacagatgcggatattgttgaagcaagcttgcagacattaatggcatttgtagacaagtcagttgggaaaagctcaatacgcagtgcatctctcgcttcaaagttatttgccttatctcaaggctggggtggaaaagaaggtggtcttggattagtagcatgttctctacccagtgtatctgatccagtttccactgaggttggatccacactccattttgagttctatcgtgctgctgataaatcagagaaatcccagtgtctagagaaagagaacaagttggaagtaattcatttatcgaatgtcaattcgtgcaaggaggcagatcttgaaatattggacaggttggtcaaggattacagtgtgccacaagctttaaggtttcttcttcttacaagactgagatttgcaagggcttttgactctttaacatgtcgacaccagtatatctgtatccgcttgtatgcttttattgttcttgtccaagcaggccatgatctggaagttgtatcaacatttttgaacaatgaaccagaattcattgatgagctgttatcactacttagctatgaggatgagatacccgaaaagattcggatactgggagtcctttcattagtcgcactgtgccaagatcgacctcaccagcctactgtattgtcctcggtaacttctggtggtcatcggggtatccttcctattctcatgcagaatacagtggattctatcatcaatggttctatgaaatggtccataatatttgctgaagcacttctttcgcttgtatctatgctggtatcatcaacaccaggttctctagctctacaagaagcaggttttataccaactattttgcctcttctcaaagacacaaacacgcaacatttacatctagttagtaaggcagtgcatgttattgagagcttcctggattatcacaatccttcttcagcagtgttcagagatctaggtggactagatgacactattgctcgtcttaagctagaagtatctcaagttgaggttgattcaaaactaattgaccattctaccaatgaaggaaacgaggttgaaagttatccacctgtgcaagatatacaaccttcatgttctgaatccttgattttgtatcataggaagaacttaataaaagttttattacgtacaatatctctggcaacatatgtgcctggtagttctgctcgtgttgatggttcagaagagaatgtgttacctccatgtttatgtgcgatttttaagagaggcaaggacttcggtggtggtgttttctcacttgctgcaaatgttatgagtgatctcatacataaagatccaacatgctatactgttcttgattcagctggtttgccacaagcatttcttgatgccataatgtgtggtggactttacaactccgatgcagtctcatgtataccacagtgtttggatgcattgtgcctgaacaataatggtcttcaattggtaaaggaccggaatgctttaagatgttttgtgaaaatctttacgtctagatcatatatgaaagctcttagtggtgacacagcgggagctttatcaagtggacttgatgaattaatgcgtcatgcaccatcattacgatcctctggagttagcatgtttattgaaatcttgaacactatttttaaagtgtggtgtggtgtagactctatcccctataaggaatctgataattactctgcagttattcccatggatactgatgtggtggttgctacctcacagagtgagggtgtacctcctgaggtaggatgctcaggcgaaacagttgatgctcctttagatgctgtaacatcatcatccattgagttatttcttcctgagtgcatatgcaatgttgctcgcctgcttgaaactgttctgcaaaatgctgatatatgtaggctatttattgagaaaaaaggcatagaagctgttcttcaactgtttaagttgccatcaatacctgtatctgtctcaattggtcagagtatttctgttgcattcaaaaacttctcacctcagcattctgtttctcttgcacgagcagtgtgctcattctttagagaccaccttaaaataaccaatgaactgttgggttcgatctctggaactatgctggttggtagtgaacctgcaaagcaatcagctcttctgaagccactttctacccttgaagggcttttgtctattgccaattttctcctgaagggaactaccattatggtctcagaactggcttttgctgatgccgagatattgaaggaattggggaaggtttatattgaagtcacatggcagatatctttactcagtgattctaaggtggatacgcaagatgcagatcaagatgatttggctgaggaagcttcaatttctgaaagggatagtgatgatgacacaaatacagcaccactttcaagatatatgaatcctgtttcagcaagggcttctatatcaccgtggagcatggagcaagattttgtatcaactgtgcgatctgtttcccacatgcaccaccatggtcgacactcattatcaaggataagtgggcgcctaaatggagtgttgaatgcaacaagtactgatttggatggtccttgttttccagcagagacatcaaggcgtcatgatgctctaaagagaatccctgatgatgttgtttctgaacttctgaagaaattttgttgtaccatgcgttccttcctttctacccttgtcaaaggattaccggctcatcgtcggcctgactctaaccttaacccaaattcgagaagtcttgtgactgcactagctcaatttttccttagtgctcttggtttctctgggcattctactgctggttttgagatgtctttatctgtgaaatgccgttaccttggaaaggttgtggaagacatggctgtgcttacatttgacagtagacgtcgcttatgcaattctgcactcgttaatagcttctatgttaatggaacattcaaggatgttctaacgacctttgaagcaaccagtcagctactgtggacacttcctttctctgtccttgctgctgccacagatcaaggttcctctattaatgagaaggtgtctcacaattcctggctgctggatacgttacagagttactgtaaatttctggaatattatgtgaactccacgttcttattgtctccatcctcttctcataatcggcttcttgtccagcctattgtaactgagctgtcaattaatctattccctgtgccttcagatccagaatcatttgcgcgcatgctccaatctcaagttcttgatgcagttcttcctgtttggaatcatacaatgtttcctgtgtgcaacccagcttttgttacctccctggtgtcaattatgaacaatatatgctctgttgttggagatatgaagcaaagccgcagtagtgttggagttgccaatcagcgtgttactggcccccctcttgatgaatctgctattgctacaattgttgaaatgggattttcaagggctagggcagaagaatctcttagaagtgtgagaactaacagcgtggagatggcaacagattggttattcaaccatccagaagattctgtccaggaagatgtgcagcttgcacaagcgttagctttgtcacttggaagctccattgaaacacccaaggaggatggaagcaataagaatgatacagtcattgctgaagaaaaaggtgtatttgtgcttcctttggatgacatccttactgtatcgaccaagcttttccagtctagtgattccaccttggctttcccattgactgaccttctagcgacactgtgcaaccggaataagagcgaatactgcaagcgagtagtattgtatctttttgagcagttaagacatttttcgtcagatgccacggatatgggtgctttgtattctgttgctcatgtgctggctttgcttctgagtgaagacagtggcatacgtgaaactagtgctgaaaatggtgtcatctcccaagttcttaacatattaggaagtcttaaatcaaggacagaccagacagatcatacttggaattctatcagtgctctgttgcttatattgtataacatgctacaatttaatccaaaactcagtatggaaacaatggatggtatatccaagtcaatttctgatgcatccagtgctgacagcgaggaaaatccattaccaactgctgaacatagaactgaaattattgattcagcagatgatgcaagtgcaaatgtttttaaaaagattttagggaaatctactggctatttgaatgatcaagagagccaaaaggcactggttttctgctgtgaattcattaagctatgtgtgcctgcaacagttatgcatgctgtgcttcagctcagtgctcgcttgacaaaaacacacgcgcttgctgctctattctttgaaagtggtgggttagcatctctcttaaatctcccaggcacttgcatctttcctggctttgagaccttagcatctgctattgtgcggcacctcattgaggatccccagaccttgcagagtgccatggaattggagatacgacagtcattaagtaaccatggcagtcgtactccaagctcatttcttacaaatatggcaccactgatatctagagatcctgtgatcttcatgaaggctgcaacttcagtctgccaattggattattcaggagggagattgaatgtagtcttgttgaaggacaaggagaaagacagagagaaacagaatgttcctgtaacagaaagtggtgtgccatgtaatgagcctgttcgggtgactgctgaggttaagacggttgatacaccaaacagatgttcacggaaccacaaaaaggttcctgctagtcttcctcaagtgattgatcagcttcttgagatcatcatgagctatccatctgcaagcaaagaacatgggtttgatggttattccctgttgactccaatggatgttgatgaaccaaatacaaagggcaaatctaaagttggtgatggccaagaactggatggtgatgctttctctgagaggtctgccttgctatcaaagtttgcatttgtccttaagttgatgagtgaaatactccttatgtatgtgcatgcagtagggataattctgagacgggatacagagatatcagtgtcacgaagttgcgctcaaggtgctggacacagtggtttactgcatcatatattctatctgctacttcctctaccttcagtcaaaattgctgatacctcagatgattggattggtaatttgtctgagagagcttcctggttcttggtagctttatgctgcagatctgctgaaggtcgtagaagggttgtttctgaaattgtaaaggcacttaaccaattcattggttcagcaagcaacacctccagaggatctttaatacctgacagaaaagttttggctttctctgagcttgtgaattccatattgtcaaggaatagtcagagcaatttgcctgttcttggctgctcacctgatattgcaaaacctatggtagatggtggaatggtgcaatctctttctgttttgctgaaagtaattgatcttgaccacccagatgctgtaagggttgtcaacctgatattgaaggctttggatagcctcactaggactgcttacaccaccgatcaagtcctcaattcagatcgatttaccaagaacagattaccagggtcacatgaacaaacacatgaagctgatgacattgtaatccctgaacaaactacatacgattcacatcatcatactaatgacatcgaatctgcaagtcagcaagctcaagaactgtctcatgttggtggaaataataacgaaaaccttgaccaacctgctgaacaagaaatgggagttgatctagcagacaatagtacttctaatggcaatcctccaacaagagctgtgcagttcatgcgggaagaacctattgaaggtaatgtaatggctcctagtactgatattggtttggctttctcaatgcaacatcaagttgatggaatgggtgtggaagacgaggatcttggggaggaaagtgaggacgaagaagatgaggaaatagcagctgagggagctggtttgatgtccatagctgacacagatatcgaggaccaggagaacaatgcaattggtgatgattacaatgatgaccttatggatgaagaagatgacgactttcttgagaaccatgttatagaagtaagatggagggagagcttaactcgaatggattatgatcatcatctgagattttccaggggtcgtgcagactccagtggttttattgatatatcttctgagtcatttcatggtgtggggacagttgattcatttaatctgcatcgttcgtttggtcttgaacggcggcgccaaatcggaagtaggtcgcttcttgatcgaccaaggaccgatgtgaatgcctttcttcatccactgcttgtcaggccagcacagtctagggagggaactaattcagcgtggccctctggaggaacttcctcaagagattttcacatgctgtcttttgacatcccctcgtacatgttagatgctggcttttcaccagaaactgctcccccagtgtttggtgaacgtgttgtcagtactgctccaccacctttgatagatttctcacttggtatggattcccttagaattaggcggggccctggagataatttgtggaccgatgatggtcaaccacaggcaggtaatcatgcagctgctattgcccaggcagtggaggatcattttgtgtcacagttaactgtggctaataattcaaatagtgctcctcaggtgcggcctgaacagactggcaacggtgcgaatgcgcactcagagttaccagatacaggaaatgctgaacctgttacaaccgatccactttctcaacctgttggtcggcatcagctagtttgtactgttaaccaaggacctgtccctgctaatgatgtcctctgtcctacagatgtgcacgtaaatcagcaccttgttgattccatttatgatagccgcgttgtagaaccggtgcagcaaacagcagccggtgatcctaacactatacctcagagtgatgaaatgatgtgtattgctggtacacagcttggtggtcatcctgaaagagattccttgtctggtaatggaagttatggtaatattatgcaaaatgagattgaagcacctcaacaagttcacttgggtaatgatcctagggaacccccatctgatctggagtcaagttgccatgcacttgtcacttctgcaagtgctgctcctgagctgagtgatgctcatgtagattcttcagcagtcaatgctgatgttgacatgaacatcgttgatattgctgaaaatgaagttgggaactcagctcctgcttctgatggcaatgatttgtcttctaggagatatgaagatgctcttcaagagcctcagacagtgcaaactaatgctattaatgaggcctccagcgctaatgaaattgatcccacatttcttgaagcattgcctgaggatcttcgggcagaagtccttgcttctcagcagaaccgttctgccccagctgcttcctatactcccccagctgcagaagaaatagatcctgagtttttggctgctcttccaccagacatacaggctgaggttctagcccagcagcgagcacagaggattgcccactctcaaccagctggacagccagtagatatggataatgcttcaattatagcaactttccctcctgatttacgtgaagaggtgcttttgacctcatcagaagctgttctgtctgcccttccttcagctttacttgctgaagctcaaatgctacgggacagagagttgagtcgctatcgtgctagagggagcctttttggtggaagctacaggcttggagggaggaggctgccaactgataatcagacagttatagacagagctgttggtgttactgtgggtagaagggttatttctactacatgcagttcaaagggtaaagatgtggaggggaccccacttctagactcagaagctcttcgggcacttattcgccttctgcagcttgctccaccactcagcagaggccttcttcaaaggcttatgtccaatttatgtgcacatagtgtcacacgtgtcaccttggttggccatctgctcaacatgattaaacctgaatatgaggggcttagcgtatctgattgcatggctacatatagattacatggatgtcattggaacattgtttatgcacaatcttgctctgcaaatggtgtaccaccacttgtaacacgccgacttcttgaaatattgacatatcttgcttcagctagtccttctgttgtggatcttttgatctatttcaatccttcagctagtccaaactgtttgacattacagcacaataaagagacatctcaagaaagttcaatgcagaatatgatgccaccatattcaaaggcttatacacctattatattgcttcttaagcttctaaataaacccttatttctgcggagtcgagtataccttgagaaggtgttgtatttgcttgaagtagttattaacaatgctgcatcccaagttgattgtccacctcactctgtacagataactaacaattcagatattgaattcgttgatgggacaccatatcaaacacaggtggaaccatctactttggaacaaggtcatatcccggataataaccaaagtagagatgttgaggtcccaccatcttgtgctaaactggatgttaatgtgcatgcaatccttacccaacttcctgatgctgaattgcataatctgtgcaatattcttgcacttgagggataaagtgtactcacttgcggcagaggtggtgaaaaaattggctagtgttgcagcatcgcatcggaaattcttttccattgagttagctggtgttgctcagagtttaagttcttctgccgttgaggagcttgtaaccctgaagaacactcaaatgcttgggctcagtacttgctctatggctggagctgcgattttgcggatactgcaagtcctatctacactaacttcgtgtgtgatggatagtagacatgagcaagatttaggacaggaagagcagtcttttttgtgggatctgaatgctggtcttcaacctttgtggcaagagttaagtgattgtataagtgccacagaggcaaaacttgtacacaattcatcattcgcttcccatgccccatcggtggatgctttagcagttagtgcttcatcatctgtttcttcaccgcttcctccaggcactcagcgcttgttgccgttcatagaatcattctttgtcctatgtgagaagcttcaaacaaatcaaccagttgcacaatcagattacactgttattgcccctgaagtaaaagaatctgctggaagttcatcttcaccttcactgaagactggtggaacttgcaatgttacttttataaggattgctgaaaagcatcgacggctgctcaacgttttcattagacaaaacccaagcatactggagaagtcactttctatgatgttgaaagtgccaaggctgatagattttgacaacaaacgtgcttactttcggtcacgtatcagacagcagcatgatcagcaccttccagctcctctacacattagtgttcgcagggcttatgttttggatgactcatataatcagttgagattacgtcgtacccaggatctcaaaggtcgtttgactgtgcaatttcaaggggaagagggcatagatgcaggaggactaactagggagtggtatcaactgctctctagagttatttttgacaaaggaactcttcttttcactacagttggaaacaatgcgactttccagcctaatccaaactcagattttcaaacggagcacctttcttacttcaagtttgttggtcgagtggttgctaaagcgttatttgatggccaattgttggacgtccacttcacccgttcattttacaaacatatcttaggtgctaaagtaacatatcatgatatagaggctattgatcctgattactacagaaatttgaagtggatgctggagaatgatgtaagtgaccttccctatttaacatttagcatggatcctgatgaggaaaaacatattctctatgagaagaccgaggttaccgattatgagctaaaaccgggtggaagaaacatcagggttactgaggaaacaaaacaagaatatgttgaccttgtagctgaacatatactgaccacagcaattcgtcctcaaatcaatggtttccttgaaggcttcacagagttagttccaagggatctaatatcgctattcaatgataaagaacttgaactgctgatcagtggtcttcctgaaattgacttggatgatctgaaggccaacacggaatatataggatattcagctgcatctcctgttatccagtggttctgggaagttgttagagcattcagcaaggaggacatggcgagactactacagttcgttaccggaacatctaaggtaccattggagggtttcaaagcgctacaaggtatctctggcccccagagatttcagatttacaaggcgtatggatctcctggtcgacttccatctgctcatacctgctttaaccagttggatttaccggaatatacctcaaaggagcaattagaagaacgactgcttcttgccattcatgaagctagtgaaggttttggctttggttgattggttcctcgggaggttgtaaagcgtgcactgggtcattggttttctgcttgacatgtacagattttgaaggcaattgagatggtcagtgctatgcataacatagatcgatccattggtctttttaggagtgctcatgctgcagtagggatctaatttattattccggatagtcgatgagtatgtcgatcgggttgggtacagtagtagagctctgcgacaagagcgctgatacaactagcttccttttgccttctaattaaaaggttgaatgtaaattcgtttaatgctgataccagttctgatgatttttgtactggttcctccgattctggaggccagtgcaatttctgcaaataaataagccttctggtgaagcaatggttcttatcggtgcgcgttctcataaagctaaagtgttcagcattttctctttattatcttgggcggaagaggttacggttcgttatgtttgaatcacattatgaattcgtatcctttatttggtattttttttgtcgagaggaactctatttgttgtttattcggcgcttttcttcgaagatgggacatgagatgaaagtaaattggatgcataataaagggtccaagtgagaaatggtaaaaaa

SEQ ID NO: 21376 - DNA, 2288 bp, Zea Mays
tttcaatcccgtccataattcattcgccattttttctttggttcctcgcgttcatttcgcccttcccattcctctccactgcgctgccatcgtctcgcgccggccccccgtggggaactagaactgactccctcgatcccagcggcagcggcggaagcgaacggtgaccgcgacctcccctgaggctgcatatactcggatcgggtttcacatctccggttttggattggttggttgcccgcggcgatgggaggagagctgtggtggtatccataggggatcctcggttgcgtccttgtgcgatggcttcgacctccgttcctgagttaaccgcggacaagaaatgcgacaaagccatcgcggatacggcggcaccacttacttctcagggacactccgaagaaccgactgggaaagtcagcacactagtgcctgctttgccggttgtaattgcagcaggcgatggggctgcatccagtggggtgatagaaaacagaaatggcatggacaattctgctgatggttctttgaagcgggatgacagtgaaggtgctgagaagagctcgctgcgggggagcgtcaaggatagctcggtgtcggctaaatgcagtgacagggcgagcagcctgtcgaaagccagtgggagcgccaagatcagcggtcaacctgctgacatgatcgagagtggcaagagtagtctctatcgggccagtggtggaagtgatctgagtgatgagagcacctgcagtagcatatgcagcagtgtcagcaagcctcacaagtcaaacgactcaaagtgggaagcgattcaggttgtccgaaccaaagaaggttctgtaggtctaggtcatttcaggctgctcaagaggctcggttgtggtgatattggcagtgtgtacttatcagaacttagtggcactaaatgctattttgccatgaagatcatggacaaggcgtcattagcaacccgcaaaaagctgcttagagcgcagactgaaagggagatattgcaatgcctggatcatccttttcttccaacattgtacactcactttgagacggataagttctcatgcttggtgatggagttctgccctggaggtgacctacataccctaaggcaaaagcagcctggcaagtatttccctgaacaagctgccaagttttatgtagcagaggtgcttcttgctctggaatacctgcacatgcttggtatcatataccgtgacttaaagccagagaatgttcttgtgagggaagatggacatatcatgctgtcggatttcgatttatccctccgatgtgctgtgagccctactcttctcagatcttctaaccccagtggggataaccaaaagggcaacccagcttactgtgtgcagcctgtgtgcattgagcctgcctgtatgcagccttcttgtgtcacgacaaccacatgcttctctcctcgctttttctcttccaaatccaaggagaaaaaagataaaaaggcaaaggcagacttggcaaatcaggtcagaccacttcctgagcttgttgcagagccgacagatgcaaggtctatgtcttttgttggcacccatgagtacttggcacctgaaattataaagggcgaggggcatggaagtgctgtagactggtggacatttggcatattcttgtatgagcttctcttcggcaagacaccattcaaaggttctgggaatagggcgacattgttcaacgtagttggacaacccttaaggttcccagaatcacctgtagtgagttttgctgcaagggatcttattaggggattgctcatcaaggaacctcagcatcgattagcgtataagcgtggagccacagaaataaaacagcacccgttctttgaaggtgttaattgggcattaatcaggtgtgccactccacctgatatccccaagccagttgagatccctcgttctgtagcttcatcaagccagaaggctacatcagccgctgagaaaggctcagattatcttgaattggagtttttttagtggtcacgcatgatctcccatgtgcaagttgctgacgagaccaacaagacagccgggtttttagacagaagttgtgttattcggtactcaccatatttaagggaacacttctcaacggcctatggctctctgtatcctacttcatgaacgggaataaataagaactaccaaagaggtttttccatagggttcctagcttaagaactcagacctcataaacagaccaggattgccacaagagactcactttattaaaacaaagcattt

SEQ ID NO: 21377 - DNA, 2253 bp, Zea Mays
attcattcgccattttttctttggttcctcgcgttcatttcgcccttcccattcctctccactgcgctgccatcgtctcgcgccggccccccgtggggaactagaactgactccctcgatcccagcggcagcggcggaagcgaacggtgaccgcgacctcccctgaggctgcatatactcggatcgggtttcacatctccggttttggattggttggttgcccgcggcgatgggaggagagctgtggtggtatccataggggatcctcggttgcgtccttgtgcgatggcttcgacctccgttcctgagttaaccgcggacaagaaatgcgacaaagccatcgcggatacggcggcaccacttacttctcagggacactccgaagaaccgactgggaaagtcagcacactagtgcctgctttgccggttgtaattgcagcaggcgatggggctgcatccagtggggtgatagaaaacagaaatggcatggacaattctgctgatggttctttgaagcgggatgacagtgaaggtgctgagaagagctcgctgcgggggagcgtcaaggatagctcggtgtcggctaaatgcagtgacagggcgagcagcctgtcgaaagccagtgggagcgccaagatcagcggtcaacctgctgacatgatcgagagtggcaagagtagtctctatcgggccagtggtggaagtgatctgagtgatgagagcacctgcagtagcatatgcagcagtgtcagcaagcctcacaagtcaaacgactcaaagtgggaagcgattcaggttgtccgaaccaaagaaggttctgtaggtctaggtcatttcaggctgctcaagaggctcggttgtggtgatattggcagtgtgtacttatcagaacttagtggcactaaatgctattttgccatgaagatcatggacaaggcgtcattagcaacccgcaaaaagctgcttagagcgcagactgaaagggagatattgcaatgcctggatcatccttttcttccaacattgtacactcactttgagacggataagttctcatgcttggtgatggagttctgccctggaggtgacctacataccctaaggcaaaagcagcctggcaagtatttccctgaacaagctgccaagttttatgtagcagaggtgcttcttgctctggaatacctgcacatgcttggtatcatataccgtgacttaaagccagagaatgttcttgtgagggaagatggacatatcatgctgtcggatttcgatttatccctccgatgtgctgtgagccctactcttctcagatcttctaaccccagtggggataaccaaaagggcaacccagcttactgtgtgcagcctgtgtgcattgagcctgcctgtatgcagccttcttgtgtcacgacaaccacatgcttctctcctcgctttttctcttccaaatccaaggagaaaaaagataaaaaggcaaaggcagacttggcaaatcaggtcagaccacttcctgagcttgttgcagagccgacagatgcaaggtctatgtcttttgttggcacccatgagtacttggcacctgaaattataaagggcgaggggcatggaagtgctgtagactggtggacatttggcatattcttgtatgagcttctcttcggcaagacaccattcaaaggttctgggaatagggcgacattgttcaacgtagttggacaacccttaaggttcccagaatcacctgtagtgagttttgctgcaagggatcttattaggggattgctcatcaaggaacctcagcatcgattagcgtataagcgtggagccacagaaataaaacagcacccgttctttgaaggtgttaattgggcattaatcaggtgtgccactccacctgatatccccaagccagttgagatccctcgttctgtagcttcatcaagccagaaggctacatcagccgctgagaaaggctcagattatcttgaattggagtttttttagtggtcacgcatgatctcccatgtgcaagttgtaaagctctaccttttccacttagacttcttttttttatgggttttaataactttatatgtagatgcatattgtcgtacgtagtgctgttctcttcagttgatttctcagttcattcctttagatgggatcctcaatctggtggagtctgtaatcctttattggctgccgttcactagattctctcaataacatggaaacattttcgttcaatcggtt

SEQ ID NO: 21378 - DNA, 2117 bp, Zea Mays
attcattcgccattttttctttggttcctcgcgttcatttcgcccttcccattcctctccactgcgctgccatcgtctcgcgccggccccccgtggggaactagaactgactccctcgatcccagcggcagcggcggaagcgaacggtgaccgcgacctcccctgaggctgcatatactcggatcgggtttcacatctccggttttggattggttggttgcccgcggcgatgggaggagagctgtggtggtatccataggggatcctcggttgcgtccttgtgcgatggcttcgacctccgttcctgagttaaccgcggacaagaaatgcgacaaagccatcgcggatacggcggcaccacttacttctcagggacactccgaagaaccgactgggaaagtcagcacactagtgcctgctttgccggttgtaattgcagcaggcgatggggctgcatccagtggggtgatagaaaacagaaatggcatggacaattctgctgatggttctttgaagcgggatgacagtgaaggtgctgagaagagctcgctgcgggggagcgtcaaggatagctcggtgtcggctaaatgcagtgacagggcgagcagcctgtcgaaagccagtgggagcgccaagatcagcggtcaacctgctgacatgatcgagagtggcaagagtagtctctatcgggccagtggtggaagtgatctgagtgatgagagcacctgcagtagcatatgcagcagtgtcagcaagcctcacaagtcaaacgactcaaagtgggaagcgattcaggttgtccgaaccaaagaaggttctgtaggtctaggtcatttcaggctgctcaagaggctcggttgtggtgatattggcagtgtgtacttatcagaacttagtggcactaaatgctattttgccatgaagatcatggacaaggcgtcattagcaacccgcaaaaagctgcttagagcgcagactgaaagggagatattgcaatgcctggatcatccttttcttccaacattgtacactcactttgagacggataagttctcatgcttggtgatggagttctgccctggaggtgacctacataccctaaggcaaaagcagcctggcaagtatttccctgaacaagctgccaagttttatgtagcagaggtgcttcttgctctggaatacctgcacatgcttggtatcatataccgtgacttaaagccagagaatgttcttgtgagggaagatggacatatcatgctgtcggatttcgatttatccctccgatgtgctgtgagccctactcttctcagatcttctaaccccagtggggataaccaaaagggcaacccagcttactgtgtgcagcctgtgtgcattgagcctgcctgtatgcagccttcttgtgtcacgacaaccacatgcttctctcctcgctttttctcttccaaatccaaggagaaaaaagataaaaaggcaaaggcagacttggcaaatcaggtcagaccacttcctgagcttgttgcagagccgacagatgcaaggtctatgtcttttgttggcacccatgagtacttggcacctgaaattataaagggcgaggggcatggaagtgctgtagactggtggacatttggcatattcttgtatgagcttctcttcggcaagacaccattcaaaggttctgggaatagggcgacattgttcaacgtagttggacaacccttaaggttcccagaatcacctgtagtgagttttgctgcaagggatcttattaggggattgctcatcaaggaacctcagcatcgattagcgtataagcgtggagccacagaaataaaacagcacccgttctttgaaggtgttaattgggcattaatcaggctgacgagaccaacaagacagccgggtttttagacagaagttgtgttattcggtactcaccatatttaagggaacacttctcaacggcctatggctctctgtatcctacttcatgaacgggaataaataagaactaccaaagaggtttttccatagggttcctagcttaagaactcagacctcataaacagaccaggattgccacaagagactcactttattaaaacaaagcattt

SEQ ID NO: 21379 - DNA, 1517 bp, Zea Mays
ctaagttattgggcccacatgcacctgtccttgtcttaaagacctcagacggctatgcatgtgcaccaaacaacttaacaggatttgtccgagtgccccgaggaccccggataaacgacttaccgtcaagatcgtaggattaagtaaacacaaatcacacatcaacatttgcagcggaaataaattctttattgtaaaatgattacatgttacaataagtttacattatacaattatcggagtgattacaaaagaaagtgatttaaaagaattacactttgaaatgtataaatatttataagttttaaaatatatgctagcttaagtgacaatcctcaaaagaagctaaagatgggatacacttatataagaaggccgagcccaccgacacttaacatcaatcacaatcgaagcgactcgtaacttgcaccaataatgggaataaaaccctgagtacgcaattactcaacaagacttacctgactaaagaaaagactctcaagggtatgctggtttgtcgagaatcaaggtaaagcttatcaaatttcaaagactcatttttccagaaaagctttactagctagtagtggatccttatgccaaaattttacctcacaagttaagttcttttcctgaatctagatttgcctaatctagagcattcacttgtcctacactagcctcattttatcaactttaatttcactttttatctacgctgaaggtcgaagatccagtcttcatatccgagaagttcggcgatccgaatcgattgatacctagctagggatctccaaccacacgacatatgtagcacttaaccattgcatatgtcaactcacccatgggtttctcaagactagaacgggtccccgccaaccgagagctcagtaccccaccatccagcctcttgccaggtggacacacgatactctcaccatctctccactcccattgcgggccaacctttctggtattggtccgaccgaggctaagcttacccatgatgaggcatgtggccagttaaagggtcctagatcagcaggccaacaatcatgcggtccttaagcgacacaaatgggcgacttttcctactcagcgtctggtctagatttattcaaaccatttccccatttttggtacctggcaggggtactctttactgaatgatgaacccattcgggccgaaggggaatcatcaccataagtttgctttgatttctaaaacaaaagcccataacagtgttccacatcattctttttaaaagaaacaacctttagtttttctaagcagggctaagcctcattagttctctttataaaacaggtatcaaggaagataatcaaattccaaggaatggcaatgcatcaagtgtttcatcactccactcctatcacctaatgcaacatataagtgataaaaaatttaaaacagcaaggaggtggcaaatgcaccgggacttgcctgggataacactagattagtgtggttagatgacgaccacttggcgagcatc

SEQ ID NO: 21380 - DNA, 403 bp, Zea Mays
aaacaaggggaggaggggcgccatggcttcttgctaccggaaagaaaatcgtcatccatggaagagggctggaggtggcgtgctacaggaaaataaaataaaaaaatgcagggctagggtgagctcactatgggagaagatggagaggggatggaggagaggcagccatgagaggagcaggggaatggggtcgccgacctaccgcaggaggaggagggtgcggcttgtgttgctgctgcgtgcaagaaatgagaacggcagtggatggagagaaagagacgtgagggagaaggggatttgggaggggcggcggctgaaaattccagagagaaggacgcgtgggaattggccaatgccgatcaatggatttttgccaccaatagtagtgttggcgggtgggtga

SEQ ID NO: 21381 - DNA, 1554 bp, Zea Mays
cttatatgataactttcaaaagtggtggaatgtcacattctaaaaaaatagcttattctattagtaagatttcaattcctcaaaatgaaaggaacaaacgggacctaattgaataccacatacacctattaattcaacagatataggaaactcggtacaaattctaacaattcaacttggatccttgcaaccgaaaaaaaataaaaccctacaacacaaaatcaaacccttcacccctattcttcatttctcctaaccaaaatcaccgagacaaacacttgaacacaagcgtgtactctgtgctccctccgtttctgctacaccccttgtcttctttgttggattacttcggtcagataatttgaggaagaggaggaacagtggtgccaactgtcgacagctgatttggtaaatgggagaccacgtcgaaatcatgccttccatgtgatgcaccatccagcagatctgttcacctcgtatgcacatccctgtcgcctccaggcatgccatgtttgacagggcatgggctaagcaatgggattgtggctacagaaaaaataggtatagtacatgcagttatgtaagaccattgaagacagtttttttttgtcaaattgcatacaatgtggttagctatattctactgtccttattatgacaactatgcaatccactttaaaaggatgtataagcactcactttccacaagaccactattcagttagttgatggcttggataccacatactacttttataaaaaacaattagtaattaaaaacctcatttctaaagcatgaactcagtttgaaatggttttcaggggggaatggtatctaagtccttactcctccacagtatcaaaattttagttactaattaatgtacatttaaatgagaataacatacaaaccttctatgatgttatggaacagagttgatattgagaaatggtcatgtcccaattttactctctggggcacatttctgggattgacaaatccatgcttctgaagtgtgcagtgtttgtcatcacatgtaaaaaggggacagacctgctgtcggaggctcctacatgagtaggataggggaagggataaaccgaggcaagcctcccactgcaaatgcggagatgctgcttctaacacgtaacctggtgtttcaacgagatagctctcaccactcccttctatttctcaacacaagtaaatattaaaaaaattaatcctcacagaaatccatgtacttcaaaatgactttgtgctgcttctacaaatggtcaaggctgagccattatgttacaagcccttcatatcatgataaaaatccatgtcttgcacatgaaagtgcaagtgtattgtgcaggactattgaaagccctaatgtccttcatcttcaccacagataagttgaccaactgcgtcagctagctatgtagttcagaccattttatcctaatcaggttgagaagttataaactatctcactgatgtattggcctttgtgtcctggatggacagatgcactgagagtatcgtaaacagttatctcaatt

SEQ ID NO: 21382 - DNA, 3161 bp, Zea Mays
ccattaaaaaaatcgtctgttccaaacatattgaccattgatctagcccgtccgaaggaaccacttcacactactctccgcggctctgccgtccgttctcctctcgccgccgccggccgcgcctccaccctcgcggcactcgcatggcggcgccggctctccgtatcactgcgcggctgggacttgcacttgacggtgccaccgccgcgagacggcgcgaggcctcggcgcctgtggcggtgccggccgcgccgtggctgaagaaggcggcggtccggtgtcagcgagccgtcggtgccgctgttgccgagaagaaggatgcgccggtatcggttgcgcaggatagaagcggcgacgggggcgcggcgccggagctcaccgtcgtgatgaagttcggcgggtcgtcagtggcctcggccgagcggatgcgggaggtggcagacctcatcctcagcttccccgaggagcacccggtcgtcgtgctctcagcgatgggaaagaccaccaacaaactcctcatggctggggaaaaggcagtgggctgtggtgcgaccaacgtctcggagcttgatgagctctcctttgtaaaggaattgcatcttgggacgcttgatcagcttgggctagatagatcaattgtttgtggtttgttggatgaacttgaacaacttcttaagggaattgctatgatgaaagagctgactcttaggacacgagattatctagtttcatttggtgaatgcatgtctacaagaatatttgctgcacttttaaacaaaattggagtaaaagctcggcagtatgatgcatttgatcttggctttataactaccgatgatttcacaaatgcggatattctggaagcaacttatcctgctgttgcaaggaggctacatgtggaatggattaatgatcctgctatacctatagtcactggctttcttggcaagggatggagatctggtgcaataactaccttgggcaggggtggtagtgacttgacagctacaaccattggcaaagccttgggattaagagaaatccaggtttggaaagatgttgatggtgttttaacatgtgacccaaatatccatcctaaggcaaaacctgtgccatacttgacatttgatgaggcagctgaacttgcctattttggagcgcaggttttgcatccacaatcaatgcggccagctagagaaggcgatgtacctgtgagggttaagaattcttataaccgtcgagcccctggtacccttatcactaaagcaagagatatgagtaagactgttttgactagcattgttttgaaatcaaatattacaatgcttgatatagtcagcacacgcatgcttggccagtacgggtttctagctaaggttttttcgatatttgaagacttgggcatctctgttgattgtgtggctaccagtgaagtcagcatatctttgacactggatccatcgaaactatggagttgtgaattggttcagcacaaaaatgtttgggcatcaatttattcattgttaatttcttgttcatgactatatttcgccaagatttatttttttttcttaatccgcgttaactagataaagatagcactttgcttcaagttttccttgtcttctttttagaaaaaaaactaactgtattattttctcaactgatgttatgtgagcttgacttgaacctatagtagcaccctaggattcacatcctgccattggtgcctcgtagggacagttttttttttcttgaacatagaggagagctgtctatcattatattaaagaacatggttaggaaactttacacacacatttggttacaagatcacccttgaagccaaagataactaaacgaccttgactaacaggactttggttacttgtggtattagactgttatttggctgggtcataatccatattcttgcaggatggattcattttattagcagctctatataaagaaatatttgtcactatattaaagaaaaaggcattatatatgattatgcgcatttctcaattcctcttcaacactttgacctcatttacaaccctagaagcaatacactaatgcacacaacacacgatcatcaggatctggaaggaatcaacaagtgtgaaatattttcctttgtactcaataagagacatgtttctaagaatttaagtcctttgtaatatggaaaattttcgatattgttaaatgacaattgactgaggccagagttggttcattatagcagatgatgatgatgcatcttggctttcgttcaaaaaaaaatgatgcatcttggcaaatttaattttgacctttctatataccaggaacttgatgatgtcattgaagagcttgagaagatagcagttgttcatctactgcagaacaggtcaataatatctttaattggaaatgtgcagaggtcgtctttgattcttgaaaaggctttcaatgttctacgaagaaacggtgtcaatgtccagatgatatcgcaaggggcgtccaaggtgaacatttccttggtggtccatgacagtgaggcaaaacagtgtgttcaagccctccactccgcgttctttgagaatggtttcttgttggaagctgatgagttggatgttctgcatgatggctttacatcgcattccaatggcacaatccacagccattagccgaggatttgatattcatctgtttggctactgtagtgccacttgtgatcaaatcctgatctttggtcgatatctaatgtttttatgaggctacgaaggattcggctttagagctactacccatcagaagtctaggaatttgttcagagccactacttaggattttggttagagattaatgatactgtttggttttctgtacaattgattgaaagtatatacttagttatcttggccaacctatcaaaccacggaggatgcaagcggatttgtccgtaaacctttaaggttagtttggaaacctcatttttgcaagggaaattagttcatttttttttgtgaaaataggaatcccaaaatggagtttctaaactagccataattgttacatgttactacataagccacaaaaaaaaggcctgtttatggggtcaagcccgattgcatttcacggaattgaagtactagcactacgaatttgtt

SEQ ID NO: 21383 - DNA, 3110 bp, Zea Mays
gaccattgatctagcccgtccgaaggaaccacttcacactactctccgcggctctgccgtccgttctcctctcgccgccgccggccgcgcctccaccctcgcggcactcgcatggcggcgccggctctccgtatcactgcgcggctgggacttgcacttgacggtgccaccgccgcgagacggcgcgaggcctcggcgcctgtggcggtgccggccgcgccgtggctgaagaaggcggcggtccggtgtcagcgagccgtcggtgccgctgttgccgagaagaaggatgcgccggtatcggttgcgcaggatagaagcggcgacgggggcgcggcgccggagctcaccgtcgtgatgaagttcggcgggtcgtcagtggcctcggccgagcggatgcgggaggtggcagacctcatcctcagcttccccgaggagcacccggtcgtcgtgctctcagcgatgggaaagaccaccaacaaactcctcatggctggggaaaaggcagtgggctgtggtgcgaccaacgtctcggagcttgatgagctctcctttgtaaaggaattgcatcttgggacgcttgatcagcttgggctagatagatcaattgtttgtggtttgttggatgaacttgaacaacttcttaagggaattgctatgatgaaagagctgactcttaggacacgagattatctagtttcatttggtgaatgcatgtctacaagaatatttgctgcacttttaaacaaaattggagtaaaagctcggcagtatgatgcatttgatcttggctttataactaccgatgatttcacaaatgcggatattctggaagcaacttatcctgctgttgcaaggaggctacatgtggaatggattaatgatcctgctatacctatagtcactggctttcttggcaagggatggagatctggtgcaataactaccttgggcaggggtggtagtgacttgacagctacaaccattggcaaagccttgggattaagagaaatccaggtttggaaagatgttgatggtgttttaacatgtgacccaaatatccatcctaaggcaaaacctgtgccatacttgacatttgatgaggcagctgaacttgcctattttggagcgcaggttttgcatccacaatcaatgcggccagctagagaaggcgatgtacctgtgagggttaagaattcttataaccgtcgagcccctggtacccttatcactaaagcaagagatatgagtaagactgttttgactagcattgttttgaaatcaaatattacaatgcttgatatagtcagcacacgcatgcttggccagtacgggtttctagctaagacttgggcatctctgttgattgtgtggctaccagtgaagtcagcatatctttgacactggatccatcgaaactatggagttgtgaattggttcagcacaaaaatgtttgggcatcaatttattcattgttaatttcttgttcatgactatatttcgccaagatttatttttttttcttaatccgcgttaactagataaagatagcactttgcttcaagttttccttgtcttctttttagaaaaaaaactaactgtattattttctcaactgatgttatgtgagcttgacttgaacctatagtagcaccctaggattcacatcctgccattggtgcctcgtagggacagttttttttttcttgaacatagaggagagctgtctatcattatattaaagaacatggttaggaaactttacacacacatttggttacaagatcacccttgaagccaaagataactaaacgaccttgactaacaggactttggttacttgtggtattagactgttatttggctgggtcataatccatattcttgcaggatggattcattttattagcagctctatataaagaaatatttgtcactatattaaagaaaaaggcattatatatgattatgcgcatttctcaattcctcttcaacactttgacctcatttacaaccctagaagcaatacactaatgcacacaacacacgatcatcaggatctggaaggaatcaacaagtgtgaaatattttcctttgtactcaataagagacatgtttctaagaatttaagtcctttgtaatatggaaaattttcgatattgttaaatgacaattgactgaggccagagttggttcattatagcagatgatgatgatgcatcttggctttcgttcaaaaaaaaatgatgcatcttggcaaatttaattttgacctttctatataccaggaacttgatgatgtcattgaagagcttgagaagatagcagttgttcatctactgcagaacaggtcaataatatctttaattggaaatgtgcagaggtcgtctttgattcttgaaaaggctttcaatgttctacgaagaaacggtgtcaatgtccagatgatatcgcaaggggcgtccaaggtgaacatttccttggtggtccatgacagtgaggcaaaacagtgtgttcaagccctccactccgcgttctttgagaatggtttcttgttggaagctgatgagttggatgttctgcatgatggctttacatcgcattccaatggcacaatccacagccattagccgaggatttgatattcatctgtttggctactgtagtgccacttgtgatcaaatcctgatctttggtcgatatctaatgtttttatgaggctacgaaggattcggctttagagctactacccatcagaagtctaggaatttgttcagagccactacttaggattttggttagagattaatgatactgtttggttttctgtacaattgattgaaagtatatacttagttatcttggccaacctatcaaaccacggaggatgcaagcggatttgtccgtaaacctttaaggttagtttggaaacctcatttttgcaagggaaattagttcatttttttttgtgaaaataggaatcccaaaatggagtttctaaactagccataattgttacatgttactacataagccacaaaaaaaaggcctgtttatggggtcaagcccgattgcatttcacggaattgaagtactagcactacgaatttgtt

SEQ ID NO: 21384 - DNA, 3118 bp, Zea Mays
tgatctagcccgtccgaaggaaccacttcacactactctccgcggctctgccgtccgttctcctctcgccgccgccggccgcgcctccaccctcgcggcactcgcatggcggcgccggctctccgtatcactgcgcggctgggacttgcacttgacggtgccaccgccgcgagacggcgcgaggcctcggcgcctgtggcggtgccggccgcgccgtggctgaagaaggcggcggtccggtgtcagcgagccgtcggtgccgctgttgccgagaagaaggatgcgccggtatcggttgcgcaggatagaagcggcgacgggggcgcggcgccggagctcaccgtcgtgatgaagttcggcgggtcgtcagtggcctcggccgagcggatgcgggaggtggcagacctcatcctcagcttccccgaggagcacccggtcgtcgtgctctcagcgatgggaaagaccaccaacaaactcctcatggctggggaaaaggcagtgggctgtggtgcgaccaacgtctcggagcttgatgagctctcctttgtaaaggaattgcatcttgggacgcttgatcagcttgggctagatagatcaattgtttgtggtttgttggatgaacttgaacaacttcttaagggaattgctatgatgaaagagctgactcttaggacacgagattatctagtttcatttggtgaatgcatgtctacaagaatatttgctgcacttttaaacaaaattggagtaaaagctcggcagtatgatgcatttgatcttggctttataactaccgatgatttcacaaatgcggatattctggaagcaacttatcctgctgttgcaaggaggctacatgtggaatggattaatgatcctgctatacctatagtcactggctttcttggcaagggatggagatctggtgcaataactaccttgggcaggggtggtagtgacttgacagctacaaccattggcaaagccttgggattaagagaaatccaggtttggaaagatgttgatggtgttttaacatgtgacccaaatatccatcctaaggcaaaacctgtgccatacttgacatttgatgaggcagctgaacttgcctattttggagcgcaggttttgcatccacaatcaatgcggccagctagagaaggcgatgtacctgtgagggttaagaattcttataaccgtcgagcccctggtacccttatcactaaagcaagagatatgaactgttttgactagcattgttttgaaatcaaatattacaatgcttgatatagtcagcacacgcatgcttggccagtacgggtttctagctaaggttttttcgatatttgaagacttgggcatctctgttgattgtgtggctaccagtgaagtcagcatatctttgacactggatccatcgaaactatggagttgtgaattggttcagcacaaaaatgtttgggcatcaatttattcattgttaatttcttgttcatgactatatttcgccaagatttatttttttttcttaatccgcgttaactagataaagatagcactttgcttcaagttttccttgtcttctttttagaaaaaaaactaactgtattattttctcaactgatgttatgtgagcttgacttgaacctatagtagcaccctaggattcacatcctgccattggtgcctcgtagggacagttttttttttcttgaacatagaggagagctgtctatcattatattaaagaacatggttaggaaactttacacacacatttggttacaagatcacccttgaagccaaagataactaaacgaccttgactaacaggactttggttacttgtggtattagactgttatttggctgggtcataatccatattcttgcaggatggattcattttattagcagctctatataaagaaatatttgtcactatattaaagaaaaaggcattatatatgattatgcgcatttctcaattcctcttcaacactttgacctcatttacaaccctagaagcaatacactaatgcacacaacacacgatcatcaggatctggaaggaatcaacaagtgtgaaatattttcctttgtactcaataagagacatgtttctaagaatttaagtcctttgtaatatggaaaattttcgatattgttaaatgacaattgactgaggccagagttggttcattatagcagatgatgatgatgcatcttggctttcgttcaaaaaaaaatgatgcatcttggcaaatttaattttgacctttctatataccaggaacttgatgatgtcattgaagagcttgagaagatagcagttgttcatctactgcagaacaggtcaataatatctttaattggaaatgtgcagaggtcgtctttgattcttgaaaaggctttcaatgttctacgaagaaacggtgtcaatgtccagatgatatcgcaaggggcgtccaaggtgaacatttccttggtggtccatgacagtgaggcaaaacagtgtgttcaagccctccactccgcgttctttgagaatggtttcttgttggaagctgatgagttggatgttctgcatgatggctttacatcgcattccaatggcacaatccacagccattagccgaggatttgatattcatctgtttggctactgtagtgccacttgtgatcaaatcctgatctttggtcgatatctaatgtttttatgaggctacgaaggattcggctttagagctactacccatcagaagtctaggaatttgttcagagccactacttaggattttggttagagattaatgatactgtttggttttctgtacaattgattgaaagtatatacttagttatcttggccaacctatcaaaccacggaggatgcaagcggatttgtccgtaaacctttaaggttagtttggaaacctcatttttgcaagggaaattagttcatttttttttgtgaaaataggaatcccaaaatggagtttctaaactagccataattgttacatgttactacataagccacaaaaaaaaggcctgtttatggggtcaagcccgattgcatttcacggaattgaagtactagcactacgaatttgtt

SEQ ID NO: 21385 - DNA, 2344 bp, Zea Mays
tgatctagcccgtccgaaggaaccacttcacactactctccgcggctctgccgtccgttctcctctcgccgccgccggccgcgcctccaccctcgcggcactcgcatggcggcgccggctctccgtatcactgcgcggctgggacttgcacttgacggtgccaccgccgcgagacggcgcgaggcctcggcgcctgtggcggtgccggccgcgccgtggctgaagaaggcggcggtccggtgtcagcgagccgtcggtgccgctgttgccgagaagaaggatgcgccggtatcggttgcgcaggatagaagcggcgacgggggcgcggcgccggagctcaccgtcgtgatgaagttcggcgggtcgtcagtggcctcggccgagcggatgcgggaggtggcagacctcatcctcagcttccccgaggagcacccggtcgtcgtgctctcagcgatgggaaagaccaccaacaaactcctcatggctggggaaaaggcagtgggctgtggtgcgaccaacgtctcggagcttgatgagctctcctttgtaaaggaattgcatcttgggacgcttgatcagcttgggctagatagatcaattgtttgtggtttgttggatgaacttgaacaacttcttaagggaattgctatgatgaaagagctgactcttaggacacgagattatctagtttcatttggtgaatgcatgtctacaagaatatttgctgcacttttaaacaaaattggagtaaaagctcggcagtatgatgcatttgatcttggctttataactaccgatgatttcacaaatgcggatattctggaagcaacttatcctgctgttgcaaggaggctacatgtggaatggattaatgatcctgctatacctatagtcactggctttcttggcaagggatggagatctggtgcaataactaccttgggcaggggtggtagtgacttgacagctacaaccattggcaaagccttgggattaagagaaatccaggtttggaaagatgttgatggtgttttaacatgtgacccaaatatccatcctaaggcaaaacctgtgccatacttgacatttgatgaggcagctgaacttgcctattttggagcgcaggttttgcatccacaatcaatgcggccagctagagaaggcgatgtacctgtgagggttaagaattcttataaccgtcgagcccctggtacccttatcactaaagcaagagatatgagtaagactgttttgactagcattgttttgaaatcaaatattacaatgcttgatatagtcagcacacgcatgcttggccagtacgggtttctagctaaggttttttcgatatttgaagacttgggcatctctgttgattgtgtggctaccagtgaagtcagcatatctttgacactggatccatcgaaactatggagttgtgaattggttcagcacaaaaatgaacttgatgatgtcattgaagagcttgagaagatagcagttgttcatctactgcagaacaggtcaataatatctttaattggaaatgtgcagaggtcgtctttgattcttgaaaagaagcgtaaatgatcatgcaatactgtgtttgcaattgacatccactgctgcacggcaggctttcaatgttctacgaagaaacggtgtcaatgtccagatgatatcgcaaggggcgtccaaggtgaacatttccttggtggtccatgacagtgaggcaaaacagtgtgttcaagccctccactccgcgttctttgagaatggtttcttgttggaagctgatgagttggatgttctgcatgatggctttacatcgcattccaatggcacaatccacagccattagccgaggatttgatattcatctgtttggctactgtagtgccacttgtgatcaaatcctgatctttggtcgatatctaatgtttttatgaggctacgaaggattcggctttagagctactacccatcagaagtctaggaatttgttcagagccactacttaggattttggttagagattaatgatactgtttggttttctgtacaattgattgaaagtatatacttagttatcttggccaacctatcaaaccacggaggatgcaagcggatttgtccgtaaacctttaaggttagtttggaaacctcatttttgcaagggaaattagttcatttttttttgtgaaaataggaatcccaaaatggagtttctaaactagccataattgttacatgttactacataagccacaaaaaaaaggcctgtttatggggtcaagcccgattgcatttcacggaattgaagtactagcactacgaatttgtt

SEQ ID NO: 21386 - DNA, 2646 bp, Zea Mays
gttcatgttcacccgttcacccacaccaaatttctctgaggatatgtctccacatagggtttgttggatgaacttgaacaacttcttaagggaattgctatgatgaaagagctgactcttaggacacgagattatctagtttcatttggtgaatgcatgtctacaagaatatttgctgcacttttaaacaaaattggagtaaaagctcggcagtatgatgcatttgatcttggctttataactaccgatgatttcacaaatgcggatattctggaagcaacttatcctgctgttgcaaggaggctacatgtggaatggattaatgatcctgctatacctatagtcactggctttcttgggatggagatctggtgcaataactaccttgggcaggggtggtagtgacttgacagctacaaccattggcaaagccttgggattaagagaaatccaggtttggaaagatgttgatggtgttttaacatgtgacccaaatatccatcctaaggcaaaacctgtgccatacttgacatttgatgaggcagctgaacttgcctattttggagcgcaggttttgcatccacaatcaatgcggccagctagagaaggcgatgtacctgtgagggttaagaattcttataaccgtcgagcccctggtacccttatcactaaagcaagagatatgagtaagactgttttgactagcattgttttgaaatcaaatattacaatgcttgatatagtcagcacacgcatgcttggccagtacgggtttctagctaaggtacaactattcataggctactttccttgagtttactatttttatttcaatctttggttgtaactttaccaattcaggttttttcgatatttgaagacttgggcatctctgttgattgtgtggctaccagtgaagtcagcatatctttgacactggatccatcgaaactatggagttgtgaattggttcagcacaaaaatgtttgggcatcaatttattcattgttaatttcttgttcatgactatatttcgccaagatttatttttttttcttaatccgcgttaactagataaagatagcactttgcttcaagttttccttgtcttctttttagaaaaaaaactaactgtattattttctcaactgatgttatgtgagcttgacttgaacctatagtagcaccctaggattcacatcctgccattggtgcctcgtagggacagttttttttttcttgaacatagaggagagctgtctatcattatattaaagaacatggttaggaaactttacacacacatttggttacaagatcacccttgaagccaaagataactaaacgaccttgactaacaggactttggttacttgtggtattagactgttatttggctgggtcataatccatattcttgcaggatggattcattttattagcagctctatataaagaaatatttgtcactatattaaagaaaaaggcattatatatgattatgcgcatttctcaattcctcttcaacactttgacctcatttacaaccctagaagcaatacactaatgcacacaacacacgatcatcaggatctggaaggaatcaacaagtgtgaaatattttcctttgtactcaataagagacatgtttctaagaatttaagtcctttgtaatatggaaaattttcgatattgttaaatgacaattgactgaggccagagttggttcattatagcagatgatgatgatgcatcttggctttcgttcaaaaaaaaatgatgcatcttggcaaatttaattttgacctttctatataccaggaacttgatgatgtcattgaagagcttgagaagatagcagttgttcatctactgcagaacaggtcaataatatctttaattggaaatgtgcagaggtcgtctttgattcttgaaaaggctttcaatgttctacgaagaaacggtgtcaatgtccagatgatatcgcaaggggcgtccaaggtgaacatttccttggtggtccatgacagtgaggcaaaacagtgtgttcaagccctccactccgcgttctttgagaatggtttcttgttggaagctgatgagttggatgttctgcatgatggctttacatcgcattccaatggcacaatccacagccattagccgaggatttgatattcatctgtttggctactgtagtgccacttgtgatcaaatcctgatctttggtcgatatctaatgtttttatgaggctacgaaggattcggctttagagctactacccatcagaagtctaggaatttgttcagagccactacttaggattttggttagagattaatgatactgtttggttttctgtacaattgattgaaagtatatacttagttatcttggccaacctatcaaaccacggaggatgcaagcggatttgtccgtaaacctttaaggttagtttggaaacctcatttttgcaagggaaattagttcatttttttttgtgaaaataggaatcccaaaatggagtttctaaactagccataattgttacatgttactacataagccacaaaaaaaaggcctgtttatggggtcaagcccgattgcatttcacggaattgaagtactagcactacgaatttgtt

SEQ ID NO: 21387 - DNA, 2242 bp, Zea Mays
ccaatgttgactgcaagtgcataaagtttgatagttccttatcatttttaatatgagatactgtttggaaagatgttgatggtgttttaacatgtgacccaaatatccatcctaaggcaaaacctgtgccatacttgacatttgatgaggcagctgaacttgcctattttggagcgcaggttttgcatccacaatcaatgcggccagctagagaaggcgatgtacctgtgagggttaagaattcttataaccgtcgagcccctggtacccttatcactaaagcaagagatatgagtaaggtttgttacttggctaaagtctaatcttagacgtgtctacttgttcttgctctctaatccaaatattaacacattctattctagactgttttgactagcattgttttgaaatcaaatattacaatgcttgatatagtcagcacacgcatgcttggccagtacgggtttctagctaagacttgggcatctctgttgattgtgtggctaccagtgaagtcagcatatctttgacactggatccatcgaaactatggagttgtgaattggttcagcacaaaaatgtttgggcatcaatttattcattgttaatttcttgttcatgactatatttcgccaagatttatttttttttcttaatccgcgttaactagataaagatagcactttgcttcaagttttccttgtcttctttttagaaaaaaaactaactgtattattttctcaactgatgttatgtgagcttgacttgaacctatagtagcaccctaggattcacatcctgccattggtgcctcgtagggacagttttttttttcttgaacatagaggagagctgtctatcattatattaaagaacatggttaggaaactttacacacacatttggttacaagatcacccttgaagccaaagataactaaacgaccttgactaacaggactttggttacttgtggtattagactgttatttggctgggtcataatccatattcttgcaggatggattcattttattagcagctctatataaagaaatatttgtcactatattaaagaaaaaggcattatatatgattatgcgcatttctcaattcctcttcaacactttgacctcatttacaaccctagaagcaatacactaatgcacacaacacacgatcatcaggatctggaaggaatcaacaagtgtgaaatattttcctttgtactcaataagagacatgtttctaagaatttaagtcctttgtaatatggaaaattttcgatattgttaaatgacaattgactgaggccagagttggttcattatagcagatgatgatgatgcatcttggctttcgttcaaaaaaaaatgatgcatcttggcaaatttaattttgacctttctatataccaggaacttgatgatgtcattgaagagcttgagaagatagcagttgttcatctactgcagaacaggtcaataatatctttaattggaaatgtgcagaggtcgtctttgattcttgaaaaggctttcaatgttctacgaagaaacggtgtcaatgtccagatgatatcgcaaggggcgtccaaggtgaacatttccttggtggtccatgacagtgaggcaaaacagtgtgttcaagccctccactccgcgttctttgagaatggtttcttgttggaagctgatgagttggatgttctgcatgatggctttacatcgcattccaatggcacaatccacagccattagccgaggatttgatattcatctgtttggctactgtagtgccacttgtgatcaaatcctgatctttggtcgatatctaatgtttttatgaggctacgaaggattcggctttagagctactacccatcagaagtctaggaatttgttcagagccactacttaggattttggttagagattaatgatactgtttggttttctgtacaattgattgaaagtatatacttagttatcttggccaacctatcaaaccacggaggatgcaagcggatttgtccgtaaacctttaaggttagtttggaaacctcatttttgcaagggaaattagttcatttttttttgtgaaaataggaatcccaaaatggagtttctaaactagccataattgttacatgttactacataagccacaaaaaaaaggcctgtttatggggtcaagcccgattgcatttcacggaattgaagtactagcactacgaatttgtt

SEQ ID NO: 21388 - DNA, 2176 bp, Zea Mays
caatgttgactgcaagtgcataaagtttgatagttccttatcatttttaatatgagatactgtttggaaagatgttgatggtgttttaacatgtgacccaaatatccatcctaaggcaaaacctgtgccatacttgacatttgatgaggcagctgaacttgcctattttggagcgcaggttttgcatccacaatcaatgcggccagctagagaaggcgatgtacctgtgagggttaagaattcttataaccgtcgagcccctggtacccttatcactaaagcaagagatatgagtaagactgttttgactagcattgttttgaaatcaaatattacaatgcttgatatagtcagcacacgcatgcttggccagtacgggtttctagctaaggttttttcgatatttgaagacttgggcatctctgttgattgtgtggctaccagtgaagtcagcatatctttgacactggatccatcgaaactatggagttgtgaattggttcagcacaaaaatgtttgggcatcaatttattcattgttaatttcttgttcatgactatatttcgccaagatttatttttttttcttaatccgcgttaactagataaagatagcactttgcttcaagttttccttgtcttctttttagaaaaaaaactaactgtattattttctcaactgatgttatgtgagcttgacttgaacctatagtagcaccctaggattcacatcctgccattggtgcctcgtagggacagttttttttttcttgaacatagaggagagctgtctatcattatattaaagaacatggttaggaaactttacacacacatttggttacaagatcacccttgaagccaaagataactaaacgaccttgactaacaggactttggttacttgtggtattagactgttatttggctgggtcataatccatattcttgcaggatggattcattttattagcagctctatataaagaaatatttgtcactatattaaagaaaaaggcattatatatgattatgcgcatttctcaattcctcttcaacactttgacctcatttacaaccctagaagcaatacactaatgcacacaacacacgatcatcaggatctggaaggaatcaacaagtgtgaaatattttcctttgtactcaataagagacatgtttctaagaatttaagtcctttgtaatatggaaaattttcgatattgttaaatgacaattgactgaggccagagttggttcattatagcagatgatgatgatgcatcttggctttcgttcaaaaaaaaatgatgcatcttggcaaatttaattttgacctttctatataccaggaacttgatgatgtcattgaagagcttgagaagatagcagttgttcatctactgcagaacaggtcaataatatctttaattggaaatgtgcagaggtcgtctttgattcttgaaaaggctttcaatgttctacgaagaaacggtgtcaatgtccagatgatatcgcaaggggcgtccaaggtgaacatttccttggtggtccatgacagtgaggcaaaacagtgtgttcaagccctccactccgcgttctttgagaatggtttcttgttggaagctgatgagttggatgttctgcatgatggctttacatcgcattccaatggcacaatccacagccattagccgaggatttgatattcatctgtttggctactgtagtgccacttgtgatcaaatcctgatctttggtcgatatctaatgtttttatgaggctacgaaggattcggctttagagctactacccatcagaagtctaggaatttgttcagagccactacttaggattttggttagagattaatgatactgtttggttttctgtacaattgattgaaagtatatacttagttatcttggccaacctatcaaaccacggaggatgcaagcggatttgtccgtaaacctttaaggttagtttggaaacctcatttttgcaagggaaattagttcatttttttttgtgaaaataggaatcccaaaatggagtttctaaactagccataattgttacatgttactacataagccacaaaaaaaaggcctgtttatggggtcaagcccgattgcatttcacggaattgaagtactagcactacgaatttgtt

SEQ ID NO: 21389 - DNA, 2139 bp, Zea Mays
gttccttatcatttttaatatgagatactgtttggaaagatgttgatggtgttttaacatgtgacccaaatatccatcctaaggcaaaacctgtgccatacttgacatttgatgaggcagctgaacttgcctattttggagcgcaggttttgcatccacaatcaatgcggccagctagagaaggcgatgtacctgtgagggttaagaattcttataaccgtcgagcccctggtacccttatcactaaagcaagagatatgaactgttttgactagcattgttttgaaatcaaatattacaatgcttgatatagtcagcacacgcatgcttggccagtacgggtttctagctaaggttttttcgatatttgaagacttgggcatctctgttgattgtgtggctaccagtgaagtcagcatatctttgacactggatccatcgaaactatggagttgtgaattggttcagcacaaaaatgtttgggcatcaatttattcattgttaatttcttgttcatgactatatttcgccaagatttatttttttttcttaatccgcgttaactagataaagatagcactttgcttcaagttttccttgtcttctttttagaaaaaaaactaactgtattattttctcaactgatgttatgtgagcttgacttgaacctatagtagcaccctaggattcacatcctgccattggtgcctcgtagggacagttttttttttcttgaacatagaggagagctgtctatcattatattaaagaacatggttaggaaactttacacacacatttggttacaagatcacccttgaagccaaagataactaaacgaccttgactaacaggactttggttacttgtggtattagactgttatttggctgggtcataatccatattcttgcaggatggattcattttattagcagctctatataaagaaatatttgtcactatattaaagaaaaaggcattatatatgattatgcgcatttctcaattcctcttcaacactttgacctcatttacaaccctagaagcaatacactaatgcacacaacacacgatcatcaggatctggaaggaatcaacaagtgtgaaatattttcctttgtactcaataagagacatgtttctaagaatttaagtcctttgtaatatggaaaattttcgatattgttaaatgacaattgactgaggccagagttggttcattatagcagatgatgatgatgcatcttggctttcgttcaaaaaaaaatgatgcatcttggcaaatttaattttgacctttctatataccaggaacttgatgatgtcattgaagagcttgagaagatagcagttgttcatctactgcagaacaggtcaataatatctttaattggaaatgtgcagaggtcgtctttgattcttgaaaaggctttcaatgttctacgaagaaacggtgtcaatgtccagatgatatcgcaaggggcgtccaaggtgaacatttccttggtggtccatgacagtgaggcaaaacagtgtgttcaagccctccactccgcgttctttgagaatggtttcttgttggaagctgatgagttggatgttctgcatgatggctttacatcgcattccaatggcacaatccacagccattagccgaggatttgatattcatctgtttggctactgtagtgccacttgtgatcaaatcctgatctttggtcgatatctaatgtttttatgaggctacgaaggattcggctttagagctactacccatcagaagtctaggaatttgttcagagccactacttaggattttggttagagattaatgatactgtttggttttctgtacaattgattgaaagtatatacttagttatcttggccaacctatcaaaccacggaggatgcaagcggatttgtccgtaaacctttaaggttagtttggaaacctcatttttgcaagggaaattagttcatttttttttgtgaaaataggaatcccaaaatggagtttctaaactagccataattgttacatgttactacataagccacaaaaaaaaggcctgtttatggggtcaagcccgattgcatttcacggaattgaagtactagcactacgaatttgtt

SEQ ID NO: 21390 - DNA, 2804 bp, Zea Mays
cgaaacggggagtgaccgagtgaggatggtttagcacacagccacacacgcggctcggctgttgtctttcccgaaacagcaaaaccccaaaccctctccggcgtctccgctccctctcgcaagtcgcaacgccggcggaaaccccaagtactgcacggtttagcaggcagtgttactctcttgctttcaacttctaattgttctatcaaagtatcaattctgtccttcagataagcataccctggcaatgggtgctgctggcaatgtcagcaatccgtattgttcgcatgtcagagaaggagcggacaaaagtagtgacccaagattaggtccagattttactgcagctgaagtgcaagcggatcctgtcaatggtgatttatctttgagtcatgtgaaactggagcagtcatggtctagtgtacaagcattcattgctgagcatgtgacccttaaggatattgatttggattggagcaaggaggttgttgggctggatggtttcagatatgtaggctgcaatgacctaaaggatgttgcactgaatagcttgcacacgttcttcaagactgcagttgatatgttatcctgtgaagggaacaccgaggatgctgttgtaaatgctgttgtgcactctgcactctgttatcagtttgatggacctataactaagatcgctgaacatgcacgcacattgctacagagtggcaatcatttggttgatcattcctacagtgaaaatgttgacacagttctgcacatgctgggtttgtatttcctttgcaatgcatcaaggttgcttaagaaatactgtccatttttcaccttgggagatgcattgtggtgcattctgctgtgtgacatggatatatctatagctcgtgcagctttttttcccatgagtggttatgggaatggacaatcagaaggctatgctcatagtcagagtgacttatgtgaagatcatgatattgtaaatgagttatcagaagaatatagttgcagtgccacagaatcgcctgcacaattcgagccacctgaatatgaagcagtacaaatgatgtggagcaattttctgacaaattatatagtttcatttcaaaagtttgaaaggaaaaaccaagatgctccttttgctcaagatgaaaattctccttcagtgcctagatctgttaacaaaaaggaaaccaaaggcaaccgtagtaagacaaattccatgaaatcccagaaagactccgggaagggtttggtagttttcaagaacatcccacaagtcaagggtattataagtagaacatctttacgaatgataaaagagaacaaaacattaactgcattccttgcatctgcacagagcactttggcaggcacttcagaggtagccagtgaaaaggactcacaaacacccatgttagttccaactaaaccacatcctggacctttctcagtcaaaaaacgatattctccagcagtggtttcaattggatcactttcttctcctagctgttcctccaattcatcatccagtgcaaagggcaaggcagagcctaggcagtggatggaacctgatgttgtacacttctctctcccaaatactcctgcagagggctttgaatttcatttctcacgtgaaggcttgcagaccacttggattccaaaagatagaaaagaggagctggctctaaaactagtccagcgcttgggtgagttaaagctggaggtgcaagtctggacagattgggctaatgagagggtgatgcagtcaacaaataggctggtaaatgaaaggactgtacttttatctcttaaaaaggataaggcagactttgaagagcctgatgtgtttacaagaaagaagcttgaggagacaaaaagggcaatagacagtacttcttgtgagcttgatcgtgttaattcccttgtccaggagcttacagataaggtttcactttgtaggcgtgagaagaaagctgtccagcgacaaggagagcaatatgacgcaagcttggctagcattttaagcaagaaaactgtgtctatgaacagactgaagtccatggagacagagaagatccttttgcaggaggagattgctgctgaaaggagtaaactatccaagcttctgcaaagtcttgagcaagctagaagacatgaagtcggattaaagaaaaggtgccaggaaggagagaagatgatagatgcacttacaaagaaggttaactttgaaagaactgagctcgagaggattgagacatcaggaagagcaaggtctagttgtctgttgctggaagcgcgcaaccaccaggaatggctgcagaccaatatcaagaatctgagacagcaggtaggtgagatgtctagcagaagcaagcctctgagcgtcgcaaacttcatgcgccacccaggttttgtgatcgatgattctgtacagcgggagcaggaatgtgccatgtgcttggaagaggaggtttcggtggttttcctgccatgcaggcatcagattatttgtgcaggctgcaaccaacgccatggagatggtggcatgaccgaatgcccatcctgcagatctcccatagagcgtaggatctgtgctcgctttaccgacagttagaccgcatggttaaacactgttttgcactgttgtaaagtgaagtttaaatatggggatgagaatgagtaagctgttggagatagtcttaagatgtgaatgtacaatccttgaagaatcatagttttttttttttgcctttgtttcgatgtaccatggtctaaaatcgaattagagcccaagagcaatgcaggtg

SEQ ID NO: 21391 - DNA, 2740 bp, Zea Mays
cgaaacggggagtgaccgagtgaggatggtttagcacacagccacacacgcggctcggctgttgtctttcccgaaacagcaaaaccccaaaccctctccggcgtctccgctccctctcgcaagtcgcaacgccggcggaaaccccaagtactgcacggtttagcagataagcataccctggcaatgggtgctgctggcaatgtcagcaatccgtattgttcgcatgtcagagaaggagcggacaaaagtagtgacccaagattaggtccagattttactgcagctgaagtgcaagcggatcctgtcaatggtgatttatctttgagtcatgtgaaactggagcagtcatggtctagtgtacaagcattcattgctgagcatgtgacccttaaggatattgatttggattggagcaaggaggttgttgggctggatggtttcagatatgtaggctgcaatgacctaaaggatgttgcactgaatagcttgcacacgttcttcaagactgcagttgatatgttatcctgtgaagggaacaccgaggatgctgttgtaaatgctgttgtgcactctgcactctgttatcagtttgatggacctataactaagatcgctgaacatgcacgcacattgctacagagtggcaatcatttggttgatcattcctacagtgaaaatgttgacacagttctgcacatgctgggtttgtatttcctttgcaatgcatcaaggttgcttaagaaatactgtccatttttcaccttgggagatgcattgtggtgcattctgctgtgtgacatggatatatctatagctcgtgcagctttttttcccatgagtggttatgggaatggacaatcagaaggctatgctcatagtcagagtgacttatgtgaagatcatgatattgtaaatgagttatcagaagaatatagttgcagtgccacagaatcgcctgcacaattcgagccacctgaatatgaagcagtacaaatgatgtggagcaattttctgacaaattatatagtttcatttcaaaagtttgaaaggaaaaaccaagatgctccttttgctcaagatgaaaattctccttcagtgcctagatctgttaacaaaaaggaaaccaaaggcaaccgtagtaagacaaattccatgaaatcccagaaagactccgggaagggtttggtagttttcaagaacatcccacaagtcaagggtattataagtagaacatctttacgaatgataaaagagaacaaaacattaactgcattccttgcatctgcacagagcactttggcaggcacttcagaggtagccagtgaaaaggactcacaaacacccatgttagttccaactaaaccacatcctggacctttctcagtcaaaaaacgatattctccagcagtggtttcaattggatcactttcttctcctagctgttcctccaattcatcatccagtgcaaagggcaaggcagagcctaggcagtggatggaacctgatgttgtacacttctctctcccaaatactcctgcagagggctttgaatttcatttctcacgtgaaggcttgcagaccacttggattccaaaagatagaaaagaggagctggctctaaaactagtccagcgcttgggtgagttaaagctggaggtgcaagtctggacagattgggctaatgagagggtgatgcagtcaacaaataggctggtaaatgaaaggactgtacttttatctcttaaaaaggataaggcagactttgaagagcctgatgtgtttacaagaaagaagcttgaggagacaaaaagggcaatagacagtacttcttgtgagcttgatcgtgttaattcccttgtccaggagcttacagataaggtttcactttgtaggcgtgagaagaaagctgtccagcgacaaggagagcaatatgacgcaagcttggctagcattttaagcaagaaaactgtgtctatgaacagactgaagtccatggagacagagaagatccttttgcaggaggagattgctgctgaaaggagtaaactatccaagcttctgcaaagtcttgagcaagctagaagacatgaagtcggattaaagaaaaggtgccaggaaggagagaagatgatagatgcacttacaaagaaggttaactttgaaagaactgagctcgagaggattgagacatcaggaagagcaaggtctagttgtctgttgctggaagcgcgcaaccaccaggaatggctgcagaccaatatcaagaatctgagacagcaggtaggtgagatgtctagcagaagcaagcctctgagcgtcgcaaacttcatgcgccacccaggttttgtgatcgatgattctgtacagcgggagcaggaatgtgccatgtgcttggaagaggaggtttcggtggttttcctgccatgcaggcatcagattatttgtgcaggctgcaaccaacgccatggagatggtggcatgaccgaatgcccatcctgcagatctcccatagagcgtaggatctgtgctcgctttaccgacagttagaccgcatggttaaacactgttttgcactgttgtaaagtgaagtttaaatatggggatgagaatgagtaagctgttggagatagtcttaagatgtgaatgtacaatccttgaagaatcatagttttttttttttgcctttgtttcgatgtaccatggtctaaaatcgaattagagcccaagagcaatgcaggtg

SEQ ID NO: 21392 - DNA, 867 bp, Zea Mays
aggccaaaatgcttctgaatactgggattctttcttgactagtgaagacaaaagctctactagcgcttattctgacttcagattgaacatgagagagactgcaaatttgtctgatgcaaaaaaatcattgataagtcaaaccttcggataaagtcagttgtggcattggatcatctaaaaattatatttatgttgaagctgagaaggaggctcatgtcaaagagagagggaccgtctaaaagtattgtgcaagatatagagcatgcactcatcatatctaagtgatcggagtgatattgattggcttattagatggatattggcccagtttatctttcattttttctatagcttttagaaatttaccttgctcatagttcgtactataattaatatgagactcttgttttgtagtacgctagcttgttgtcatgaagaagtcattcaagttccttccagtgagttattagttcatatgtatatttctgtttatatcttatcttgtttatgtttagatttatatgagccagcaacttaatgatgattaaccttgattgcaccagctgaagttggtgcataaggctgcaacaccatctagtggagggtgttctcgacaaagaaagcttgtaccttaaaacaggaggatacaagaagctggagtggttgtctgaaggcttttgaactgcttgaagcattagtgtagctttggtgcttttgtgactgatcagctctggagcagctagagtgatatagttgtgggcttttgaacaatagttggagtgatatgaaacattagtgatctagttgtgaatgatattataattgtgatgcttttgtgaatatataattgtggtgcttttgtgttta

SEQ ID NO: 21393 - DNA, 1242 bp, Zea Mays
cgccagcatagtcacgatgatgttgtgattgctgcgcgtggagctggtgacgtcgctggggtcaactctggcgatcaagctggtgagcagagtccacgtggccgacgcgaggttcggcgtgtacagccaccgcctggacgacgtgtggctcgtcggcggggcgtccaacaccgggggagccgtgctccggcagctcttcacggacgaccagctcgcggcgctgagcgagcacatcgacccggccgtcccttcccctctcgactactaccccctgccgaagaaaggcgagaggttcccggtctccgacccagacatgatgccaaggttcagtatgttcaataggcgtgcctgtgtgtcttcctccattctgcaacttcaaattcggtctcttcttcttgttgtcgtcgtcgtcgtctctgcaggctgcagccgcgccctgggagcgacgcggagtacctgcacggcatactggaatcgatcgcgcgaatcgaggccaaggggtacagcctgctgaaggagctcggcgcgacggcggtggaggaggtgttcacagcggggggaggagcgcagaacgacaggtggacggccatccgggagagggtgctcggcgtggcgtccggaaggcccagcagactgaggcggcctatggagctgcactgctagcactcaagggcgccaagagcttggctggctagtgtgtcttgttgtgcttggtagggctggacgaaaaactcgtagctcgttaactcgctcgactcgactcaatagtggctcggctcgactcgactcgtttataatttgtaacgagttgagcttgtatttcaactcgttacgataacgagccagctcgagctggctcgcgagctgactcgcgagccaaacgagttgaagtaattagtcaaactacaataatcttggatccaaaatagttaatcttgtactctactatagttaatcttgttctttgttgagtgtgaaatcttaagttgcaaactctattctgtttttctaaatagatctccttcttttcttttgctacatgtttttatatccgttcgtagacactagacatggtattatcgagctggctcacgagctaaacgagccagctcgagttggcaaacgagtcgagccgagttggatcttcagctcgttaacataacgagtcgagccgagccagctcgttatcttaacgagccaactcgagtcgagtcgagccgagtcgagccagctcgatatccg

SEQ ID NO: 21394 - DNA, 2193 bp, Zea Mays
gtcacaaccacggcccagtaaaattctgtactggtccgtcttcgggcccagcaaagattattttgtggcgttcccgttcgtcagaatcttcttcccttatccttccccggccgacctgggccagcacagcatcgccttcacctccttgtctccttcctttcgttccaaatcaaagccgatcgcccatggtgtcagctctcactccctcagcagagctgctgcctcacccccgccaccctgcaaaacgagggttactagggttccggagggatcatagccgcgctgctacatcgaaagtaagagttaccatgctcagccagcagaatccgggcggcgagagcgccggcacgcctcctctgtacctcgggatagacttcggcacttccggagcaagatacgccctcatcgacgagcacggggccatccattcggaagggaagcgagcttactgtgcgcctgtcggcgacgccgcgggctgggcgagctcgtggcgagcggcgctcttccagctcctcgccgacgtcccgcctgcccaccgcccgtccgtctcctccatctccatagacggcacctccgccaccgcgctaatcgtcgacagcgagaccggggagctcctgggcgggccgttcctctacaacgaaggcttcccggacgctctgcccgccgtggagtcggtggcgccggcgaaccacaccgtgtgctcccccacctccacgctctgcaagctggtgtcgtggtgggcggcctcgggcggcgcagccgcgggcgcggcggtgctgatgcaccagtccgactggctcctgtggctgctgcacggccggcccggcggcgtctccgactacaacagcgcgctcaaggtgggctacgacccggagctcggcgcctacccgggctggctgacctcgcagccctactcgcgcatgctgccggccgccgtcagaccacctggggctcccgtcgctgcgctcagagacgacgtgcgctcacagtacggattttctgaggactgcgttgtgtgcgctggaaccactgacagcatcgcggcgtttcttgctgcccgcagaagtgaaccaggaacagcttaactgtgagcaggtgacgtcgctggggtcaactctggcgatcaagctggtgagcagagtccacgtggccgacgcgaggttcggcgtgtacagccaccgcctggacgacgtgtggctcgtcggcggggcgtccaacaccgggggagccgtgctccggcagctcttcacggacgaccagctcgcggcgctgagcgagcacatcgacccggccgtcccttcccctctcgactactaccccctgccgaagaaaggcgagaggttcccggtctccgacccagacatgatgccaaggctgcagccgcgccctgggagcgacgcggagtacctgcacggcatactggaatcgatcgcgcgaatcgaggccaaggggtacagcctgctgaaggagctcggcgcgacggcggtggaggaggtgttcacagcggggggaggagcgcagaacgacaggtggacggccatccgggagagggtgctcggcgtggcgtccggaaggcccagcagactgaggcggcctatggagctgcactgctagcactcaagggcgccaagagcttggctggctagtgtgtcttgttgtgcttggtagggctggacgaaaaactcgtagctcgttaactcgctcgactcgactcaatagtggctcggctcgactcgactcgtttataatttgtaacgagttgagcttgtatttcaactcgttacgataacgagccagctcgagctggctcgcgagctgactcgcgagccaaacgagttgaagtaattagtcaaactacaataatcttggatccaaaatagttaatcttgtactctactatagttaatcttgttctttgttgagtgtgaaatcttaagttgcaaactctattctgtttttctaaatagatctccttcttttcttttgctacatgtttttatatccgttcgtagacactagacatggtattatcgagctggctcacgagctaaacgagccagctcgagttggcaaacgagtcgagccgagttggatcttcagctcgttaacataacgagtcgagccgagccagctcgttatcttaacgagccaactcgagtcgagtcgagccgagtcgagccagctcgatatccg

SEQ ID NO: 21395 - DNA, 3322 bp, Zea Mays
aaaagatagaggcttttacctgttgacactccagaagtcagaacccaccttcggcttcctctgtcgtccggcctccaactccatcgaaggggctagggagaggagggaacccgaaccacagcaggccggcgcaatggcggcgccgccaaaggcgtggaaggcggagtatgccaagtctgggcgggcctcgtgcaagtcatgccggtcccctatcgccaaggaccagctccgtcttggcaagatggttcaggcgtcacagttcgacggcttcatgccgatgtggaaccatgccaggtgcatcttcagcaagaagaaccagataaaatccgttgacgatgttgaagggatagatgcacttagatgggatgatcaagagaagatacgaaactacgttgggagtgcctcagctggtacaagttctacagctgctcctcctgagaaatgtacaattgagattgctccatctgcccgtacttcatgtagacgatgcagtgaaaagattacaaaaggatcggtccgtctttcagctaagcttgagagtgaaggtcccaagggtataccatggtatcatgccaactgtttctttgaggtatccccgtctgcaactgttgagaagttctcaggctgggatactttgtccgatgaggataagagaaccatgctcgatcttgttaaaaaagatgttggcaacaatgaacaaaataagggttccaagcgcaagaaaagtgaaaatgatattgatagctacaaatccgccaggttagatgaaagtacatctgaaggtacagtgcgaaacaaagggcaacttgtagacccacgtggttccaatactagttcagctgatatccaactaaagcttaaggagcaaagtgacacactttggaagttaaaggatggacttaagactcatgtatcggctgctgaattaagggatatgcttgaggctaatgggcaggatacatcaggaccagaaaggcacctattggatcgctgtgcggatggaatgctatttggagcgctgggtccttgcccagtctgtgctaatggcatgtactattataatggtcagtaccaatgcagtggtaatgtgtcagagtggtccaagtgtacatactctgccacagaacctgtccgcgttaagaagaagtggcaaattccacatggaacaaagaatgattaccttatgaagtggttcaaatctcaaaaggttaagaaaccagagagggttcttccaccaatgtcacctgagaaatctggaagtaaagcaactcagagaacatcattgctgtcttctaaagggttggataaattaaggttttctgttgtaggacaatcaaaagaagcagcaaatgagtggattgagaagctcaaacttgctggtgccaacttctatgccagggttgtcaaagatattgattgtttaattgcatgtggtgagctcgacaatgaaaatgctgaagtcaggaaagcaaggaggctgaagataccaattgtaagggagggttacattggagaatgtgttaaaaagaacaaaatgctgccatttgatttgtataaactagagaatgccttagagtcctcaaaaggcagtactgtcactgttaaagttaagggccgaagtgctgttcatgagtcctctggtttgcaagatactgctcacattcttgaagatgggaaaagcatatacaatgcaaccttaaacatgtctgacctggcactaggtgtgaacagctactatgtactccagatcattgaacaggatgatgggtctgagtgctacgtatttcgtaagtggggacgggttgggagtgagaaaattggagggcaaaaactggaggagatgtcaaaaactgaggcaatcaaggaattcaaaagattatttcttgagaagactggaaactcatgggaagcttgggaatgtaaaaccaattttcggaagcagcctgggagattttacccacttgatgttgattatggtgttaagaaagcaccaaaacggaaagatatcagtgaaatgaaaagttctcttgctcctcaattgctagaactcatgaagatgcttttcaatgtggagacatatagagctgctatgatggaatttgaaattaatatgtcagaaatgcctcttgggaagctaagcaaggaaaatattgagaaaggatttgaagcattaactgagatacagaatttattgaaggacaccgctgatcaagcactggctgttagagaaagcttaattgttgctgcgagcaatcgctttttcactcttatcccttctattcatcctcatattatacgggatgaggatgatttgatgatcaaagcgaaaatgcttgaagctctgcaggatattgaaattgcttcaaagatagttggcttcgatagcgacagtgatgaatctcttgatgataaatatatgaaacttcactgtgacatcaccccgctggctcacgatagtgaagattacaagttaattgagcagtatctcctcaacacacatgctcctactcacaaggactggtcgctggaactggaggaagttttttcacttgatcgagatggagaacttaataagtactcaagatataaaaataatctgcataacaagatgctattatggcacggttgacgaattttgtgggaattcttagtcaagggctaagaattgcacctcctgaggcacctgttactggctatatgttcggcaaaggcctctactttgcagatctagtaagcaagagcgcacaatactgttatgtggataggaataatcctgtaggtttgatgcttctttctgaggttgctttaggagacatgtatgaactaaagaaagccacgtccatggacaaacctccaagagggaagcattcgaccaagggattaggcaaaaccgtgccactggagtcagagtttgtgaagtggagggatgatgtcgtagttccctgcggcaagccggtgccatcatcaattaggagctctgaactcatgtacaatgagtacatcgtctacaacacatcccaggtgaagatgcagttcttgctgaaggtgcgtttccatcacaagaggtagctgggagactaggcaagtagagttggaaggtagagaagcagagttaggcgatgcctcttttggtattattagtaagcctggcatgtatttatgggtgctcgcgcttgatccattttggtaagtgttgcttgggcatcagcgcgaatagcaccaatcacacacttttacctaatgacgttttactgtataaatctaccaggagtgagtaatttatatattagcgggactggacctcttggtcgcgtgctatttt

SEQ ID NO: 21396 - DNA, 3288 bp, Zea Mays
gacactccagaagtcagaacccaccttcggcttcctctgtcgtccggcctccaactccatcgaaggggctagggagaggagggaacccgaaccacagcaggccggcgcaatggcggcgccgccaaaggcgtggaaggcggagtatgccaagtctgggcgggcctcgtgcaagtcatgccggtcccctatcgccaaggaccagctccgtcttggcaagatggttcaggcgtcacagttcgacggcttcatgccgatgtggaaccatgccaggtgcatcttcagcaagaagaaccagataaaatcggatagatgcacttagatgggatgatcaagagaagatacgaaactacgttgggagtgcctcagctggtacaagttctacagctgctcctcctgagaaatgtacaattgagattgctccatctgcccgtacttcatgtagacgatgcagtgaaaagattacaaaaggatcggtccgtctttcagctaagcttgagagtgaaggtcccaagggtataccatggtatcatgccaactgtttctttgaggtatccccgtctgcaactgttgagaagttctcaggctgggatactttgtccgatgaggataagagaaccatgctcgatcttgttaaaaaagatgttggcaacaatgaacaaaataagggttccaagcgcaagaaaagtgaaaatgatattgatagctacaaatccgccaggttagatgaaagtacatctgaaggtacagtgcgaaacaaagggcaacttgtagacccacgtggttccaatactagttcagctgatatccaactaaagcttaaggagcaaagtgacacactttggaagttaaaggatggacttaagactcatgtatcggctgctgaattaagggatatgcttgaggctaatgggcaggatacatcaggaccagaaaggcacctattggatcgctgtgcggatggaatgctatttggagcgctgggtccttgcccagtctgtgctaatggcatgtactattataatggtcagtaccaatgcagtggtaatgtgtcagagtggtccaagtgtacatactctgccacagaacctgtccgcgttaagaagaagtggcaaattccacatggaacaaagaatgattaccttatgaagtggttcaaatctcaaaaggttaagaaaccagagagggttcttccaccaatgtcacctgagaaatctggaagtaaagcaactcagagaacatcattgctgtcttctaaagggttggataaattaaggttttctgttgtaggacaatcaaaagaagcagcaaatgagtggattgagaagctcaaacttgctggtgccaacttctatgccagggttgtcaaagatattgattgtttaattgcatgtggtgagctcgacaatgaaaatgctgaagtcaggaaagcaaggaggctgaagataccaattgtaagggagggttacattggagaatgtgttaaaaagaacaaaatgctgccatttgatttgtataaactagagaatgccttagagtcctcaaaaggcagtactgtcactgttaaagttaagggccgaagtgctgttcatgagtcctctggtttgcaagatactgctcacattcttgaagatgggaaaagcatatacaatgcaaccttaaacatgtctgacctggcactaggtgtgaacagctactatgtactccagatcattgaacaggatgatgggtctgagtgctacgtatttcgtaagtggggacgggttgggagtgagaaaattggagggcaaaaactggaggagatgtcaaaaactgaggcaatcaaggaattcaaaagattatttcttgagaagactggaaactcatgggaagcttgggaatgtaaaaccaattttcggaagcagcctgggagattttacccacttgatgttgattatggtgttaagaaagcaccaaaacggaaagatatcagtgaaatgaaaagttctcttgctcctcaattgctagaactcatgaagatgcttttcaatgtggagacatatagagctgctatgatggaatttgaaattaatatgtcagaaatgcctcttgggaagctaagcaaggaaaatattgagaaaggatttgaagcattaactgagatacagaatttattgaaggacaccgctgatcaagcactggctgttagagaaagcttaattgttgctgcgagcaatcgctttttcactcttatcccttctattcatcctcatattatacgggatgaggatgatttgatgatcaaagcgaaaatgcttgaagctctgcaggatattgaaattgcttcaaagatagttggcttcgatagcgacagtgatgaatctcttgatgataaatatatgaaacttcactgtgacatcaccccgctggctcacgatagtgaagattacaagttaattgagcagtatctcctcaacacacatgctcctactcacaaggactggtcgctggaactggaggaagttttttcacttgatcgagatggagaacttaataagtactcaagatataaaaataatctgcataacaagatgctattatggcacggttcaaggttgacgaattttgtgggaattcttagtcaagggctaagaattgcacctcctgaggcacctgttactggctatatgttcggcaaaggcctctactttgcagatctagtaagcaagagcgcacaatactgttatgtggataggaataatcctgtaggtttgatgcttctttctgaggttgctttaggagacatgtatgaactaaagaaagccacgtccatggacaaacctccaagagggaagcattcgaccaagggattaggcaaaaccgtgccactggagtcagagtttgtgaagtggagggatgatgtcgtagttccctgcggcaagccggtgccatcatcaattaggagctctgaactcatgtacaatgagtacatcgtctacaacacatcccaggtgaagatgcagttcttgctgaaggtgcgtttccatcacaagaggtagctgggagactaggcaagtagagttggaaggtagagaagcagagttaggcgatgcctcttttggtattattagtaagcctggcatgtatttatgggtgctcgcgcttgatccattttggtaagtgttgcttgggcatcagcgcgaatagcaccaatcacacacttttacctaatgacgttttactgtataaatctaccaggagtgagtaatttatatattagcgggactggacctcttggtcgcgtgctatttt

SEQ ID NO: 21397 - DNA, 3051 bp, Zea Mays
gaacccaccttcggcttcctctgtcgtccggcctccaactccatcgaaggggctagggagaggagggaacccgaaccacagcaggccggcgcaatggcggcgccgccaaaggcgtggaaggcggagtatgccaagtctgggcgggcctcgtgcaagtcatgccggtcccctatcgccaaggaccagctccgtcttggcaagatggttcaggcgtcacagttcgacggcttcatgccgatgtggaaccatgccaggtgcatcttcagcaagaagaaccagataaaatccgttgacgatgttgaagggatagatgcacttagatgggatgatcaagagaagatacgaaactacgttgggagtgcctcagctggtacaagttctacagctgctcctcctgagaaatgtacaattgagattgctccatctgcccgtacttcatgtagacgatgcagtgaaaagattacaaaaggatcggtccgtctttcagctaagcttgagagtgaaggtcccaagggtataccatggtatcatgccaactgtttctttgaggtatccccgtctgcaactgttgagaagttctcaggctgggatactttgtccgatgaggataagagaaccatgctcgatcttgttaaaaaagatgttggcaacaatgaacaaaataagggttccaagcgcaagaaaagtgaaaatgatattgatagctacaaatccgccaggttagatgaaagtacatctgaaggtacagtgcgaaacaaagggcaacttgtagacccacgtggttccaatactagttcagctgatatccaactaaagcttaaggagcaaagtgacacactttggaagttaaaggatggacttaagactcatgtatcggctgctgaattaagggatatgcttgaggctaatgggcaggatacatcaggaccagaaaggcacctattggatcgctgtgcggatggaatgctatttggagcgctgggtccttgcccagtctgtgctaatggcatgtactattataatggtcagtaccaatgcagtggtaatgtgtcagagtggtccaagtgtacatactctgccacagaacctgtccgcgttaagaagaagtggcaaattccacatggaacaaagaatgattaccttatgaagtggttcaaatctcaaaaggttaagaaaccagagagggttcttccaccaatgtcacctgagaaatctggaagtaaagcaactcagagaacatcattgctgtcttctaaagggttggataaattaaggttttctgttgtaggacaatcaaaagaagcagcaaatgagtggattgagaagctcaaacttgctggtgccaacttctatgccagggttgtcaaagatattgattgtttaattgcatgtggtgagctcgacaatgaaaatgctgaagtcaggaaagcaaggaggctgaagataccaattgtaagggagggttacattggagaatgtgttaaaaagaacaaaatgctgccatttgatttgtataaactagagaatgccttagagtcctcaaaaggcagtactgtcactgttaaagttaagggccgaagtgctgttcatgagtcctctggtttgcaagatactgctcacattcttgaagatgggaaaagcatatacaatgcaaccttaaacatgtctgacctggcactaggtgtgaacaggattatggtgttaagaaagcaccaaaacggaaagatatcagtgaaatgaaaagttctcttgctcctcaattgctagaactcatgaagatgcttttcaatgtggagacatatagagctgctatgatggaatttgaaattaatatgtcagaaatgcctcttgggaagctaagcaaggaaaatattgagaaaggatttgaagcattaactgagatacagaatttattgaaggacaccgctgatcaagcactggctgttagagaaagcttaattgttgctgcgagcaatcgctttttcactcttatcccttctattcatcctcatattatacgggatgaggatgatttgatgatcaaagcgaaaatgcttgaagctctgcaggatattgaaattgcttcaaagatagttggcttcgatagcgacagtgatgaatctcttgatgataaatatatgaaacttcactgtgacatcaccccgctggctcacgatagtgaagattacaagttaattgagcagtatctcctcaacacacatgctcctactcacaaggactggtcgctggaactggaggaagttttttcacttgatcgagatggagaacttaataagtactcaagatataaaaataatctgcataacaagatgctattatggcacggttcaaggttgacgaattttgtgggaattcttagtcaagggctaagaattgcacctcctgaggcacctgttactggctatatgttcggcaaaggcctctactttgcagatctagtaagcaagagcgcacaatactgttatgtggataggaataatcctgtaggtttgatgcttctttctgaggttgctttaggagacatgtatgaactaaagaaagccacgtccatggacaaacctccaagagggaagcattcgaccaagggattaggcaaaaccgtgccactggagtcagagtttgtgaagtggagggatgatgtcgtagttccctgcggcaagccggtgccatcatcaattaggagctctgaactcatgtacaatgagtacatcgtctacaacacatcccaggtgaagatgcagttcttgctgaaggtgcgtttccatcacaagaggtagctgggagactaggcaagtagagttggaaggtagagaagcagagttaggcgatgcctcttttggtattattagtaagcctggcatgtatttatgggtgctcgcgcttgatccattttggtaagtgttgcttgggcatcagcgcgaatagcaccaatcacacacttttacctaatgacgttttactgtataaatctaccaggagtgagtaatttatatattagcgggactggacctcttggtcgcgtgctatttt

SEQ ID NO: 21398 - DNA, 3070 bp, Zea Mays
ctcatttgcacaggtcgagccccagatgtggaaccatgccaggtgcatcttcagcaagaagaaccagataaaatccgttgacgatgttgaagggatagatgcacttagatgggatgatcaagagaagatacgaaactacgttgggagtgcctcagctggtacaagttctacagctgctcctcctgagaaatgtacaattgagattgctccatctgcccgtacttcatgtagacgatgcagtgaaaagattacaaaaggatcggtccgtctttcagctaagcttgagagtgaaggtcccaagggtataccatggtatcatgccaactgtttctttgaggtatccccgtctgcaactgttgagaagttctcaggctgggatactttgtccgatgaggataagagaaccatgctcgatcttgttaaaaaagatgttggcaacaatgaacaaaataagggttccaagcgcaagaaaagtgaaaatgatattgatagctacaaatccgccaggttagatgaaagtacatctgaaggtacagtgcgaaacaaagggcaacttgtagacccacgtggttccaatactagttcagctgatatccaactaaagcttaaggagcaaagtgacacactttggaagttaaaggatggacttaagactcatgtatcggctgctgaattaagggatatgcttgaggctaatgggcaggatacatcaggaccagaaaggcacctattggatcgctgtgcggatggaatgctatttggagcgctgggtccttgcccagtctgtgctaatggcatgtactattataatggtcagtaccaatgcagtggtaatgtgtcagagtggtccaagtgtacatactctgccacagaacctgtccgcgttaagaagaagtggcaaattccacatggaacaaagaatgattaccttatgaagtggttcaaatctcaaaaggttaagaaaccagagagggttcttccaccaatgtcacctgagaaatctggaagtaaagcaactcagagaacatcattgctgtcttctaaagggttggataaattaaggttttctgttgtaggacaatcaaaagaagcagcaaatgagtggattgagaagctcaaacttgctggtgccaacttctatgccagggttgtcaaagatattgattgtttaattgcatgtggtgagctcgacaatgaaaatgctgaagtcaggaaagcaaggaggctgaagataccaattgtaagggagggttacattggagaatgtgttaaaaagaacaaaatgctgccatttgatttgtataaactagagaatgccttagagtcctcaaaaggcagtactgtcactgttaaagttaagggccgaagtgctgttcatgagtcctctggtttgcaagatactgctcacattcttgaagatgggaaaagcatatacaatgcaaccttaaacatgtctgacctggcactaggtgtgaacagctactatgtactccagatcattgaacaggatgatgggtctgagtgctacgtatttcgtaagtggggacgggttgggagtgagaaaattggagggcaaaaactggaggagatgtcaaaaactgaggcaatcaaggaattcaaaagattatttcttgagaagactggaaactcatgggaagcttgggaatgtaaaaccaattttcggaagcagcctgggagattttacccacttgatgttgattatggtgttaagaaagcaccaaaacggaaagatatcagtgaaatgaaaagttctcttgctcctcaattgctagaactcatgaagatgcttttcaatgtggagacatatagagctgctatgatggaatttgaaattaatatgtcagaaatgcctcttgggaagctaagcaaggaaaatattgagaaaggatttgaagcattaactgagatacagaatttattgaaggacaccgctgatcaagcactggctgttagagaaagcttaattgttgctgcgagcaatcgctttttcactcttatcccttctattcatcctcatattatacgggatgaggatgatttgatgatcaaagcgaaaatgcttgaagctctgcaggatattgaaattgcttcaaagatagttggcttcgatagcgacagtgatgaatctcttgatgataaatatatgaaacttcactgtgacatcaccccgctggctcacgatagtgaagattacaagttaattgagcagtatctcctcaacacacatgctcctactcacaaggactggtcgctggaactggaggaagttttttcacttgatcgagatggagaacttaataagtactcaagatataaaaataatctgcataacaagatgctattatggcacggttgacgaattttgtgggaattcttagtcaagggctaagaattgcacctcctgaggcacctgttactggctatatgttcggcaaaggcctctactttgcagatctagtaagcaagagcgcacaatactgttatgtggataggaataatcctgtaggtttgatgcttctttctgaggttgctttaggagacatgtatgaactaaagaaagccacgtccatggacaaacctccaagagggaagcattcgaccaagggattaggcaaaaccgtgccactggagtcagagtttgtgaagtggagggatgatgtcgtagttccctgcggcaagccggtgccatcatcaattaggagctctgaactcatgtacaatgagtacatcgtctacaacacatcccaggtgaagatgcagttcttgctgaaggtgcgtttccatcacaagaggtagctgggagactaggcaagtagagttggaaggtagagaagcagagttaggcgatgcctcttttggtattattagtaagcctggcatgtatttatgggtgctcgcgcttgatccattttggtaagtgttgcttgggcatcagcgcgaatagcaccaatcacacacttttacctaatgacgttttactgtataaatctaccaggagtgagtaatttatatattagcgggactggacctcttggtcgcgtgctatttt

SEQ ID NO: 21399 - DNA, 2449 bp, Zea Mays
ctgcaacactagtggacaaagacaaaccggagcaggtgtggccttgtgcagatagaggtggcatgctgcagttgattgcagcagatataattggccacatatacttttctgggtgcggatggaatgctatttggagcgctgggtccttgcccagtctgtgctaatggcatgtactattataatggtcagtaccaatgcagtggtaatgtgtcagagtggtccaagtgtacatactctgccacagaacctgtccgcgttaagaagaagtggcaaattccacatggaacaaagaatgattaccttatgaagtggttcaaatctcaaaaggttaagaaaccagagagggttcttccaccaatgtcacctgagaaatctggaagtaaagcaactcagagaacatcattgctgtcttctaaagggttggataaattaaggttttctgttgtaggacaatcaaaagaagcagcaaatgagtggattgagaagctcaaacttgctggtgccaacttctatgccagggttgtcaaagatattgattgtttaattgcatgtggtgagctcgacaatgaaaatgctgaagtcaggaaagcaaggaggctgaagataccaattgtaagggagggttacattggagaatgtgttaaaaagaacaaaatgctgccatttgatttgtataaactagagaatgccttagagtcctcaaaaggcagtactgtcactgttaaagttaagggccgaagtgctgttcatgagtcctctggtttgcaagatactgctcacattcttgaagatgggaaaagcatatacaatgcaaccttaaacatgtctgacctggcactaggtgtgaacagctactatgtactccagatcattgaacaggatgatgggtctgagtgctacgtatttcgtaagtggggacgggttgggagtgagaaaattggagggcaaaaactggaggagatgtcaaaaactgaggcaatcaaggaattcaaaagattatttcttgagaagactggaaactcatgggaagcttgggaatgtaaaaccaattttcggaagcagcctgggagattttacccacttgatgttgattatggtgttaagaaagcaccaaaacggaaagatatcagtgaaatgaaaagttctcttgctcctcaattgctagaactcatgaagatgcttttcaatgtggagacatatagagctgctatgatggaatttgaaattaatatgtcagaaatgcctcttgggaagctaagcaaggaaaatattgagaaaggatttgaagcattaactgagatacagaatttattgaaggacaccgctgatcaagcactggctgttagagaaagcttaattgttgctgcgagcaatcgctttttcactcttatcccttctattcatcctcatattatacgggatgaggatgatttgatgatcaaagcgaaaatgcttgaagctctgcaggatattgaaattgcttcaaagatagttggcttcgatagcgacagtgatgaatctcttgatgataaatatatgaaacttcactgtgacatcaccccgctggctcacgatagtgaagattacaagttaattgagcagtatctcctcaacacacatgctcctactcacaaggactggtcgctggaactggaggaagttttttcacttgatcgagatggagaacttaataagtactcaagatataaaaataatctgcataacaagatgctattatggcacggttcaaggttgacgaattttgtgggaattcttagtcaagggctaagaattgcacctcctgaggcacctgttactggctatatgttcggcaaaggcctctactttgcagatctagtaagcaagagcgcacaatactgttatgtggataggaataatcctgtaggtttgatgcttctttctgaggttgctttaggagacatgtatgaactaaagaaagccacgtccatggacaaacctccaagagggaagcattcgaccaagggattaggcaaaaccgtgccactggagtcagagtttgtgaagtggagggatgatgtcgtagttccctgcggcaagccggtgccatcatcaattaggagctctgaactcatgtacaatgagtacatcgtctacaacacatcccaggtgaagatgcagttcttgctgaaggtgcgtttccatcacaagaggtagctgggagactaggcaagtagagttggaaggtagagaagcagagttaggcgatgcctcttttggtattattagtaagcctggcatgtatttatgggtgctcgcgcttgatccattttggtaagtgttgcttgggcatcagcgcgaatagcaccaatcacacacttttacctaatgacgttttactgtataaatctaccaggagtgagtaatttatatattagcgggactggacctcttggtcgcgtgctatttt

SEQ ID NO: 21400 - DNA, 1511 bp, Zea Mays
ctgtctctaggtttcaatttttttgggtgggggttcaaattaattgtggtttcacacatttttctaatgccatgtttgaacagatctcatgtatattggatttgtgttccagctccaaatacttgtcaagaacagaaatcactgcaataagttgtgagtagtaaaaaaaagggacaatgcttaagttgcatgaaaactagatgagtataggtgaagcaatgcatgtgttagatgctactagttgctatgctaacctattgaaatagatttcaatggggtcacctttttgggagtttctttttctttgtttgcctaaatacctagtagatataattctttatggttgactgtagcctcattgtttttgactagtagattaagatgtatgatccagcatgtttctgcatctaaacatttgtatcatttcaagtgattgaacaatcgtagctttattgcttatttcagtatgtggtgcttctctgatgatagcatcgaaatattgatgaggcaatcgcttcctgaagttgatatgttatatcatcaacacttcttccaaagtcaaaccagccacggctttctaacctcttgtaatatgttttctgccttctcaggcaagttcacgctcggagaaaagacaagccaaagtcctggagaaggtaagaaggcggatgagccaagatgattccagaaagggtggctcatggagtgacatctggggagcaccaacaagatacgagaagaacggtacatcccattactaaaggagacatttatgttcccacaaagcttgggcattttaggtggaaaacctggtacatcaacatacattgctggggtacaggatgatagggctctctacctagatccccatgaagttcagatggtaaacctgcatacattttatatttacttagcatgcatatgcatctatttcataaacgttgtatagttttctaccttgtaacttaagttgagcaccatacttaagaagtatcaaaatcatcaagtttcaagtttgaactgagttccattctcttattcaaagataacagtggcatgtctattctgcagcaattcctattccataagccactagaatctggttatttttgttggagtgaagtgcattgtgagttcctaaaattcgttaggttgtgccattggagtccctgaacttggcagctgaagattcaggggagaaggataaagatgagaatggcgatgaagcgccatcgaaagtattggcaaatattaagtggcctaaaacactcgagactgattttatctacagtgctttatcatttgggacttcaattaatccacagttcattgcaagctttgcttctgctgctggtaaacgtcctcatcaagatttcgactctcaagaatctgatccagagtggggttggtggacagcaaaccatgagctgaagaagccatcaattagtctgttgtttccaacaatcatcctcctcagccgccaccatcaacagcagcagcagcgatgctaa

SEQ ID NO: 21401 - DNA, 1343 bp, Zea Mays
cggggctcaagcgctcctccgacggccacaacatcacatgaacagggcgccaaaacctctccgacagccatgacgcccggagggaggcggagccttccccgggtctcgaagatggcggcgccgccggcgagggcccgggccgactacgactacctcatcaagctgctcctcatcggcgatagcggtgttgggaaaagttgtctccttttgcggttctcagatggctctttcaccactagctttatcaccaccattgggtaagcactgctagtgtcgaaaatcagttagttttgaatggatcattattttcaaatgaatgctgctattagaaaaaaaggcagacccagtgccagaggctcccacatgagtggggtctggggaagagataaactgagacaagcctcccctcacaaatgcggagaggttgcttccagtcctcgacctggtgactcagtgggacagctctcatcactgcatcaggcctgccctttagaatgctactattagaatatttctaaaatagtttatattttatctttaaaaaggattgacttcaaaataagaacagttgagcttgatggtaagcgcgtaaagttacagatatgggatactgctggtcaagagcggtttcgaactattacaaccgcctactacaggggtgcaatgggaattttgcttgtctatgatgttactgatgagtcatctttcaataatataagaaactggattaggaacatagagcaacatgcttccgacaatgtgaataaaattttggtaggcaacaaagctgacatggatgaaagcaaacgggctgtgccaacttcaagagggcaggctcttgctgatgagtatggcatcaaattttttgaaacgagtgcgaagacgaacctgaatgtggagcaggttttcttctccatagcaagagatatcaagcaaaggcttgctgaatctgattcaaagccagaggatcgcacgatcagtatcaacagacctgagggtggtgaggcttcagcgtcacaaaaatcagcttgctgcggatcgtgacggggttacattgtcacaaggaagataaatagtgcgataccatactttgtaatttacccttctacgtaccttttatctggctgtcatcgttctcgtctagcttttaaatgcaattgcttggattcaggtttctgtgttgtaatgtgaacaattttagttgtacccctggtagaaatgcatgtgctcataagtcattgcaccttgttttgatggaaatgcttgcaaaatcgttcacagtttaggcgcggccgtactacctgttgttttactacatttagactgactagcagactgtatat

SEQ ID NO: 21402 - DNA, 1211 bp, Zea Mays
cggggctcaagcgctcctccgacggccacaacatcacatgaacagggcgccaaaacctctccgacagccatgacgcccggagggaggcggagccttccccgggtctcgaagatggcggcgccgccggcgagggcccgggccgactacgactacctcatcaagctgctcctcatcggcgatagcggcatgtttgagagctatctaaggtaggtcaaataagtagtggcctattctagggcaaggcagcagtgagcacactcaaacagtcgtactcaactcttcatcgggctattactgaaaacgagaaggccaaccctcaagaatttgatatttaggcatggtgttgggaaaagttgtctccttttgcggttctcagatggctctttcaccactagctttatcaccaccattgggattgacttcaaaataagaacagttgagcttgatggtaagcgcgtaaagttacagatatgggatactgctggtcaagagcggtttcgaactattacaaccgcctactacaggggtgcaatgggaattttgcttgtctatgatgttactgatgagtcatctttcaataatataagaaactggattaggaacatagagcaacatgcttccgacaatgtgaataaaattttggtaggcaacaaagctgacatggatgaaagcaaacgggctgtgccaacttcaagagggcaggctcttgctgatgagtatggcatcaaattttttgaaacgagtgcgaagacgaacctgaatgtggagcaggttttcttctccatagcaagagatatcaagcaaaggcttgctgaatctgattcaaagccagaggatcgcacgatcagtatcaacagacctgagggtggtgaggcttcagcgtcacaaaaatcagcttgctgcggatcgtgacggggttacattgtcacaaggaagataaatagtgcgataccatactttgtaatttacccttctacgtaccttttatctggctgtcatcgttctcgtctagcttttaaatgcaattgcttggattcaggtttctgtgttgtaatgtgaacaattttagttgtacccctggtagaaatgcatgtgctcataagtcattgcaccttgttttgatggaaatgcttgcaaaatcgttcacagtttaggcgcggccgtactacctgttgttttactacatttagactgactagcagactgtatat

SEQ ID NO: 21403 - DNA, 896 bp, Zea Mays
cttgaattggtgtcaaacatcccaggtgttgggaaaagttgtctccttttgcggttctcagatggctctttcaccactagctttatcaccaccattgggattgacttcaaaataagaacagttgagcttgatggtaagcgcgtaaagttacagatatgggatactgctggtcaagagcggtttcgaactattacaaccgcctactacaggggtgcaatgggaattttgcttgtctatgatgttactgatgagtcatctttcaataatataagaaactggattaggaacatagagcaacatgcttccgacaatgtgaataaaattttggtaggcaacaaagctgacatggatgaaagcaaacgggctgtgccaacttcaagagggcaggctcttgctgatgagtatggcatcaaattttttgaaacgagtgcgaagacgaacctgaatgtggagcaggttttcttctccatagcaagagatatcaagcaaaggcttgctgaatctgattcaaagccagaggatcgcacgatcagtatcaacagacctgagggtggtgaggcttcagcgtcacaaaaatcagcttgctgcggatcgtgacggggttacattgtcacaaggaagataaatagtgcgataccatactttgtaatttacccttctacgtaccttttatctggctgtcatcgttctcgtctagcttttaaatgcaattgcttggattcaggtttctgtgttgtaatgtgaacaattttagttgtacccctggtagaaatgcatgtgctcataagtcattgcaccttgttttgatggaaatgcttgcaaaatcgttcacagtttaggcgcggccgtactacctgttgttttactacatttagactgactagcagactgtatat

SEQ ID NO: 21404 - DNA, 567 bp, Zea Mays
cacgcatgcattcctgtgctgccacaattcccaggctgtgccaacttcaagagggcaggctcttgctgatgagtatggcatcaaattttttgaaacgagtgcgaagacgaacctgaatgtggagcaggttttcttctccatagcaagagatatcaagcaaaggcttgctgaatctgattcaaagccagaggatcgcacgatcagtatcaacagacctgagggtggtgaggcttcagcgtcacaaaaatcagcttgctgcggatcgtgacggggttacattgtcacaaggaagataaatagtgcgataccatactttgtaatttacccttctacgtaccttttatctggctgtcatcgttctcgtctagcttttaaatgcaattgcttggattcaggtttctgtgttgtaatgtgaacaattttagttgtacccctggtagaaatgcatgtgctcataagtcattgcaccttgttttgatggaaatgcttgcaaaatcgttcacagtttaggcgcggccgtactacctgttgttttactacatttagactgactagcagactgtatat

SEQ ID NO: 21405 - DNA, 1013 bp, Zea Mays
ggcaaaacaagataaacatcaaccccaaccccaacgactccaactccaagtcaaagagagcagcaagagcacgtgccggccgccgatcaaatccaccgagcaatcgcgcgcggccgccgaggtgccaaggcggcggcggtcggtcggtctgcgatatacgatggcggcgccttactacggaggtcctccggcggcgccggcccccgtggcggtggtgtccccgcagttctgtgcgccgtacgtggtgcccctgacggtgaccaagaaggccatcagcctctccgacggcgacttcaccgtcaccgacgccaacggcgccaccgtgctgcaggtcaagggcgccgtcttcagtatccgccaccgccgcgtcctcctcgacgccgccggccagcccatcctcaccatgctggagaagatgggaggtgttcagaggggacagctcgaacgagagcgacctgctcttcaccgcgaagaaatcctcgatattccagctgaagacggagatggacatcttcctggcctccaacaccgcgcagcaggtgtgcgacttcaagatcaagggcagctacttcgagaggtcgtgcgccttctacctcggcaactccagcagcatgatcgcccagatgaaccgccagtttaccgtcaccaatgtgctgcttggaagggacacgtttggcgtcactgtgttcccgcacgttgactacgtgttcgtcgctgctcttgttgtgatactggatgagattcatagggaacggtccgactgaggaacataccacaccacaccaccaagcttctccaccgttgctcgaccatgctatgctatgtatcatcatcacaggttattcttgtcaattatatactttccatgtatgtatatgtaagtattaatgagttaatacactatctcctgatgtataagtttttcttcatccatttgaatatagacataaaaatcaaatgactattattttgggatgaaatgagtactatttagtgtcgattcaagccacaaa

SEQ ID NO: 21406 - DNA, 1012 bp, Zea Mays
aaacatcaaccccaaccccaacgactccaactccaagtcaaagagagcagcaagagcacgtgccggccgccgatcaaatccaccgagcaatcgcgcgcggccgccgaggtgccaaggcggcggcggtcggtcggtctgcgatatacgatggcggcgccttactacggaggtcctccggcggcgccggcccccgtggcggtggtgtccccgcagttctgtgcgccgtacgtggtgcccctgacggtgaccaagaaggccatcagcctctccgacggcgacttcaccgtcaccgacgccaacggcgccaccgtgctgcaggtcaagggcgccgtcttcagtatccgccaccgccgcgtcctcctcgacgccgccggccagcccatcctcaccatgctggagaagcatgcacaacagatgggaggtgttcagaggggacagctcgaacgagagcgacctgctcttcaccgcgaagaaatcctcgatattccagctgaagacggagatggacatcttcctggcctccaacaccgcgcagcaggtgtgcgacttcaagatcaagggcagctacttcgagaggtcgtgcgccttctacctcggcaactccagcagcatgatcgcccagatgaaccgccagtttaccgtcaccaatgtgctgcttggaagggacacgtttggcgtcactgtgttcccgcacgttgactacgtgttcgtcgctgctcttgttgtgatactggatgagattcatagggaacggtccgactgaggaacataccacaccacaccaccaagcttctccaccgttgctcgaccatgctatgctatgtatcatcatcacaggttattcttgtcaattatatactttccatgtatgtatatgtaagtattaatgagttaatacactatctcctgatgtataagtttttcttcatccatttgaatatagacataaaaatcaaatgactattattttgggatgaaatgagtactatttagtgtcgattcaagccacaaa

SEQ ID NO: 21407 - DNA, 2116 bp, Zea Mays
cttcactgtaggcgtccacaggcttggttctgccatcgcgctccgtccgcgatcccctccccgcgcccgatcctccacgctcgatcctcgaatcccgcggcttccttcgatggcacgaccccatccatctcgccagtgtccgtggtcccctccccgcgctccccaccacgacgacacgaccccatccatctcgctgctgtccacgcccagtcgcgcctcccacgatcacgcccacggacgcaacctccctccctccccgtccccgttcatgtcgcccccgtccgtgatcccctccccgccctcctctccgcgaccccatccatcctgtcgccgtccacgcccagcagcgctcaaaagcaaaaaagggtacgaatacgaatcccaatccagggccggagggcgagcgaactcaaaagcaagctgttccagtccaatccgccccagtccaaatctaatcgccgggtttaggcagaaggggtgggacgcggcgaggtttaggcggggtttgttttgtccctttcgtgcgattctgctctccgcgcgggaggcaagtactgacggaagcgaagaccaaggcggaggagggggtccccggcggtggaagtggaacgcgccgatgcgcaagtttcaggactccatcaaggccctccaggccgacatcgatcatgccaatgcgatggtgtcggaattcttgagggactacgatggctcggtcatccagatgcgggtggcgtacagcgccgtcgcgcatttcctcctgcagtggaccgactgcaagctcgccggcgcgctcggcctcctcaaggttatgctatacaaggtgtgcgcggacggctcgtcggcgcttcctgattgggacatggaggccagcatcagggagttttacggcgtcattttcccgttgttgctgcagcttccgagtggcatcaccgagctggacgacaggaagcagaggaagctctgcctcaagaaattcaggagcagggatgagcagctctgggaggtggacacggagagggagcttgagtgtgggatctgcctcgaggttagccccaaggtcgtgctgcccaactgtgcccacatgctctgcatgcggtgctttgaggattggaaatgacacctactctactccgcagcttaaaacctcaagatatgtcggtaatcaaacaagtacaagtttcaaggaaatgggaatttcatggaaatacagacattgggtccatattacacattgatatgattttggctgacaaagaggttgtcggtttggagcctttttagtgtcagatggtctgtctctatatctctattcatttcactgcagcgctgtctgaggtgcgtggtcaagtcgaggcgaagatgagcaaggaggatgtgctcaaggtgcaggtcttggattcaacatagtactagcagtttggaatcacccgacggggatgctttccatgtaataaatatttttggaacgtttcggatttaacttatgttgtttctattgcaatcaacatggtgtcactatttggattcaccagtaagaatatttgccatttgggcttgttaattagggtgaaattttatataaaacatgcctcgttcacttgctttccagttcttgatttcagatctctgaagccaattacgtacacattttcctaccacgacttttattctgctttccgtttctcaacgtcttggacattgccggcgagcgcggtctcctcgacaacttctactgctaactcgggtgcaaggtaagatgcccagcaaacttcccaatccagctgccggcaaggagatgaggttcccgacggcgacaattttccactacacaaccggattcttcagcagcatatggatccgttgaagcgccgtgtgacaatgccaccaaagagcagcaacaaacaagctcaaagtctccgctaaccactaatctcataaagcttgaattttctcattgctatgtttccttctcctagcaaagttaagatgtttgcacatttctagcttattaggtccttgtgtggaatgtgtttgaacaatgatctcatttaaacaatatcaacatgtgtgatatataaaaaccgtagcaacgcacgggcacatacctagtaaataa

SEQ ID NO: 21408 - DNA, 2293 bp, Zea Mays
cttcactgtaggcgtccacaggcttggttctgccatcgcgctccgtccgcgatcccctccccgcgcccgatcctccacgctcgatcctcgaatcccgcggcttccttcgatggcacgaccccatccatctcgccagtgtccgtggtcccctccccgcgctccccaccacgacgacacgaccccatccatctcgctgctgtccacgcccagtcgcgcctcccacgatcacgcccacggacgcaacctccctccctccccgtccccgttcatgtcgcccccgtccgtgatcccctccccgccctcctctccgcgaccccatccatcctgtcgccgtccacgcccagcagcgctcaaaagcaaaaaagggtacgaatacgaatcccaatccagggccggagggcgagcgaactcaaaagcaagctgttccagtccaatccgccccagtccaaatctaatcgccgggtttaggcagaaggggtgggacgcggcgaggtttaggcggggtttgttttgtccctttcgtgcgattctgctctccgcgcgggaggcaagtactgacggaagcgaagaccaaggcggaggagggggtccccggcggtggaagtggaacgcgccgatgcgcaagtttcaggactccatcaaggccctccaggccgacatcgatcatgccaatgcgatagcagggtgtcggaattcttgagggactacgatggctcggtcatccagatgcgggtggcgtacagcgccgtcgcgcatttcctcctgcagtggaccgactgcaagctcgccggcgcgctcggcctcctcaaggttatgctatacaaggtgtgcgcggacggctcgtcggcgcttcctgattgggacatggaggccagcatcagggagttttacggcgtcattttcccgttgttgctgcagcttccgagtggcatcaccgagctggacgacaggaagcagaggaagctctgcctcaagaaattcaggagcagggatgagcagctctgggaggtggacacggagagggagcttgagtgtgggatctgcctcgaggaaatgacacctactctactccgcagcttaaaacctcaagatatgtcggtaatcaaacaagtacaagtttcaaggaaatgggaatttcatggaaatacagacattgggtccatattacacattgatatgattttggctgacaaagagcgctgtctgaggtgcgtggtcaagtcgaggcgaagatgagcaaggaggatgtgctcaaggtgcagttcttgatttcagatctctgaagccaattacgtacacattttcctaccacgacttttattctgctttccgtttctcaacgtcttggacattgccggcgagcgcggtctcctcgacaacttctactgctaactcgggtgcaaggtaaggtacaaatatttcatatagttctctacactttgagattgttgtaaggatattttaaatgtggtacttatatttcattcagttctatactttgattttggtgtagagatttagttatgtagaattttgcttgaagttggtctgtttttaccgatagaccaacatcaagttgtgtgaaattgtaagacagtaaggttcatccatgaattagtataccatggaatgatctacaacacttgtgtctgaatacaacaaaaatcatagaaattgtgtctgaatattctgtgttgctcgttacattgagtctggtagtcgttgttccactatatgttctggtagtcgatgttcctatgtacccatctggtaatcgctttcagtccgtctaaacacaagtctttttaagtcttgttctctatagattattgttgaatatagttgatgcttgtttatctcatatagtgtgacatgtgttgctatatgtgactacatggtgccttttaatttgttcatcagttgctatatgcagatgcccagcaaacttcccaatccagctgccggcaaggagatgaggttcccgacggcgacaattttccactacacaaccggattcttcagcagcatatggatccgttgaagcgccgtgtgacaatgccaccaaagagcagcaacaaacaagctcaaagtctccgctaaccactaatctcataaagcttgaattttctcattgctatgtttccttctcctagcaaagttaagatgtttgcacatttctagcttattaggtccttgtgtggaatgtgtttgaacaatgatctcatttaaacaatatcaacatgtgtgatatataaaaaccgtagcaacgcacgggcacatacctagtaaataa

SEQ ID NO: 21409 - DNA, 2124 bp, Zea Mays
cttcactgtaggcgtccacaggcttggttctgccatcgcgctccgtccgcgatcccctccccgcgcccgatcctccacgctcgatcctcgaatcccgcggcttccttcgatggcacgaccccatccatctcgccagtgtccgtggtcccctccccgcgctccccaccacgacgacacgaccccatccatctcgctgctgtccacgcccagtcgcgcctcccacgatcacgcccacggacgcaacctccctccctccccgtccccgttcatgtcgcccccgtccgtgatcccctccccgccctcctctccgcgaccccatccatcctgtcgccgtccacgcccagcagcgctcaaaagcaaaaaagggtacgaatacgaatcccaatccagggccggagggcgagcgaactcaaaagcaagctgttccagtccaatccgccccagtccaaatctaatcgccgggtttaggcagaaggggtgggacgcggcgaggtttaggcggggtttgttttgtccctttcgtgcgattctgctctccgcgcgggaggcaagtactgacggaagcgaagaccaaggcggaggagggggtccccggcggtggaagtggaacgcgccgatgcgcaagtttcaggactccatcaaggccctccaggccgacatcgatcatgccaatgcgatggtgtcggaattcttgagggactacgatggctcggtcatccagatgcgggtggcgtacagcgccgtcgcgcatttcctcctgcagtggaccgactgcaagctcgccggcgcgctcggcctcctcaaggttatgctatacaaggtgtgcgcggacggctcgtcggcgcttcctgattgggacatggaggccagcatcagggagttttacggcgtcattttcccgttgttgctgcagcttccgagtggcatcaccgagctggacgacaggaagcagaggaagctctgcctcaagaaattcaggagcagggatgagcagctctgggaggtggacacggagagggagcttgagtgtgggatctgcctcgaggttagccccaaggtcgtgctgcccaactgtgcccacatgctctgcatgcggtgctttgaggattggaaatgacacctactctactccgcagcttaaaacctcaagatatgtcggtaatcaaacaagtacaagtttcaaggaaatgggaatttcatggaaatacagacattgggtccatattacacattgatatgattttggctgacaaagaggttgtcggtttggagcctttttagtgtcagatggtctgtctctatatctctattcatttcactgcagcgctgtctgaggtgcgtggtcaagtcgaggcgaagatgagcaaggaggatgtgctcaaggtgcaggtcttggattcaacatagtactagcagtttggaatcacccgacggggatgctttccatgtaataaatatttttggaacgtttcggatttaacttatgttgtttctattgcaatcaacatggtgtcactatttggattcaccagtaagaatatttgccatttgggcttgttaattagggtgaaattttatataaaacatgcctcgttcacttgctttccagttcttgatttcagatctctgaagccaattacgtacacattttcctaccacgacttttattctgctttccgtttctcaacgtcttggacattgccggcgagcgcggtctcctcgacaacttctactgctaactcgggtgcaagttgctatatgcagatgcccagcaaacttcccaatccagctgccggcaaggagatgaggttcccgacggcgacaattttccactacacaaccggattcttcagcagcatatggatccgttgaagcgccgtgtgacaatgccaccaaagagcagcaacaaacaagctcaaagtctccgctaaccactaatctcataaagcttgaattttctcattgctatgtttccttctcctagcaaagttaagatgtttgcacatttctagcttattaggtccttgtgtggaatgtgtttgaacaatgatctcatttaaacaatatcaacatgtgtgatatataaaaaccgtagcaacgcacgggcacatacctagtaaataa

SEQ ID NO: 21410 - DNA, 2062 bp, Zea Mays
cttcactgtaggcgtccacaggcttggttctgccatcgcgctccgtccgcgatcccctccccgcgcccgatcctccacgctcgatcctcgaatcccgcggcttccttcgatggcacgaccccatccatctcgccagtgtccgtggtcccctccccgcgctccccaccacgacgacacgaccccatccatctcgctgctgtccacgcccagtcgcgcctcccacgatcacgcccacggacgcaacctccctccctccccgtccccgttcatgtcgcccccgtccgtgatcccctccccgccctcctctccgcgaccccatccatcctgtcgccgtccacgcccagcagcgctcaaaagcaaaaaagggtacgaatacgaatcccaatccagggccggagggcgagcgaactcaaaagcaagctgttccagtccaatccgccccagtccaaatctaatcgccgggtttaggcagaaggggtgggacgcggcgaggtttaggcggggtttgttttgtccctttcgtgcgattctgctctccgcgcgggaggcaagtactgacggaagcgaagaccaaggcggaggagggggtccccggcggtggaagtggaacgcgccgatgcgcaagtttcaggactccatcaaggccctccaggccgacatcgatcatgccaatgcgatagcagggtgtcggaattcttgagggactacgatggctcggtcatccagatgcgggtggcgtacagcgccgtcgcgcatttcctcctgcagtggaccgactgcaagctcgccggcgcgctcggcctcctcaaggttatgctatacaaggtgtgcgcggacggctcgtcggcgcttcctgattgggacatggaggccagcatcagggagttttacggcgtcattttcccgttgttgctgcagcttccgagtggcatcaccgagctggacgacaggaagcagaggaagctctgcctcaagaaattcaggagcagggatgagcagctctgggaggtggacacggagagggagcttgagtgtgggatctgcctcgaggttagccccaaggtcgtgctgcccaactgtgcccacatgctctgcatgcggtgctttgaggattggaaatgacacctactctactccgcagcttaaaacctcaagatatgtcggtaatcaaacaagtacaagtttcaaggaaatgggaatttcatggaaatacagacattgggtccatattacacattgatatgattttggctgacaaagagcgctgtctgaggtgcgtggtcaagtcgaggcgaagatgagcaaggaggatgtgctcaaggtgcaggtcttggattcaacatagtactagcagtttggaatcacccgacggggatgctttccatgtaataaatatttttggaacgtttcggatttaacttatgttgtttctattgcaatcaacatggtgtcactatttggattcaccagtaagaatatttgccatttgggcttgttaattagggtgaaattttatataaaacatgcctcgttcacttgctttccagttcttgatttcagatctctgaagccaattacgtacacattttcctaccacgacttttattctgctttccgtttctcaacgtcttggacattgccggcgagcgcggtctcctcgacaacttctactgctaactcgggtgcaagttgctatatgcagatgcccagcaaacttcccaatccagctgccggcaaggagatgaggttcccgacggcgacaattttccactacacaaccggattcttcagcagcatatggatccgttgaagcgccgtgtgacaatgccaccaaagagcagcaacaaacaagctcaaagtctccgctaaccactaatctcataaagcttgaattttctcattgctatgtttccttctcctagcaaagttaagatgtttgcacatttctagcttattaggtccttgtgtggaatgtgtttgaacaatgatctcatttaaacaatatcaacatgtgtgatatataaaaaccgtagcaacgcacgggcacatacctagtaaataa

SEQ ID NO: 21411 - DNA, 1966 bp, Zea Mays
cttcactgtaggcgtccacaggcttggttctgccatcgcgctccgtccgcgatcccctccccgcgcccgatcctccacgctcgatcctcgaatcccgcggcttccttcgatggcacgaccccatccatctcgccagtgtccgtggtcccctccccgcgctccccaccacgacgacacgaccccatccatctcgctgctgtccacgcccagtcgcgcctcccacgatcacgcccacggacgcaacctccctccctccccgtccccgttcatgtcgcccccgtccgtgatcccctccccgccctcctctccgcgaccccatccatcctgtcgccgtccacgcccagcagcgctcaaaagcaaaaaagggtacgaatacgaatcccaatccagggccggagggcgagcgaactcaaaagcaagctgttccagtccaatccgccccagtccaaatctaatcgccgggtttaggcagaaggggtgggacgcggcgaggtttaggcggggtttgttttgtccctttcgtgcgattctgctctccgcgcgggaggcaagtactgacggaagcgaagaccaaggcggaggagggggtccccggcggtggaagtggaacgcgccgatgcgcaagtttcaggactccatcaaggccctccaggccgacatcgatcatgccaatgcgatagcagggtgtcggaattcttgagggactacgatggctcggtcatccagatgcgggtggcgtacagcgccgtcgcgcatttcctcctgcagtggaccgactgcaagctcgccggcgcgctcggcctcctcaaggttatgctatacaaggtgtgcgcggacggctcgtcggcgcttcctgattgggacatggaggccagcatcagggagttttacgcttccgagtggcatcaccgagctggacgacaggaagcagaggaagctctgcctcaagaaattcaggagcagggatgagcagctctgggaggtggacacggagagggagcttgagtgtgggatctgcctcgaggttagcccgaaatgacacctactctactccgcagcttaaaacctcaagatatgtcggtaatcaaacaagtacaagtttcaaggaaatgggaatttcatggaaatacagacattgggtccatattacacattgatatgattttggctgacaaagagcgctgtctgaggtgcgtggtcaagtcgaggcgaagatgagcaaggaggatgtgctcaaggtgcaggtcttggattcaacatagtactagcagtttggaatcacccgacggggatgctttccatgtaataaatatttttggaacgtttcggatttaacttatgttgtttctattgcaatcaacatggtgtcactatttggattcaccagtaagaatatttgccatttgggcttgttaattagggtgaaattttatataaaacatgcctcgttcacttgctttccagttcttgatttcagatctctgaagccaattacgtacacattttcctaccacgacttttattctgctttccgtttctcaacgtcttggacattgccggcgagcgcggtctcctcgacaacttctactgctaactcgggtgcaagatgcccagcaaacttcccaatccagctgccggcaaggagatgaggttcccgacggcgacaattttccactacacaaccggattcttcagcagcatatggatccgttgaagcgccgtgtgacaatgccaccaaagagcagcaacaaacaagctcaaagtctccgctaaccactaatctcataaagcttgaattttctcattgctatgtttccttctcctagcaaagttaagatgtttgcacatttctagcttattaggtccttgtgtggaatgtgtttgaacaatgatctcatttaaacaatatcaacatgtgtgatatataaaaaccgtagcaacgcacgggcacatacctagtaaataa

SEQ ID NO: 21412 - DNA, 1821 bp, Zea Mays
cttcactgtaggcgtccacaggcttggttctgccatcgcgctccgtccgcgatcccctccccgcgcccgatcctccacgctcgatcctcgaatcccgcggcttccttcgatggcacgaccccatccatctcgccagtgtccgtggtcccctccccgcgctccccaccacgacgacacgaccccatccatctcgctgctgtccacgcccagtcgcgcctcccacgatcacgcccacggacgcaacctccctccctccccgtccccgttcatgtcgcccccgtccgtgatcccctccccgccctcctctccgcgaccccatccatcctgtcgccgtccacgcccagcagcgctcaaaagcaaaaaagggtacgaatacgaatcccaatccagggccggagggcgagcgaactcaaaagcaagctgttccagtccaatccgccccagtccaaatctaatcgccgggtttaggcagaaggggtgggacgcggcgaggtttaggcggggtttgttttgtccctttcgtgcgattctgctctccgcgcgggaggcaagtactgacggaagcgaagaccaaggcggaggagggggtccccggcggtggaagtggaacgcgccgatgcgcaagtttcaggactccatcaaggccctccaggccgacatcgatcatgccaatgcgatagcagggtgtcggaattcttgagggactacgatggctcggtcatccagatgcgggtggcgtacagcgccgtcgcgcatttcctcctgcagtggaccgactgcaagctcgccggcgcgctcggcctcctcaaggttatgctatacaaggtgtgcgcggacggctcgtcggcgcttcctgattgggacatggaggccagcatcagggagttttacggcgtcattttcccgttgttgctgcagcttccgagtggcatcaccgagctggacgacaggaagcagaggaagctctgcctcaagaaattcaggagcagggatgagcagctctgggaggtggacacggagagggagcttgagtgtgggatctgcctcgaggttagccccaaggtcgtgctgcccaactgtgcccacatgctctgcatgcggtgctttgaggattggaaatgacacctactctactccgcagcttaaaacctcaagatatgtcggtaatcaaacaagtacaagtttcaaggaaatgggaatttcatggaaatacagacattgggtccatattacacattgatatgattttggctgacaaagagcgctgtctgaggtgcgtggtcaagtcgaggcgaagatgagcaaggaggatgtgctcaaggtgcagatctctgaagccaattacgtacacattttcctaccacgacttttattctgctttccgtttctcaacgtcttggacattgccggcgagcgcggtctcctcgacaacttctactgctaactcgggtgcaaggtaagatgcccagcaaacttcccaatccagctgccggcaaggagatgaggttcccgacggcgacaattttccactacacaaccggattcttcagcagcatatggatccgttgaagcgccgtgtgacaatgccaccaaagagcagcaacaaacaagctcaaagtctccgctaaccactaatctcataaagcttgaattttctcattgctatgtttccttctcctagcaaagttaagatgtttgcacatttctagcttattaggtccttgtgtggaatgtgtttgaacaatgatctcatttaaacaatatcaacatgtgtgatatataaaaaccgtagcaacgcacgggcacatacctagtaaataa

SEQ ID NO: 21413 - DNA, 1834 bp, Zea Mays
cttcactgtaggcgtccacaggcttggttctgccatcgcgctccgtccgcgatcccctccccgcgcccgatcctccacgctcgatcctcgaatcccgcggcttccttcgatggcacgaccccatccatctcgccagtgtccgtggtcccctccccgcgctccccaccacgacgacacgaccccatccatctcgctgctgtccacgcccagtcgcgcctcccacgatcacgcccacggacgcaacctccctccctccccgtccccgttcatgtcgcccccgtccgtgatcccctccccgccctcctctccgcgaccccatccatcctgtcgccgtccacgcccagcagcgctcaaaagcaaaaaagggtacgaatacgaatcccaatccagggccggagggcgagcgaactcaaaagcaagctgttccagtccaatccgccccagtccaaatctaatcgccgggtttaggcagaaggggtgggacgcggcgaggtttaggcggggtttgttttgtccctttcgtgcgattctgctctccgcgcgggaggcaagtactgacggaagcgaagaccaaggcggaggagggggtccccggcggtggaagtggaacgcgccgatgcgcaagtttcaggactccatcaaggccctccaggccgacatcgatcatgccaatgcgatagcagggtgtcggaattcttgagggactacgatggctcggtcatccagatgcgggtggcgtacagcgccgtcgcgcatttcctcctgcagtggaccgactgcaagctcgccggcgcgctcggcctcctcaaggttatgctatacaaggtgtgcgcggacggctcgtcggcgcttcctgattgggacatggaggccagcatcagggagttttacggcgtcattttcccgttgttgctgcagcttccgagtggcatcaccgagctggacgacaggaagcagaggaagctctgcctcaagaaattcaggagcagggatgagcagctctgggaggtggacacggagagggagcttgagtgtgggatctgcctcgaggttagccccaaggtcgtgctgcccaactgtgcccacatgctctgcatgcggtgctttgaggattggaaatgacacctactctactccgcagcttaaaacctcaagatatgtcggtaatcaaacaagtacaagtttcaaggaaatgggaatttcatggaaatacagacattgggtccatattacacattgatatgattttggctgacaaagagcgctgtctgaggtgcgtggtcaagtcgaggcgaagatgagcaaggaggatgtgctcaaggtgcagttcttgatttcagatctctgaagccaattacgtacacattttcctaccacgacttttattctgctttccgtttctcaacgtcttggacattgccggcgagcgcggtctcctcgacaacttctactgctaactcgggtgcaaggtaagatgcccagcaaacttcccaatccagctgccggcaaggagatgaggttcccgacggcgacaattttccactacacaaccggattcttcagcagcatatggatccgttgaagcgccgtgtgacaatgccaccaaagagcagcaacaaacaagctcaaagtctccgctaaccactaatctcataaagcttgaattttctcattgctatgtttccttctcctagcaaagttaagatgtttgcacatttctagcttattaggtccttgtgtggaatgtgtttgaacaatgatctcatttaaacaatatcaacatgtgtgatatataaaaaccgtagcaacgcacgggcacatacctagtaaataa

SEQ ID NO: 21414 - DNA, 1991 bp, Zea Mays
cttcactgtaggcgtccacaggcttggttctgccatcgcgctccgtccgcgatcccctccccgcgcccgatcctccacgctcgatcctcgaatcccgcggcttccttcgatggcacgaccccatccatctcgccagtgtccgtggtcccctccccgcgctccccaccacgacgacacgaccccatccatctcgctgctgtccacgcccagtcgcgcctcccacgatcacgcccacggacgcaacctccctccctccccgtccccgttcatgtcgcccccgtccgtgatcccctccccgccctcctctccgcgaccccatccatcctgtcgccgtccacgcccagcagcgctcaaaagcaaaaaagggtacgaatacgaatcccaatccagggccggagggcgagcgaactcaaaagcaagctgttccagtccaatccgccccagtccaaatctaatcgccgggtttaggcagaaggggtgggacgcggcgaggtttaggcggggtttgttttgtccctttcgtgcgattctgctctccgcgcgggaggcaagtactgacggaagcgaagaccaaggcggaggagggggtccccggcggtggaagtggaacgcgccgatgcgcaagtttcaggactccatcaaggccctccaggccgacatcgatcatgccaatgcgatggtgtcggaattcttgagggactacgatggctcggtcatccagatgcgggtggcgtacagcgccgtcgcgcatttcctcctgcagtggaccgactgcaagctcgccggcgcgctcggcctcctcaaggttatgctatacaaggtgtgcgcggacggctcgtcggcgcttcctgattgggacatggaggccagcatcagggagttttacggcgtcattttcccgttgttgctgcagcttccgagtggcatcaccgagctggacgacaggaagcagaggaagctctgcctcaagaaattcaggagcagggatgagcagctctgggaggtggacacggagagggagcttgagtgtgggatctgcctcgaggttagccccaaggaaatgacacctactctactccgcagcttaaaacctcaagatatgtcggtaatcaaacaagtacaagtttcaaggaaatgggaatttcatggaaatacagacattgggtccatattacacattgatatgattttggctgacaaagagcgctgtctgaggtgcgtggtcaagtcgaggcgaagatgagcaaggaggatgtgctcaaggtgcaggtcttggattcaacatagtactagcagtttggaatcacccgacggggatgctttccatgtaataaatatttttggaacgtttcggatttaacttatgttgtttctattgcaatcaacatggtgtcactatttggattcaccagtaagaatatttgccatttgggcttgttaattagggtgaaattttatataaaacatgcctcgttcacttgctttccagttcttgatttcagatctctgaagccaattacgtacacattttcctaccacgacttttattctgctttccgtttctcaacgtcttggacattgccggcgagcgcggtctcctcgacaacttctactgctaactcgggtgcaagatgcccagcaaacttcccaatccagctgccggcaaggagatgaggttcccgacggcgacaattttccactacacaaccggattcttcagcagcatatggatccgttgaagcgccgtgtgacaatgccaccaaagagcagcaacaaacaagctcaaagtctccgctaaccactaatctcataaagcttgaattttctcattgctatgtttccttctcctagcaaagttaagatgtttgcacatttctagcttattaggtccttgtgtggaatgtgtttgaacaatgatctcatttaaacaatatcaacatgtgtgatatataaaaaccgtagcaacgcacgggcacatacctagtaaataa

SEQ ID NO: 21415 - DNA, 1896 bp, Zea Mays
cttcactgtaggcgtccacaggcttggttctgccatcgcgctccgtccgcgatcccctccccgcgcccgatcctccacgctcgatcctcgaatcccgcggcttccttcgatggcacgaccccatccatctcgccagtgtccgtggtcccctccccgcgctccccaccacgacgacacgaccccatccatctcgctgctgtccacgcccagtcgcgcctcccacgatcacgcccacggacgcaacctccctccctccccgtccccgttcatgtcgcccccgtccgtgatcccctccccgccctcctctccgcgaccccatccatcctgtcgccgtccacgcccagcagcgctcaaaagcaaaaaagggtacgaatacgaatcccaatccagggccggagggcgagcgaactcaaaagcaagctgttccagtccaatccgccccagtccaaatctaatcgccgggtttaggcagaaggggtgggacgcggcgaggtttaggcggggtttgttttgtccctttcgtgcgattctgctctccgcgcgggaggcaagtactgacggaagcgaagaccaaggcggaggagggggtccccggcggtggaagtggaacgcgccgatgcgcaagtttcaggactccatcaaggccctccaggccgacatcgatcatgccaatgcgatagcagggtgtcggaattcttgagggactacgatggctcggtcatccagatgcgggtggcgtacagcgccgtcgcgcatttcctcctgcagtggaccgactgcaagctcgccggcgcgctcggcctcctcaaggttatgctatacaaggtgtgcgcggacggctcgtcggcgcttcctgattgggacatggaggccagcatcagggagttttacggcgtcattttcccgttgttgctgcagcttccgagtggcatcaccgagctggacgacaggaagcagaggaagctctgcctcaagaaattcaggagcagggatgagcagctctgggaggtggacacggagagggagcttgagtgtgggatctgcctcgaggttagccccaaggtcgtgctgcccaactgtgcccacatgctctgcatgcggtgctttgaggattggaaatgacacctactctactccgcagcttaaaacctcaagatatgtcggtaatcaaacaagtacaagtttcaaggaaatgggaatttcatggaaatacagacattgggtccatattacacattgatatgattttggctgacaaagaggttgtcggtttggagcctttttagtgtcagatggtctgtctctatatctctattcatttcactgcagcgctgtctgaggtgcgtggtcaagtcgaggcgaagatgagcaaggaggatgtgctcaaggtgcagttcttgatttcagatctctgaagccaattacgtacacattttcctaccacgacttttattctgctttccgtttctcaacgtcttggacattgccggcgagcgcggtctcctcgacaacttctactgctaactcgggtgcaagatgcccagcaaacttcccaatccagctgccggcaaggagatgaggttcccgacggcgacaattttccactacacaaccggattcttcagcagcatatggatccgttgaagcgccgtgtgacaatgccaccaaagagcagcaacaaacaagctcaaagtctccgctaaccactaatctcataaagcttgaattttctcattgctatgtttccttctcctagcaaagttaagatgtttgcacatttctagcttattaggtccttgtgtggaatgtgtttgaacaatgatctcatttaaacaatatcaacatgtgtgatatataaaaaccgtagcaacgcacgggcacatacctagtaaataa

SEQ ID NO: 21416 - DNA, 2046 bp, Zea Mays
cttcactgtaggcgtccacaggcttggttctgccatcgcgctccgtccgcgatcccctccccgcgcccgatcctccacgctcgatcctcgaatcccgcggcttccttcgatggcacgaccccatccatctcgccagtgtccgtggtcccctccccgcgctccccaccacgacgacacgaccccatccatctcgctgctgtccacgcccagtcgcgcctcccacgatcacgcccacggacgcaacctccctccctccccgtccccgttcatgtcgcccccgtccgtgatcccctccccgccctcctctccgcgaccccatccatcctgtcgccgtccacgcccagcagcgctcaaaagcaaaaaagggtacgaatacgaatcccaatccagggccggagggcgagcgaactcaaaagcaagctgttccagtccaatccgccccagtccaaatctaatcgccgggtttaggcagaaggggtgggacgcggcgaggtttaggcggggtttgttttgtccctttcgtgcgattctgctctccgcgcgggaggcaagtactgacggaagcgaagaccaaggcggaggagggggtccccggcggtggaagtggaacgcgccgatgcgcaagtttcaggactccatcaaggccctccaggccgacatcgatcatgccaatgcgatggtgtcggaattcttgagggactacgatggctcggtcatccagatgcgggtggcgtacagcgccgtcgcgcatttcctcctgcagtggaccgactgcaagctcgccggcgcgctcggcctcctcaaggttatgctatacaaggtgtgcgcggacggctcgtcggcgcttcctgattgggacatggaggccagcatcagggagttttacggcgtcattttcccgttgttgctgcagcttccgagtggcatcaccgagctggacgacaggaagcagaggaagctctgcctcaagaaattcaggagcagggatgagcagctctgggaggtggacacggagagggagcttgagtgtgggatctgcctcgaggaaatgacacctactctactccgcagcttaaaacctcaagatatgtcggtaatcaaacaagtacaagtttcaaggaaatgggaatttcatggaaatacagacattgggtccatattacacattgatatgattttggctgacaaagaggttgtcggtttggagcctttttagtgtcagatggtctgtctctatatctctattcatttcactgcagcgctgtctgaggtgcgtggtcaagtcgaggcgaagatgagcaaggaggatgtgctcaaggtgcaggtcttggattcaacatagtactagcagtttggaatcacccgacggggatgctttccatgtaataaatatttttggaacgtttcggatttaacttatgttgtttctattgcaatcaacatggtgtcactatttggattcaccagtaagaatatttgccatttgggcttgttaattagggtgaaattttatataaaacatgcctcgttcacttgctttccagttcttgatttcagatctctgaagccaattacgtacacattttcctaccacgacttttattctgctttccgtttctcaacgtcttggacattgccggcgagcgcggtctcctcgacaacttctactgctaactcgggtgcaagatgcccagcaaacttcccaatccagctgccggcaaggagatgaggttcccgacggcgacaattttccactacacaaccggattcttcagcagcatatggatccgttgaagcgccgtgtgacaatgccaccaaagagcagcaacaaacaagctcaaagtctccgctaaccactaatctcataaagcttgaattttctcattgctatgtttccttctcctagcaaagttaagatgtttgcacatttctagcttattaggtccttgtgtggaatgtgtttgaacaatgatctcatttaaacaatatcaacatgtgtgatatataaaaaccgtagcaacgcacgggcacatacctagtaaataa

SEQ ID NO: 21417 - DNA, 2023 bp, Zea Mays
cttcactgtaggcgtccacaggcttggttctgccatcgcgctccgtccgcgatcccctccccgcgcccgatcctccacgctcgatcctcgaatcccgcggcttccttcgatggcacgaccccatccatctcgccagtgtccgtggtcccctccccgcgctccccaccacgacgacacgaccccatccatctcgctgctgtccacgcccagtcgcgcctcccacgatcacgcccacggacgcaacctccctccctccccgtccccgttcatgtcgcccccgtccgtgatcccctccccgccctcctctccgcgaccccatccatcctgtcgccgtccacgcccagcagcgctcaaaagcaaaaaagggtacgaatacgaatcccaatccagggccggagggcgagcgaactcaaaagcaagctgttccagtccaatccgccccagtccaaatctaatcgccgggtttaggcagaaggggtgggacgcggcgaggtttaggcggggtttgttttgtccctttcgtgcgattctgctctccgcgcgggaggcaagtactgacggaagcgaagaccaaggcggaggagggggtccccggcggtggaagtggaacgcgccgatgcgcaagtttcaggactccatcaaggccctccaggccgacatcgatcatgccaatgcgatagcagggtgtcggaattcttgagggactacgatggctcggtcatccagatgcgggtggcgtacagcgccgtcgcgcatttcctcctgcagtggaccgactgcaagctcgccggcgcgctcggcctcctcaaggttatgctatacaaggtgtgcgcggacggctcgtcggcgcttcctgattgggacatggaggccagcatcagggagttttacgcttccgagtggcatcaccgagctggacgacaggaagcagaggaagctctgcctcaagaaattcaggagcagggatgagcagctctgggaggtggacacggagagggagcttgagtgtgggatctgcctcgaggttagccccaaggtcgtgctgcccaactgtgcccacatgctctgcatgcggtgctttgaggattggaaatgacacctactctactccgcagcttaaaacctcaagatatgtcggtaatcaaacaagtacaagtttcaaggaaatgggaatttcatggaaatacagacattgggtccatattacacattgatatgattttggctgacaaagagcgctgtctgaggtgcgtggtcaagtcgaggcgaagatgagcaaggaggatgtgctcaaggtgcaggtcttggattcaacatagtactagcagtttggaatcacccgacggggatgctttccatgtaataaatatttttggaacgtttcggatttaacttatgttgtttctattgcaatcaacatggtgtcactatttggattcaccagtaagaatatttgccatttgggcttgttaattagggtgaaattttatataaaacatgcctcgttcacttgctttccagttcttgatttcagatctctgaagccaattacgtacacattttcctaccacgacttttattctgctttccgtttctcaacgtcttggacattgccggcgagcgcggtctcctcgacaacttctactgctaactcgggtgcaagatgcccagcaaacttcccaatccagctgccggcaaggagatgaggttcccgacggcgacaattttccactacacaaccggattcttcagcagcatatggatccgttgaagcgccgtgtgacaatgccaccaaagagcagcaacaaacaagctcaaagtctccgctaaccactaatctcataaagcttgaattttctcattgctatgtttccttctcctagcaaagttaagatgtttgcacatttctagcttattaggtccttgtgtggaatgtgtttgaacaatgatctcatttaaacaatatcaacatgtgtgatatataaaaaccgtagcaacgcacgggcacatacctagtaaataa

SEQ ID NO: 21418 - DNA, 2353 bp, Zea Mays
cttcactgtaggcgtccacaggcttggttctgccatcgcgctccgtccgcgatcccctccccgcgcccgatcctccacgctcgatcctcgaatcccgcggcttccttcgatggcacgaccccatccatctcgccagtgtccgtggtcccctccccgcgctccccaccacgacgacacgaccccatccatctcgctgctgtccacgcccagtcgcgcctcccacgatcacgcccacggacgcaacctccctccctccccgtccccgttcatgtcgcccccgtccgtgatcccctccccgccctcctctccgcgaccccatccatcctgtcgccgtccacgcccagcagcgctcaaaagcaaaaaagggtacgaatacgaatcccaatccagggccggagggcgagcgaactcaaaagcaagctgttccagtccaatccgccccagtccaaatctaatcgccgggtttaggcagaaggggtgggacgcggcgaggtttaggcggggtttgttttgtccctttcgtgcgattctgctctccgcgcgggaggcaagtactgacggaagcgaagaccaaggcggaggagggggtccccggcggtggaagtggaacgcgccgatgcgcaagtttcaggactccatcaaggccctccaggccgacatcgatcatgccaatgcgatggtgtcggaattcttgagggactacgatggctcggtcatccagatgcgggtggcgtacagcgccgtcgcgcatttcctcctgcagtggaccgactgcaagctcgccggcgcgctcggcctcctcaaggttatgctatacaaggtgtgcgcggacggctcgtcggcgcttcctgattgggacatggaggccagcatcagggagttttacggcgtcattttcccgttgttgctgcagcttccgagtggcatcaccgagctggacgacaggaagcagaggaagctctgcctcaagaaattcaggagcagggatgagcagctctgggaggtggacacggagagggagcttgagtgtgggatctgcctcgaggttagccccaaggtcgtgctgcccaactgtgcccacatgctctgcatgcggtgctttgaggattggaaatgacacctactctactccgcagcttaaaacctcaagatatgtcggtaatcaaacaagtacaagtttcaaggaaatgggaatttcatggaaatacagacattgggtccatattacacattgatatgattttggctgacaaagagcgctgtctgaggtgcgtggtcaagtcgaggcgaagatgagcaaggaggatgtgctcaaggtgcagttcttgatttcagatctctgaagccaattacgtacacattttcctaccacgacttttattctgctttccgtttctcaacgtcttggacattgccggcgagcgcggtctcctcgacaacttctactgctaactcgggtgcaaggtaaggtacaaatatttcatatagttctctacactttgagattgttgtaaggatattttaaatgtggtacttatatttcattcagttctatactttgattttggtgtagagatttagttatgtagaattttgcttgaagttggtctgtttttaccgatagaccaacatcaagttgtgtgaaattgtaagacagtaaggttcatccatgaattagtataccatggaatgatctacaacacttgtgtctgaatacaacaaaaatcatagaaattgtgtctgaatattctgtgttgctcgttacattgagtctggtagtcgttgttccactatatgttctggtagtcgatgttcctatgtacccatctggtaatcgctttcagtccgtctaaacacaagtctttttaagtcttgttctctatagattattgttgaatatagttgatgcttgtttatctcatatagtgtgacatgtgttgctatatgtgactacatggtgccttttaatttgttcatcagttgctatatgcagatgcccagcaaacttcccaatccagctgccggcaaggagatgaggttcccgacggcgacaattttccactacacaaccggattcttcagcagcatatggatccgttgaagcgccgtgtgacaatgccaccaaagagcagcaacaaacaagctcaaagtctccgctaaccactaatctcataaagcttgaattttctcattgctatgtttccttctcctagcaaagttaagatgtttgcacatttctagcttattaggtccttgtgtggaatgtgtttgaacaatgatctcatttaaacaatatcaacatgtgtgatatataaaaaccgtagcaacgcacgggcacatacctagtaaataa

SEQ ID NO: 21419 - DNA, 1764 bp, Zea Mays
cttcactgtaggcgtccacaggcttggttctgccatcgcgctccgtccgcgatcccctccccgcgcccgatcctccacgctcgatcctcgaatcccgcggcttccttcgatggcacgaccccatccatctcgccagtgtccgtggtcccctccccgcgctccccaccacgacgacacgaccccatccatctcgctgctgtccacgcccagtcgcgcctcccacgatcacgcccacggacgcaacctccctccctccccgtccccgttcatgtcgcccccgtccgtgatcccctccccgccctcctctccgcgaccccatccatcctgtcgccgtccacgcccagcagcgctcaaaagcaaaaaagggtacgaatacgaatcccaatccagggccggagggcgagcgaactcaaaagcaagctgttccagtccaatccgccccagtccaaatctaatcgccgggtttaggcagaaggggtgggacgcggcgaggtttaggcggggtttgttttgtccctttcgtgcgattctgctctccgcgcgggaggcaagtactgacggaagcgaagaccaaggcggaggagggggtccccggcggtggaagtggaacgcgccgatgcgcaagtttcaggactccatcaaggccctccaggccgacatcgatcatgccaatgcgatagcagggtgtcggaattcttgagggactacgatggctcggtcatccagatgcgggtggcgtacagcgccgtcgcgcatttcctcctgcagtggaccgactgcaagctcgccggcgcgctcggcctcctcaaggttatgctatacaaggtgtgcgcggacggctcgtcggcgcttcctgattgggacatggaggccagcatcagggagttttacggcgtcattttcccgttgttgctgcagcttccgagtggcatcaccgagctggacgacaggaagcagaggaagctctgcctcaagaaattcaggagcagggatgagcagctctgggaggtggacacggagagggagcttgagtgtgggatctgcctcgaggaaatgacacctactctactccgcagcttaaaacctcaagatatgtcggtaatcaaacaagtacaagtttcaaggaaatgggaatttcatggaaatacagacattgggtccatattacacattgatatgattttggctgacaaagagcgctgtctgaggtgcgtggtcaagtcgaggcgaagatgagcaaggaggatgtgctcaaggtgcagatctctgaagccaattacgtacacattttcctaccacgacttttattctgctttccgtttctcaacgtcttggacattgccggcgagcgcggtctcctcgacaacttctactgctaactcgggtgcaagttgctatatgcagatgcccagcaaacttcccaatccagctgccggcaaggagatgaggttcccgacggcgacaattttccactacacaaccggattcttcagcagcatatggatccgttgaagcgccgtgtgacaatgccaccaaagagcagcaacaaacaagctcaaagtctccgctaaccactaatctcataaagcttgaattttctcattgctatgtttccttctcctagcaaagttaagatgtttgcacatttctagcttattaggtccttgtgtggaatgtgtttgaacaatgatctcatttaaacaatatcaacatgtgtgatatataaaaaccgtagcaacgcacgggcacatacctagtaaataa

SEQ ID NO: 21420 - DNA, 1837 bp, Zea Mays
cttcactgtaggcgtccacaggcttggttctgccatcgcgctccgtccgcgatcccctccccgcgcccgatcctccacgctcgatcctcgaatcccgcggcttccttcgatggcacgaccccatccatctcgccagtgtccgtggtcccctccccgcgctccccaccacgacgacacgaccccatccatctcgctgctgtccacgcccagtcgcgcctcccacgatcacgcccacggacgcaacctccctccctccccgtccccgttcatgtcgcccccgtccgtgatcccctccccgccctcctctccgcgaccccatccatcctgtcgccgtccacgcccagcagcgctcaaaagcaaaaaagggtacgaatacgaatcccaatccagggccggagggcgagcgaactcaaaagcaagctgttccagtccaatccgccccagtccaaatctaatcgccgggtttaggcagaaggggtgggacgcggcgaggtttaggcggggtttgttttgtccctttcgtgcgattctgctctccgcgcgggaggcaagtactgacggaagcgaagaccaaggcggaggagggggtccccggcggtggaagtggaacgcgccgatgcgcaagtttcaggactccatcaaggccctccaggccgacatcgatcatgccaatgcgatggtgtcggaattcttgagggactacgatggctcggtcatccagatgcgggtggcgtacagcgccgtcgcgcatttcctcctgcagtggaccgactgcaagctcgccggcgcgctcggcctcctcaaggttatgctatacaaggtgtgcgcggacggctcgtcggcgcttcctgattgggacatggaggccagcatcagggagttttacggcgtcattttcccgttgttgctgcagcttccgagtggcatcaccgagctggacgacaggaagcagaggaagctctgcctcaagaaattcaggagcagggatgagcagctctgggaggtggacacggagagggagcttgagtgtgggatctgcctcgaggttagccccaaggtcgtgctgcccaactgtgcccacatgctctgcatgcggtgctttgaggattggaaatgacacctactctactccgcagcttaaaacctcaagatatgtcggtaatcaaacaagtacaagtttcaaggaaatgggaatttcatggaaatacagacattgggtccatattacacattgatatgattttggctgacaaagagcgctgtctgaggtgcgtggtcaagtcgaggcgaagatgagcaaggaggatgtgctcaaggtgcagttcttgatttcagatctctgaagccaattacgtacacattttcctaccacgacttttattctgctttccgtttctcaacgtcttggacattgccggcgagcgcggtctcctcgacaacttctactgctaactcgggtgcaagttgctatatgcagatgcccagcaaacttcccaatccagctgccggcaaggagatgaggttcccgacggcgacaattttccactacacaaccggattcttcagcagcatatggatccgttgaagcgccgtgtgacaatgccaccaaagagcagcaacaaacaagctcaaagtctccgctaaccactaatctcataaagcttgaattttctcattgctatgtttccttctcctagcaaagttaagatgtttgcacatttctagcttattaggtccttgtgtggaatgtgtttgaacaatgatctcatttaaacaatatcaacatgtgtgatatataaaaaccgtagcaacgcacgggcacatacctagtaaataa

SEQ ID NO: 21421 - DNA, 1984 bp, Zea Mays
cttcactgtaggcgtccacaggcttggttctgccatcgcgctccgtccgcgatcccctccccgcgcccgatcctccacgctcgatcctcgaatcccgcggcttccttcgatggcacgaccccatccatctcgccagtgtccgtggtcccctccccgcgctccccaccacgacgacacgaccccatccatctcgctgctgtccacgcccagtcgcgcctcccacgatcacgcccacggacgcaacctccctccctccccgtccccgttcatgtcgcccccgtccgtgatcccctccccgccctcctctccgcgaccccatccatcctgtcgccgtccacgcccagcagcgctcaaaagcaaaaaagggtacgaatacgaatcccaatccagggccggagggcgagcgaactcaaaagcaagctgttccagtccaatccgccccagtccaaatctaatcgccgggtttaggcagaaggggtgggacgcggcgaggtttaggcggggtttgttttgtccctttcgtgcgattctgctctccgcgcgggaggcaagtactgacggaagcgaagaccaaggcggaggagggggtccccggcggtggaagtggaacgcgccgatgcgcaagtttcaggactccatcaaggccctccaggccgacatcgatcatgccaatgcgatagcagggtgtcggaattcttgagggactacgatggctcggtcatccagatgcgggtggcgtacagcgccgtcgcgcatttcctcctgcagtggaccgactgcaagctcgccggcgcgctcggcctcctcaaggttatgctatacaaggtgtgcgcggacggctcgtcggcgcttcctgattgggacatggaggccagcatcagggagttttacggcgtcattttcccgttgttgctgcagcttccgagtggcatcaccgagctggacgacaggaagcagaggaagctctgcctcaagaaattcaggagcagggatgagcagctctgggaggtggacacggagagggagcttgagtgtgggatctgcctcgaggaaatgacacctactctactccgcagcttaaaacctcaagatatgtcggtaatcaaacaagtacaagtttcaaggaaatgggaatttcatggaaatacagacattgggtccatattacacattgatatgattttggctgacaaagagcgctgtctgaggtgcgtggtcaagtcgaggcgaagatgagcaaggaggatgtgctcaaggtgcaggtcttggattcaacatagtactagcagtttggaatcacccgacggggatgctttccatgtaataaatatttttggaacgtttcggatttaacttatgttgtttctattgcaatcaacatggtgtcactatttggattcaccagtaagaatatttgccatttgggcttgttaattagggtgaaattttatataaaacatgcctcgttcacttgctttccagttcttgatttcagatctctgaagccaattacgtacacattttcctaccacgacttttattctgctttccgtttctcaacgtcttggacattgccggcgagcgcggtctcctcgacaacttctactgctaactcgggtgcaagatgcccagcaaacttcccaatccagctgccggcaaggagatgaggttcccgacggcgacaattttccactacacaaccggattcttcagcagcatatggatccgttgaagcgccgtgtgacaatgccaccaaagagcagcaacaaacaagctcaaagtctccgctaaccactaatctcataaagcttgaattttctcattgctatgtttccttctcctagcaaagttaagatgtttgcacatttctagcttattaggtccttgtgtggaatgtgtttgaacaatgatctcatttaaacaatatcaacatgtgtgatatataaaaaccgtagcaacgcacgggcacatacctagtaaataa

SEQ ID NO: 21422 - DNA, 1829 bp, Zea Mays
cttcactgtaggcgtccacaggcttggttctgccatcgcgctccgtccgcgatcccctccccgcgcccgatcctccacgctcgatcctcgaatcccgcggcttccttcgatggcacgaccccatccatctcgccagtgtccgtggtcccctccccgcgctccccaccacgacgacacgaccccatccatctcgctgctgtccacgcccagtcgcgcctcccacgatcacgcccacggacgcaacctccctccctccccgtccccgttcatgtcgcccccgtccgtgatcccctccccgccctcctctccgcgaccccatccatcctgtcgccgtccacgcccagcagcgctcaaaagcaaaaaagggtacgaatacgaatcccaatccagggccggagggcgagcgaactcaaaagcaagctgttccagtccaatccgccccagtccaaatctaatcgccgggtttaggcagaaggggtgggacgcggcgaggtttaggcggggtttgttttgtccctttcgtgcgattctgctctccgcgcgggaggcaagtactgacggaagcgaagaccaaggcggaggagggggtccccggcggtggaagtggaacgcgccgatgcgcaagtttcaggactccatcaaggccctccaggccgacatcgatcatgccaatgcgatagcagggtgtcggaattcttgagggactacgatggctcggtcatccagatgcgggtggcgtacagcgccgtcgcgcatttcctcctgcagtggaccgactgcaagctcgccggcgcgctcggcctcctcaaggttatgctatacaaggtgtgcgcggacggctcgtcggcgcttcctgattgggacatggaggccagcatcagggagttttacggcgtcattttcccgttgttgctgcagcttccgagtggcatcaccgagctggacgacaggaagcagaggaagctctgcctcaagaaattcaggagcagggatgagcagctctgggaggtggacacggagagggagcttgagtgtgggatctgcctcgaggttagccccaaggtcgtgctgcccaactgtgcccacatgctctgcatgcggtgctttgaggattggaaatgacacctactctactccgcagcttaaaacctcaagatatgtcggtaatcaaacaagtacaagtttcaaggaaatgggaatttcatggaaatacagacattgggtccatattacacattgatatgattttggctgacaaagagcgctgtctgaggtgcgtggtcaagtcgaggcgaagatgagcaaggaggatgtgctcaaggtgcagttcttgatttcagatctctgaagccaattacgtacacattttcctaccacgacttttattctgctttccgtttctcaacgtcttggacattgccggcgagcgcggtctcctcgacaacttctactgctaactcgggtgcaagatgcccagcaaacttcccaatccagctgccggcaaggagatgaggttcccgacggcgacaattttccactacacaaccggattcttcagcagcatatggatccgttgaagcgccgtgtgacaatgccaccaaagagcagcaacaaacaagctcaaagtctccgctaaccactaatctcataaagcttgaattttctcattgctatgtttccttctcctagcaaagttaagatgtttgcacatttctagcttattaggtccttgtgtggaatgtgtttgaacaatgatctcatttaaacaatatcaacatgtgtgatatataaaaaccgtagcaacgcacgggcacatacctagtaaataa

SEQ ID NO: 21423 - DNA, 2049 bp, Zea Mays
cttcactgtaggcgtccacaggcttggttctgccatcgcgctccgtccgcgatcccctccccgcgcccgatcctccacgctcgatcctcgaatcccgcggcttccttcgatggcacgaccccatccatctcgccagtgtccgtggtcccctccccgcgctccccaccacgacgacacgaccccatccatctcgctgctgtccacgcccagtcgcgcctcccacgatcacgcccacggacgcaacctccctccctccccgtccccgttcatgtcgcccccgtccgtgatcccctccccgccctcctctccgcgaccccatccatcctgtcgccgtccacgcccagcagcgctcaaaagcaaaaaagggtacgaatacgaatcccaatccagggccggagggcgagcgaactcaaaagcaagctgttccagtccaatccgccccagtccaaatctaatcgccgggtttaggcagaaggggtgggacgcggcgaggtttaggcggggtttgttttgtccctttcgtgcgattctgctctccgcgcgggaggcaagtactgacggaagcgaagaccaaggcggaggagggggtccccggcggtggaagtggaacgcgccgatgcgcaagtttcaggactccatcaaggccctccaggccgacatcgatcatgccaatgcgatagcagggtgtcggaattcttgagggactacgatggctcggtcatccagatgcgggtggcgtacagcgccgtcgcgcatttcctcctgcagtggaccgactgcaagctcgccggcgcgctcggcctcctcaaggttatgctatacaaggtgtgcgcggacggctcgtcggcgcttcctgattgggacatggaggccagcatcagggagttttacggcgtcattttcccgttgttgctgcagcttccgagtggcatcaccgagctggacgacaggaagcagaggaagctctgcctcaagaaattcaggagcagggatgagcagctctgggaggtggacacggagagggagcttgagtgtgggatctgcctcgaggttagccccaaggtcgtgctgcccaactgtgcccacatgctctgcatgcggtgctttgaggattggaaatgacacctactctactccgcagcttaaaacctcaagatatgtcggtaatcaaacaagtacaagtttcaaggaaatgggaatttcatggaaatacagacattgggtccatattacacattgatatgattttggctgacaaagagcgctgtctgaggtgcgtggtcaagtcgaggcgaagatgagcaaggaggatgtgctcaaggtgcaggtcttggattcaacatagtactagcagtttggaatcacccgacggggatgctttccatgtaataaatatttttggaacgtttcggatttaacttatgttgtttctattgcaatcaacatggtgtcactatttggattcaccagtaagaatatttgccatttgggcttgttaattagggtgaaattttatataaaacatgcctcgttcacttgctttccagttcttgatttcagatctctgaagccaattacgtacacattttcctaccacgacttttattctgctttccgtttctcaacgtcttggacattgccggcgagcgcggtctcctcgacaacttctactgctaactcgggtgcaagatgcccagcaaacttcccaatccagctgccggcaaggagatgaggttcccgacggcgacaattttccactacacaaccggattcttcagcagcatatggatccgttgaagcgccgtgtgacaatgccaccaaagagcagcaacaaacaagctcaaagtctccgctaaccactaatctcataaagcttgaattttctcattgctatgtttccttctcctagcaaagttaagatgtttgcacatttctagcttattaggtccttgtgtggaatgtgtttgaacaatgatctcatttaaacaatatcaacatgtgtgatatataaaaaccgtagcaacgcacgggcacatacctagtaaataa

SEQ ID NO: 21424 - DNA, 1816 bp, Zea Mays
cttcactgtaggcgtccacaggcttggttctgccatcgcgctccgtccgcgatcccctccccgcgcccgatcctccacgctcgatcctcgaatcccgcggcttccttcgatggcacgaccccatccatctcgccagtgtccgtggtcccctccccgcgctccccaccacgacgacacgaccccatccatctcgctgctgtccacgcccagtcgcgcctcccacgatcacgcccacggacgcaacctccctccctccccgtccccgttcatgtcgcccccgtccgtgatcccctccccgccctcctctccgcgaccccatccatcctgtcgccgtccacgcccagcagcgctcaaaagcaaaaaagggtacgaatacgaatcccaatccagggccggagggcgagcgaactcaaaagcaagctgttccagtccaatccgccccagtccaaatctaatcgccgggtttaggcagaaggggtgggacgcggcgaggtttaggcggggtttgttttgtccctttcgtgcgattctgctctccgcgcgggaggcaagtactgacggaagcgaagaccaaggcggaggagggggtccccggcggtggaagtggaacgcgccgatgcgcaagtttcaggactccatcaaggccctccaggccgacatcgatcatgccaatgcgatagcagggtgtcggaattcttgagggactacgatggctcggtcatccagatgcgggtggcgtacagcgccgtcgcgcatttcctcctgcagtggaccgactgcaagctcgccggcgcgctcggcctcctcaaggttatgctatacaaggtgtgcgcggacggctcgtcggcgcttcctgattgggacatggaggccagcatcagggagttttacggcgtcattttcccgttgttgctgcagcttccgagtggcatcaccgagctggacgacaggaagcagaggaagctctgcctcaagaaattcaggagcagggatgagcagctctgggaggtggacacggagagggagcttgagtgtgggatctgcctcgaggttagccccaaggtcgtgctgcccaactgtgcccacatgctctgcatgcggtgctttgaggattggaaatgacacctactctactccgcagcttaaaacctcaagatatgtcggtaatcaaacaagtacaagtttcaaggaaatgggaatttcatggaaatacagacattgggtccatattacacattgatatgattttggctgacaaagagcgctgtctgaggtgcgtggtcaagtcgaggcgaagatgagcaaggaggatgtgctcaaggtgcagatctctgaagccaattacgtacacattttcctaccacgacttttattctgctttccgtttctcaacgtcttggacattgccggcgagcgcggtctcctcgacaacttctactgctaactcgggtgcaagatgcccagcaaacttcccaatccagctgccggcaaggagatgaggttcccgacggcgacaattttccactacacaaccggattcttcagcagcatatggatccgttgaagcgccgtgtgacaatgccaccaaagagcagcaacaaacaagctcaaagtctccgctaaccactaatctcataaagcttgaattttctcattgctatgtttccttctcctagcaaagttaagatgtttgcacatttctagcttattaggtccttgtgtggaatgtgtttgaacaatgatctcatttaaacaatatcaacatgtgtgatatataaaaaccgtagcaacgcacgggcacatacctagtaaataa

SEQ ID NO: 21425 - DNA, 1979 bp, Zea Mays
cttcactgtaggcgtccacaggcttggttctgccatcgcgctccgtccgcgatcccctccccgcgcccgatcctccacgctcgatcctcgaatcccgcggcttccttcgatggcacgaccccatccatctcgccagtgtccgtggtcccctccccgcgctccccaccacgacgacacgaccccatccatctcgctgctgtccacgcccagtcgcgcctcccacgatcacgcccacggacgcaacctccctccctccccgtccccgttcatgtcgcccccgtccgtgatcccctccccgccctcctctccgcgaccccatccatcctgtcgccgtccacgcccagcagcgctcaaaagcaaaaaagggtacgaatacgaatcccaatccagggccggagggcgagcgaactcaaaagcaagctgttccagtccaatccgccccagtccaaatctaatcgccgggtttaggcagaaggggtgggacgcggcgaggtttaggcggggtttgttttgtccctttcgtgcgattctgctctccgcgcgggaggcaagtactgacggaagcgaagaccaaggcggaggagggggtccccggcggtggaagtggaacgcgccgatgcgcaagtttcaggactccatcaaggccctccaggccgacatcgatcatgccaatgcgatggtgtcggaattcttgagggactacgatggctcggtcatccagatgcgggtggcgtacagcgccgtcgcgcatttcctcctgcagtggaccgactgcaagctcgccggcgcgctcggcctcctcaaggttatgctatacaaggtgtgcgcggacggctcgtcggcgcttcctgattgggacatggaggccagcatcagggagttttacggcgtcattttcccgttgttgctgcagcttccgagtggcatcaccgagctggacgacaggaagcagaggaagctctgcctcaagaaattcaggagcagggatgagcagctctgggaggtggacacggagagggagcttgagtgtgggatctgcctcgaggaaatgacacctactctactccgcagcttaaaacctcaagatatgtcggtaatcaaacaagtacaagtttcaaggaaatgggaatttcatggaaatacagacattgggtccatattacacattgatatgattttggctgacaaagagcgctgtctgaggtgcgtggtcaagtcgaggcgaagatgagcaaggaggatgtgctcaaggtgcaggtcttggattcaacatagtactagcagtttggaatcacccgacggggatgctttccatgtaataaatatttttggaacgtttcggatttaacttatgttgtttctattgcaatcaacatggtgtcactatttggattcaccagtaagaatatttgccatttgggcttgttaattagggtgaaattttatataaaacatgcctcgttcacttgctttccagttcttgatttcagatctctgaagccaattacgtacacattttcctaccacgacttttattctgctttccgtttctcaacgtcttggacattgccggcgagcgcggtctcctcgacaacttctactgctaactcgggtgcaagatgcccagcaaacttcccaatccagctgccggcaaggagatgaggttcccgacggcgacaattttccactacacaaccggattcttcagcagcatatggatccgttgaagcgccgtgtgacaatgccaccaaagagcagcaacaaacaagctcaaagtctccgctaaccactaatctcataaagcttgaattttctcattgctatgtttccttctcctagcaaagttaagatgtttgcacatttctagcttattaggtccttgtgtggaatgtgtttgaacaatgatctcatttaaacaatatcaacatgtgtgatatataaaaaccgtagcaacgcacgggcacatacctagtaaataa

SEQ ID NO: 21426 - DNA, 2129 bp, Zea Mays
cttcactgtaggcgtccacaggcttggttctgccatcgcgctccgtccgcgatcccctccccgcgcccgatcctccacgctcgatcctcgaatcccgcggcttccttcgatggcacgaccccatccatctcgccagtgtccgtggtcccctccccgcgctccccaccacgacgacacgaccccatccatctcgctgctgtccacgcccagtcgcgcctcccacgatcacgcccacggacgcaacctccctccctccccgtccccgttcatgtcgcccccgtccgtgatcccctccccgccctcctctccgcgaccccatccatcctgtcgccgtccacgcccagcagcgctcaaaagcaaaaaagggtacgaatacgaatcccaatccagggccggagggcgagcgaactcaaaagcaagctgttccagtccaatccgccccagtccaaatctaatcgccgggtttaggcagaaggggtgggacgcggcgaggtttaggcggggtttgttttgtccctttcgtgcgattctgctctccgcgcgggaggcaagtactgacggaagcgaagaccaaggcggaggagggggtccccggcggtggaagtggaacgcgccgatgcgcaagtttcaggactccatcaaggccctccaggccgacatcgatcatgccaatgcgatagcagggtgtcggaattcttgagggactacgatggctcggtcatccagatgcgggtggcgtacagcgccgtcgcgcatttcctcctgcagtggaccgactgcaagctcgccggcgcgctcggcctcctcaaggttatgctatacaaggtgtgcgcggacggctcgtcggcgcttcctgattgggacatggaggccagcatcagggagttttacggcgtcattttcccgttgttgctgcagcttccgagtggcatcaccgagctggacgacaggaagcagaggaagctctgcctcaagaaattcaggagcagggatgagcagctctgggaggtggacacggagagggagcttgagtgtgggatctgcctcgaggttagccccaaggtcgtgctgcccaactgtgcccacatgctctgcatgcggtgctttgaggattggaaatgacacctactctactccgcagcttaaaacctcaagatatgtcggtaatcaaacaagtacaagtttcaaggaaatgggaatttcatggaaatacagacattgggtccatattacacattgatatgattttggctgacaaagaggttgtcggtttggagcctttttagtgtcagatggtctgtctctatatctctattcatttcactgcagcgctgtctgaggtgcgtggtcaagtcgaggcgaagatgagcaaggaggatgtgctcaaggtgcaggtcttggattcaacatagtactagcagtttggaatcacccgacggggatgctttccatgtaataaatatttttggaacgtttcggatttaacttatgttgtttctattgcaatcaacatggtgtcactatttggattcaccagtaagaatatttgccatttgggcttgttaattagggtgaaattttatataaaacatgcctcgttcacttgctttccagttcttgatttcagatctctgaagccaattacgtacacattttcctaccacgacttttattctgctttccgtttctcaacgtcttggacattgccggcgagcgcggtctcctcgacaacttctactgctaactcgggtgcaagttgctatatgcagatgcccagcaaacttcccaatccagctgccggcaaggagatgaggttcccgacggcgacaattttccactacacaaccggattcttcagcagcatatggatccgttgaagcgccgtgtgacaatgccaccaaagagcagcaacaaacaagctcaaagtctccgctaaccactaatctcataaagcttgaattttctcattgctatgtttccttctcctagcaaagttaagatgtttgcacatttctagcttattaggtccttgtgtggaatgtgtttgaacaatgatctcatttaaacaatatcaacatgtgtgatatataaaaaccgtagcaacgcacgggcacatacctagtaaataa

SEQ ID NO: 21427 - DNA, 1966 bp, Zea Mays
cttcactgtaggcgtccacaggcttggttctgccatcgcgctccgtccgcgatcccctccccgcgcccgatcctccacgctcgatcctcgaatcccgcggcttccttcgatggcacgaccccatccatctcgccagtgtccgtggtcccctccccgcgctccccaccacgacgacacgaccccatccatctcgctgctgtccacgcccagtcgcgcctcccacgatcacgcccacggacgcaacctccctccctccccgtccccgttcatgtcgcccccgtccgtgatcccctccccgccctcctctccgcgaccccatccatcctgtcgccgtccacgcccagcagcgctcaaaagcaaaaaagggtacgaatacgaatcccaatccagggccggagggcgagcgaactcaaaagcaagctgttccagtccaatccgccccagtccaaatctaatcgccgggtttaggcagaaggggtgggacgcggcgaggtttaggcggggtttgttttgtccctttcgtgcgattctgctctccgcgcgggaggcaagtactgacggaagcgaagaccaaggcggaggagggggtccccggcggtggaagtggaacgcgccgatgcgcaagtttcaggactccatcaaggccctccaggccgacatcgatcatgccaatgcgatggtgtcggaattcttgagggactacgatggctcggtcatccagatgcgggtggcgtacagcgccgtcgcgcatttcctcctgcagtggaccgactgcaagctcgccggcgcgctcggcctcctcaaggttatgctatacaaggtgtgcgcggacggctcgtcggcgcttcctgattgggacatggaggccagcatcagggagttttacggcgtcattttcccgttgttgctgcagcttccgagtggcatcaccgagctggacgacaggaagcagaggaagctctgcctcaagaaattcaggagcagggatgagcagctctgggaggtggacacggagagggagcttgagtgtgggatctgcctcgaggttagccccaaggtcgtgctgcccaactgtgcccacatgctctgcatgcggtgctttgaggattggaaatgacacctactctactccgcagcttaaaacctcaagatatgtcggtaatcaaacaagtacaagtttcaaggaaatgggaatttcatggaaatacagacattgggtccatattacacattgatatgattttggctgacaaagagcgctgtctgaggtgcgtggtcaagtcgaggcgaagatgagcaaggaggatgtgctcaaggtgcaggtcttggattcaacatagtactagcagtttggaatcacccgacggggatgctttccatgtaataaatatttttggaacgtttcggatttaacttatgttgtttctattgcaatcaacatggtgtcactatttggattcaccattcttgatttcagatctctgaagccaattacgtacacattttcctaccacgacttttattctgctttccgtttctcaacgtcttggacattgccggcgagcgcggtctcctcgacaacttctactgctaactcgggtgcaagatgcccagcaaacttcccaatccagctgccggcaaggagatgaggttcccgacggcgacaattttccactacacaaccggattcttcagcagcatatggatccgttgaagcgccgtgtgacaatgccaccaaagagcagcaacaaacaagctcaaagtctccgctaaccactaatctcataaagcttgaattttctcattgctatgtttccttctcctagcaaagttaagatgtttgcacatttctagcttattaggtccttgtgtggaatgtgtttgaacaatgatctcatttaaacaatatcaacatgtgtgatatataaaaaccgtagcaacgcacgggcacatacctagtaaataa

SEQ ID NO: 21428 - DNA, 1824 bp, Zea Mays
cttcactgtaggcgtccacaggcttggttctgccatcgcgctccgtccgcgatcccctccccgcgcccgatcctccacgctcgatcctcgaatcccgcggcttccttcgatggcacgaccccatccatctcgccagtgtccgtggtcccctccccgcgctccccaccacgacgacacgaccccatccatctcgctgctgtccacgcccagtcgcgcctcccacgatcacgcccacggacgcaacctccctccctccccgtccccgttcatgtcgcccccgtccgtgatcccctccccgccctcctctccgcgaccccatccatcctgtcgccgtccacgcccagcagcgctcaaaagcaaaaaagggtacgaatacgaatcccaatccagggccggagggcgagcgaactcaaaagcaagctgttccagtccaatccgccccagtccaaatctaatcgccgggtttaggcagaaggggtgggacgcggcgaggtttaggcggggtttgttttgtccctttcgtgcgattctgctctccgcgcgggaggcaagtactgacggaagcgaagaccaaggcggaggagggggtccccggcggtggaagtggaacgcgccgatgcgcaagtttcaggactccatcaaggccctccaggccgacatcgatcatgccaatgcgatggtgtcggaattcttgagggactacgatggctcggtcatccagatgcgggtggcgtacagcgccgtcgcgcatttcctcctgcagtggaccgactgcaagctcgccggcgcgctcggcctcctcaaggttatgctatacaaggtgtgcgcggacggctcgtcggcgcttcctgattgggacatggaggccagcatcagggagttttacggcgtcattttcccgttgttgctgcagcttccgagtggcatcaccgagctggacgacaggaagcagaggaagctctgcctcaagaaattcaggagcagggatgagcagctctgggaggtggacacggagagggagcttgagtgtgggatctgcctcgaggttagccccaaggtcgtgctgcccaactgtgcccacatgctctgcatgcggtgctttgaggattggaaatgacacctactctactccgcagcttaaaacctcaagatatgtcggtaatcaaacaagtacaagtttcaaggaaatgggaatttcatggaaatacagacattgggtccatattacacattgatatgattttggctgacaaagagcgctgtctgaggtgcgtggtcaagtcgaggcgaagatgagcaaggaggatgtgctcaaggtgcagttcttgatttcagatctctgaagccaattacgtacacattttcctaccacgacttttattctgctttccgtttctcaacgtcttggacattgccggcgagcgcggtctcctcgacaacttctactgctaactcgggtgcaagatgcccagcaaacttcccaatccagctgccggcaaggagatgaggttcccgacggcgacaattttccactacacaaccggattcttcagcagcatatggatccgttgaagcgccgtgtgacaatgccaccaaagagcagcaacaaacaagctcaaagtctccgctaaccactaatctcataaagcttgaattttctcattgctatgtttccttctcctagcaaagttaagatgtttgcacatttctagcttattaggtccttgtgtggaatgtgtttgaacaatgatctcatttaaacaatatcaacatgtgtgatatataaaaaccgtagcaacgcacgggcacatacctagtaaataa

SEQ ID NO: 21429 - DNA, 2018 bp, Zea Mays
cttcactgtaggcgtccacaggcttggttctgccatcgcgctccgtccgcgatcccctccccgcgcccgatcctccacgctcgatcctcgaatcccgcggcttccttcgatggcacgaccccatccatctcgccagtgtccgtggtcccctccccgcgctccccaccacgacgacacgaccccatccatctcgctgctgtccacgcccagtcgcgcctcccacgatcacgcccacggacgcaacctccctccctccccgtccccgttcatgtcgcccccgtccgtgatcccctccccgccctcctctccgcgaccccatccatcctgtcgccgtccacgcccagcagcgctcaaaagcaaaaaagggtacgaatacgaatcccaatccagggccggagggcgagcgaactcaaaagcaagctgttccagtccaatccgccccagtccaaatctaatcgccgggtttaggcagaaggggtgggacgcggcgaggtttaggcggggtttgttttgtccctttcgtgcgattctgctctccgcgcgggaggcaagtactgacggaagcgaagaccaaggcggaggagggggtccccggcggtggaagtggaacgcgccgatgcgcaagtttcaggactccatcaaggccctccaggccgacatcgatcatgccaatgcgatggtgtcggaattcttgagggactacgatggctcggtcatccagatgcgggtggcgtacagcgccgtcgcgcatttcctcctgcagtggaccgactgcaagctcgccggcgcgctcggcctcctcaaggttatgctatacaaggtgtgcgcggacggctcgtcggcgcttcctgattgggacatggaggccagcatcagggagttttacgcttccgagtggcatcaccgagctggacgacaggaagcagaggaagctctgcctcaagaaattcaggagcagggatgagcagctctgggaggtggacacggagagggagcttgagtgtgggatctgcctcgaggttagccccaaggtcgtgctgcccaactgtgcccacatgctctgcatgcggtgctttgaggattggaaatgacacctactctactccgcagcttaaaacctcaagatatgtcggtaatcaaacaagtacaagtttcaaggaaatgggaatttcatggaaatacagacattgggtccatattacacattgatatgattttggctgacaaagagcgctgtctgaggtgcgtggtcaagtcgaggcgaagatgagcaaggaggatgtgctcaaggtgcaggtcttggattcaacatagtactagcagtttggaatcacccgacggggatgctttccatgtaataaatatttttggaacgtttcggatttaacttatgttgtttctattgcaatcaacatggtgtcactatttggattcaccagtaagaatatttgccatttgggcttgttaattagggtgaaattttatataaaacatgcctcgttcacttgctttccagttcttgatttcagatctctgaagccaattacgtacacattttcctaccacgacttttattctgctttccgtttctcaacgtcttggacattgccggcgagcgcggtctcctcgacaacttctactgctaactcgggtgcaagatgcccagcaaacttcccaatccagctgccggcaaggagatgaggttcccgacggcgacaattttccactacacaaccggattcttcagcagcatatggatccgttgaagcgccgtgtgacaatgccaccaaagagcagcaacaaacaagctcaaagtctccgctaaccactaatctcataaagcttgaattttctcattgctatgtttccttctcctagcaaagttaagatgtttgcacatttctagcttattaggtccttgtgtggaatgtgtttgaacaatgatctcatttaaacaatatcaacatgtgtgatatataaaaaccgtagcaacgcacgggcacatacctagtaaataa

SEQ ID NO: 21430 - DNA, 785 bp, Zea Mays
agggtcagccttttgacgcaggcctcgtacggaatctatgctaaattgctaataaatcagtgatcaggaggccccagttgcagttgaggcaccaaccccagttcttggagagccaatggacttgatgactgcgctgcagctggtgatgaagaagtcaagtgctcatgatggacttgtgaagggtcttcgcgaggctgccaaggccattgagaagcatgctgctcagctttgcgttcttgctgaggactgtgaccagccagattatgtcaagctggtgaaggcgctctgtgctgaacacaatgttcaccttgtcactgttcctgctgctaagactcttggcgagtgggctgggctttgcaagattgactccgagggcaaggcaaggaaggttgtaggctgctcctgtgtcgttgtcaaggactacggtgaagaatctgagggccttaacatagtgcaggagtatgtcaagtcgcactagatgtaacacgtttcagtaatactctacatttggatctgggcttaatattatgcttgcgtcttgggcttgctaggagattaggacaatttactacaagagcccatgaggatatgagcaatttggaattctaaatgttttgtttatggtgttgtcatctggttttaattcaaatcgataagagatgagattattcttgctttgccattagcccattacctttttatgtttatatccatgttccatggtgtataatgtttatactctctctgttgcggttgctcttatttttcttatttgatttgacaaa

SEQ ID NO: 21431 - DNA, 1604 bp, Zea Mays
aaataatttcccaaacaagccagagaaagccccgattagcacccatcacgtcagggccctttcaccgttcagactctcaaactccctcgattgtaataacagagaaaaaaaccatccgccggaggccggagggcagattctccaccatcgcctccactccaccctcactacgcgaatccgcggcgaacccccctctcggattccttctctcctccccgccccgatcgcgtcgtccagagaccgccaggctccggcgcccccgcccgcccgggctcgccgggggtcgggatgccctgctgctcgccgtcgctgctcggagtcgggccgcggattggttgtgcgctgattgggtcacttggggcattgttcaatggggttcttgtgatcaacctagtgattggtctatttgctgttgttgcaatcgagagcagcagccagagacttggccggacatatgctgtccttctcttctttgctgtcgtccttgacgttgcttggtttatactcttctcccatgctatctggactattaatcctgatgagaagtatggtgaactttttgttttctcactcagactagcattgtggatgcaaataattgggttttcagttaggtttttgtcttcattcttatggattcaaatgtatagattaggggcttcttccagcacgccaacatattttgaaaccaaccatgaagcaagaattagtttcttaagccctagatctgattcagttagacggagtcctacggcagatgatatattgggaggttcgatctatgatccttcttactactcgtcactgttcgaggatgtccgaaacaatgcatgcaatcatcagggtgataaacaaagtggtagtaatgacagtggttcaacatctgcaggccagacaccacgacttaaatcttttgctaatgatgtggaaggtggactaaaaagaccgttgaactcctagggataaaacaacgggctcatcttgggaacctaaatcctgtagccaccgttctctttgaagcatagaggtttgcacaccgcagcagtttatttctcagaccagcgggaagggggtgtccaacgaaaggagcttggcaaatactgtaacggcgactgcctgtgttgccgagcatccacagcagcatcggtgccattttggagcaccgttcgtactcagcgagcttgagccggatgtttctgcaaatagctgtccaatgttggtgttgcatatcgacctatgccatgcgatatgtttactgcccatcatgtcccatttttcagacctctcttcctgtttcttttaactaccaaggaaaatgaagcaagtagttcgttagttctttagtcacttagttattttctagctgtaggctggcagttgcttctcttctagcattttggtcattgttcatagcatttgtgttgacaaggaacagatctctagatcagtgaaaggaaacaaatgtaagtttcattctgttctagaaagagctgtgatccctattggatgcatgagttttgttagaaatgttgcagggttttcacacgaaattgttctggacccacaagttatacaagtcaaattagtctatatatttacgcgaa

SEQ ID NO: 21432 - DNA, 1413 bp, Zea Mays
accgttcagactctcaaactccctcgattgtaataacagagaaaaaaaccatccgccggaggccggagggcagattctccaccatcgcctccactccaccctcactacgcgaatccgcggcgaacccccctctcggattccttctctcctccccgccccgatcgcgtcgtccagagaccgccaggctccggcgcccccgcccgcccgggctcgccgggggtcgggatgccctgctgctcgccgtcgctgctcggagtcgggccgcgggtgcgctcctttctccgcgactacgacgccctccagtccctcgccctcgcactcatctacctccaggactattaatcctgatgagaagtatggtgaactttttgttttctcactcagactagcattgtggatgcaaataattgggttttcagttaggtttttgtcttcattcttatggattcaaatgtatagattaggggcttcttccagcacgccaacatattttgaaaccaaccatgaagcaagaattagtttcttaagccctagatctgattcagttagacggagtcctacggcagatgatatattgggaggttcgatctatgatccttcttactactcgtcactgttcgaggatgtccgaaacaatgcatgcaatcatcagggtgataaacaaagtggtagtaatgacagtggttcaacatctgcaggccagacaccacgacttaaatcttttgctaatgatgtggaaggtggactaaaaagaccgttgaactcctagggataaaacaacgggctcatcttgggaacctaaatcctgtagccaccgttctctttgaagcatagaggtttgcacaccgcagcagtttatttctcagaccagcgggaagggggtgtccaacgaaaggagcttggcaaatactgtaacggcgactgcctgtgttgccgagcatccacagcagcatcggtgccattttggagcaccgttcgtactcagcgagcttgagccggatgtttctgcaaatagctgtccaatgttggtgttgcatatcgacctatgccatgcgatatgtttactgcccatcatgtcccatttttcagacctctcttcctgtttcttttaactaccaaggaaaatgaagcaagtagttcgttagttctttagtcacttagttattttctagctgtaggctggcagttgcttctcttctagcattttggtcattgttcatagcatttgtgttgacaaggaacagatctctagatcagtgaaaggaaacaaatgtaagtttcattctgttctagaaagagctgtgatccctattggatgcatgagttttgttagaaatgttgcagggttttcacacgaaattgttctggacccacaagttatacaagtcaaattagtctatatatttacgcgaa

SEQ ID NO: 21433 - DNA, 2207 bp, Zea Mays
accgttcagactctcaaactccctcgattgtaataacagagaaaaaaaccatccgccggaggccggagggcagattctccaccatcgcctccactccaccctcactacgcgaatccgcggcgaacccccctctcggattccttctctcctccccgccccgatcgcgtcgtccagagaccgccaggctccggcgcccccgcccgcccgggctcgccgggggtcgggatgccctgctgctcgccgtcgctgctcggagtcgggccgcggattggttgtgcgctgattgggtcacttggggcattgttcaatggggttcttgtgatcaacctagtgattggtctatttgctgttgttgcaatcgagagcagcagccagagacttggccggacatatgctgtccttctcttctttgctgtcgtccttgacgttgcttggtttatactcttctcccatgctatctggtatgtcttcggtagccaccatctatcagtttagttaccctgatgttttcatttggtacaatgtgaagtttggcacctagaaaggaatgttgtattctctatattcgaatgcttaattgactgattttttgactgggtttctttattcatctttcaccatgacataactaattgttttcaatgttgtataacagttgatctgtcaatgacttgtcatgcaatgactacctatataggttctgagttctaatatatcactagagtcattactatgatcattgaaacttagaactttgaagcacaagttgttcggtactccatcaagtgaagctttagcatgtgtgatcatatattctaaaccattgctttcatatgtttaggaacatttaaattatacttgcaaaattatatgtatagatttgtcgtcaaattttattttggtaacattctaattttgcaaggtttaataaagttgttacagtagaggttagtttggcatcatgtatcagtgtgaaaagcattacttgttgtgacatgactgactggaaagtgcatgtgttctattggacaagtgtagagaatttttcttatataatttttgttaggcacggcaacattcttgtagtgttataatctgtttcctaactttgtcttctaattatacaggactattaatcctgatgagaagtatggtgaactttttgttttctcactcagactagcattgtggatgcaaataattgggttttcagttaggtttttgtcttcattcttatggattcaaatgtatagattaggggcttcttccagcacgccaacatattttgaaaccaaccatgaagcaagaattagtttcttaagccctagatctgattcagttagacggagtcctacggcagatgatatattgggaggttcgatctatgatccttcttactactcgtcactgttcgaggatgtccgaaacaatgcatgcaatcatcagggtgataaacaaagtggtagtaatgacagtggttcaacatctgcaggccagacaccacgacttaaatcttttgctaatgatgtggaaggtggactaaaaagaccgttgaactcctagggataaaacaacgggctcatcttgggaacctaaatcctgtagccaccgttctctttgaagcatagaggtttgcacaccgcagcagtttatttctcagaccagcgggaagggggtgtccaacgaaaggagcttggcaaatactgtaacggcgactgcctgtgttgccgagcatccacagcagcatcggtgccattttggagcaccgttcgtactcagcgagcttgagccggatgtttctgcaaatagctgtccaatgttggtgttgcatatcgacctatgccatgcgatatgtttactgcccatcatgtcccatttttcagacctctcttcctgtttcttttaactaccaaggaaaatgaagcaagtagttcgttagttctttagtcacttagttattttctagctgtaggctggcagttgcttctcttctagcattttggtcattgttcatagcatttgtgttgacaaggaacagatctctagatcagtgaaaggaaacaaatgtaagtttcattctgttctagaaagagctgtgatccctattggatgcatgagttttgttagaaatgttgcagggttttcacacgaaattgttctggacccacaagttatacaagtcaaattagtctatatatttacgcgaa

SEQ ID NO: 21434 - DNA, 1379 bp, Zea Mays
tgctgcactggcacccgggcacgataatgtggtgtggcctctgccggaacgtgctcgtacgcgggctcaaacgccgtgccccgtaccggtgtatcctcgtgctttctgccaactatagttacacatactgccatattatatatgattcatccccataaataaagctccaactcatcattgtcatcgtccaaatttcagttcgagaagactccatcaagcagctcatactcaccaacgcaaattgcaccaagaaatccatcgagaggccgtcgacaggggaattaatggcgtcgtcgtctagcagcagccaccgccgcctcatcctcgcagccgccgtcctgctctccgtgctcgcggctgccagcgccagcgccgggacctcctgcgtgccggggtgggccatcccgcacaacccgctcccgagctgccgctggtacgtgaccagccggacctgcggcatcgggccgcgcctcccgtggccggagctgaagaggagatgctgccgggagctggcggacgcgcagctggagggccgcctagaggacctgccgggctgcccgcgggaggtgcagaggggattcgccgccaccctcgtcacggaggccgagtgcaacctggccaccatcagcggcgtcgccgaatgcccctggattctcggcggcggaacgatgccctccaagtaactgcgaagagcatagtgcatgaggaatgagcttgtagctagctcatatgtctgaataataagcacagcaagaagatgaatgcatttctcggatcgttcatccggaacaataattaaaggggatccggatttgttcttgtgatataattaacgattcctgttatacttggaagtagctaggctcgtccccatccaatgcaagcaaagatctgatctcccaacgtgcatgagaaaatgtgagcgatttacttcaccggtccttcctctaattaaatggaaatgtgaagtggaacataagaaattaaggtgaagccaaaagctgccaattgatgtatatataatgcatttgtgtgctttttgctgaaatggagtcttgtgaaacagaaatctggaggatgcaagctaccagttttgaagatttgtttttttatatatagggccagttgaagatttgtttgaacagaatttgggggtacacaggttgcaaccagtgttttgcttggcagcatgaggggactttgcagccgtcattgctgatcacatatctatcacacctagaattttgttggcgctgattcggtcaccaatcactacgatgcgtacctacggcgatgctctctgcggacacatggatggtccacggccgagggctggaagatcctcgacctggcgcagaggctagggtttctgcctaacg

SEQ ID NO: 21435 - DNA, 1117 bp, Zea Mays
gtttctctcctccaacagagcattgggccaaggtatggcaccaccgttcgtggagcgcttcaccgttcagtcgccaaccttgtcgaactccggccacaccgaagccacgatgcaagttgattgggagagggagatgtcggtgtatgaaccagggagatctcaagaggtttcgcgtacaacggatggaggacaatacaatagtaacttgatgaatcgggatgacagtaacttttctttggacgaccttgatagccctcccatgcagcagccttcgcccatggttcgctcatcaagaccaaaccataaaaggtccaaaattttcactgaacatgaggatgcattacttgtgtcagcatggttgaatattagtttggatccagtgcacggcactaatcagacaaagggtactttttggtagagagtttataattacttccatagcaacaaggactttgaatcggatcggaactagtgttcgctaacacatagatggggggctattcaggacatcgtgaacaagttctgtggatgtctaaaaaggattgaggatagaaggcaaagtgagattacttttcaagacaagcttgtccaagcaatgactttgtttaaagaagaggacaaagaccataaagctttccaattcatgcattgctggaataagttgcacaatcaaccaaagtggcatgaggagcgcattcaaatggaggatataaaaaacaaggaaataagaaacataaggcaaacatggattcaagtcctggaacagccaccacactgacttgtgatattaggacagatcttgtcattgagaattcagctccagagatagacgcccccccaagagacaaaatggtaagaagaaggacaaacaagcattgcgctgaggactgcaaagtgaggcttacatggaggcttcaaatcatttctgggccaaaaaacaggagtttgatgtggtcatgtggataaagaaaagaagaaaggttcaatctgtcatatgaacttgagaaagaaaaggcttcagctagaggcaaaaatgaaatgcatgtgaaacgaatattagaggaagagaggattatgacaatggatatcacttcaatgccaaactacaaaatgagat

SEQ ID NO: 21436 - DNA, 1577 bp, Zea Mays
acggagcctacataacccttcccttcctcgcttccctcctccccgcgccgccataccctcgaacccgagaggaaccctaacaccaaaacgcccccggaggcagctaggagagctcgaatcaccagccatgtcggagcacgacctcacggcgctgatggcggcgcagctggaccgccacctggtgttccccctgctggagttcctccaggagcggcagctctactcggagtcggagatcctggaggccgcagccccgctcgtcgccttcctccagaacccgcagctcgtgcaggagttcaggcccgacaaacagtacaacatccacatgctccaggagcgataccagatcggtcctgaccagattgaagctctgtatcagtatgccaaatttcagtttgagtgtggtaactactcaggggctgctgattacctttaccagtatcgtgctttgtgcacaaacagtgagcgaaatgtgagtgccctctggggaaagctggcagcagaaatcctaatgcagaactgggacgtagctttggaggaactcaaccgcttgaaggaaataattgattcaaagaacttctcatcacctctgaatcagctccagaacaggatatggctgatgcattgggctctgttcatcttctttaaccatgaaaatggtagaaatgggatcattgatctgttcttccaggacaggtacttgaatgctatacagacaaatgcacaccatcttattaggtatctagctactgcagttgttgtcaacaaaaggagaaggaatatgcttaaagagttgattaaggtcattcaacaggagcaccatagctacaaggatcccgtaactgaatttctggaatgcttatatgttaactatgattttgatggtgctcaacagaaactcatagagtgtgagcaggttatactgaatgatccattcctgggaaagcgcattgaagagggaaattttgtcagtgttcctttgagagatgagttccttgaaaatgctaggctttttattttcgagacatactgccgtatccatcggtgcatcgatatcagcatgcttgctcagaagttgaacatgagctacgatgaggccgagttgtggatcatgaatttggttagaagctcaaaactggatgccaggatcgattcagtatcaggaactctcatcatgacaaccaatcacgtcaatgtccatgagcagattgttgagagcttgaagggccttaatatgaggacctacatgctcgcaaagaacatcgttgagccagctcagcaggcaactcggtgaggatagcagacttcacagttttgagacgccaaggactagtttagagacaactgtaaacttttcgagctctattgtgtggcattggatttcaacacctggaaggtggcttgccgtttgatacagcttggagtattatgctgacattttcaatattttgtaatcggaacttcgtaacagtggatccttctcaatgtattgctattattttatgctgacattttcaacatctttctctattagtttgattaccatctgttttgttgaatttatgaatggtagtgca

SEQ ID NO: 21437 - DNA, 1822 bp, Zea Mays
cattccttccccaactctctgcaccagcaccttcccatggcgcagggttcccaggcgtccatcctctctcccttcttcccttgtgcaggcgcccccatctcctccccttttctgcagcaagcagcgcccagctgagccccgtccactcgcccagccctatctccctcacggcgccctcgctggtgctcgccccccctgctggatgccgctcctcaccctggtggccgagctctcccatggacgtcagccctcatcctcaggttgcccctcccaaggcgtttgttcctgcccaaccatggacgcgcccctcccttttgctgctcgtcgtggacaggcttggcgccctaatcctcaggttgcccctcccatgacggtcatggtgtcatctgttatcggaggaaaaatccctaggaatccgaaggtgatgaagtgatgccccagtgcagcgcctggtaggtgtccggtggaacgcctaagccaggactattgtcgttcttatgaacctggtatcgattgaggtacgctagttgatcacgtgatgcagaattcaagaattgagttgatctcaagatgatgaaatgatgaactactccgacaaacgatgtctgtgaatcaatcctactactatacaggttcttagagaaaacgtttattgtgcaataaatgatggaattatcaaccttattgacaaggtacgctagctgaaaaatcgtgcgaagcgaagggtgtggatcaaaacaacccacaagacaatgtgaggtgttcatatgtgtctaactaaaaatttgttgcccaaagtttaatgtattcatttttggctaatattacatgttggccaaacgcttggaacaatggaactattgcaaattcctttttacagactacaacttctatcgaactaggtacaactaacaaatcttctgccaatgcatataacatatgtttattgcttccagcacacatcacttgccatgtcacaactccaactatattcactgcaacttttccatatttttcagcaatttgcataacagtacattgcattgcagttaaatgaatcttccatattcaaatttagagaaccttgccacttaggtctgcacacaagattttatcaacaatatgatttgtacataaagagaaaaagttccctgctgtaaacgactaaaaaaaagttccctgctgtaaacacacaacaaatcttccaagaactgaatattgcctcatatcatcatcaatatctacagttgtagaatgtctattttgcatgctctgtataattatatatgtacatatgtttaggccttcaaaaacaactcatctccatatgctactgcagatgctgaaacagaccaactagccttgcacaactcaactaacactgttttatatgagctttcctatttcagaactattgtaagatttatgtaaatacataaattaggacatgctgacatgttattgcaggtggtcaaggctcaggattcagagtagaagatgcacataaatactggtgaatgatgccatcgacgatgatgaactgatgaaacgatggatgatgccatcgatgaaagatggaatggaactcaaattttggtggtcgcacaagtgtggagacttgaattcatatatacttagttaggctcaatgttagcacaaacagttgatgagcaagtttttccattagtagtttagtttgaatttagagtacaattatgtatgagttatttgacagtgcttatttatgagatattgaatgatatttatctatattgtattaattatagtgttattaaatatatgtgtttgtatttttttctct

SEQ ID NO: 21438 - DNA, 1162 bp, Zea Mays
cattccttccccaactctctgcaccagcaccttcccatggcgcagggttcccaggcgtccatcctctctcccttcttcccttgtgcaggcgcccccatctcctccccttttctgcagcaagcagcgcccagctgagccccgtccactcgcccagccctatctccctcacggcgccctcgctggtgctcgccccccctgctggatgccgctcctcaccctggtggccgagctctcccatggacgtcagccctcatcctcaggttgcccctcccaaggcgtttgttcctgcccaaccatggacgcgcccctcccttttgctgctcgtcgtggacaggcttggcgccctaatcctcaggttgcccctcccatgacggtcatggtgtcatctgttatcggaggaaaaatccctaggaatccgaaggtgatgaagtgatgccccagtgcagcgcctggtaggtgtccggtggaacgcctaagccaggactattgtcgttcttatgaacctggtatcgattgaggtacgctagttgatcacgtgatgcagaattcaagaattgagttgatctcaagatgatgaaatgatgaactactccgacaaacgatgtctgtgaatcaatcctactactatacaggttcttagagaaaacgtttattgtgcaataaatgatggaattatcaaccttattgacaaggttgcccaaagtttaatgtattcatttttggctaatattacatgttggccaaacgcttggaacaatggaactattgcaaattcctttttacagactacaacttctatcgaactaggtggtcaaggctcaggattcagagtagaagatgcacataaatactggtgaatgatgccatcgacgatgatgaactgatgaaacgatggatgatgccatcgatgaaagatggaatggaactcaaattttggtggtcgcacaagtgtggagacttgaattcatatatacttagttaggctcaatgttagcacaaacagttgatgagcaagtttttccattagtagtttagtttgaatttagagtacaattatgtatgagttatttgacagtgcttatttatgagatattgaatgatatttatctatattgtattaattatagtgttattaaatatatgtgtttgtatttttttctct

SEQ ID NO: 21439 - DNA, 1229 bp, Zea Mays
cattccttccccaactctctgcaccagcaccttcccatggcgcagggttcccaggcgtccatcctctctcccttcttcccttgtgcaggcgcccccatctcctccccttttctgcagcaagcagcgcccagctgagccccgtccactcgcccagccctatctccctcacggcgccctcgctggtgctcgccccccctgctggatgccgctcctcaccctggtggccgagctctcccatggacgtcagccctcatcctcaggttgcccctcccaaggcgtttgttcctgcccaaccatggacgcgcccctcccttttgctgctcgtcgtggacaggcttggcgccctaatcctcaggttgcccctcccatgacggtcatggtgtcatctgttatcggaggaaaaatccctaggaatccgaaggtgatgaagtgatgccccagtgcagcgcctggtaggtgtccggtggaacgcctaagccaggactattgtcgttcttatgaacctggtatcgattgaggtacgctagttgatcacgtgatgcagaattcaagaattgagttgatctcaagatgatgaaatgatgaactactccgacaaacgatgtctgtgaatcaatcctactactatacaggttcttagagaaaacgtttattgtgcaataaatgatggaattatcaaccttattgacaaggtacgctagctgaaaaatcgtgcgaagcgaagggtgtggatcaaaacaacccacaagacaatgtgaggttgcccaaagtttaatgtattcatttttggctaatattacatgttggccaaacgcttggaacaatggaactattgcaaattcctttttacagactacaacttctatcgaactaggtggtcaaggctcaggattcagagtagaagatgcacataaatactggtgaatgatgccatcgacgatgatgaactgatgaaacgatggatgatgccatcgatgaaagatggaatggaactcaaattttggtggtcgcacaagtgtggagacttgaattcatatatacttagttaggctcaatgttagcacaaacagttgatgagcaagtttttccattagtagtttagtttgaatttagagtacaattatgtatgagttatttgacagtgcttatttatgagatattgaatgatatttatctatattgtattaattatagtgttattaaatatatgtgtttgtatttttttctct

SEQ ID NO: 21440 - DNA, 1224 bp, Zea Mays
cattccttccccaactctctgcaccagcaccttcccatggcgcagggttcccaggcgtccatcctctctcccttcttcccttgtgcaggcgcccccatctcctccccttttctgcagcaagcagcgcccagctgagccccgtccactcgcccagccctatctccctcacggcgccctcgctggtgctcgccccccctgctggatgccgctcctcaccctggtggccgagctctcccatggacgtcagccctcatcctcaggttgcccctcccaaggcgtttgttcctgcccaaccatggacgcgcccctcccttttgctgctcgtcgtggacaggcttggcgccctaatcctcaggttgcccctcccatgacggtcatggtgtcatctgttatcggaggaaaaatccctaggaatccgaaggtgatgaagtgatgccccagtgcagcgcctggtaggtgtccggtggaacgcctaagccaggactattgtcgttcttatgaacctggtatcgattgaggtacgctagttgatcacgtgatgcagaattcaagaattgagttgatctcaagatgatgaaatgatgaactactccgacaaacgatgtctgtgaatcaatcctactactatacaggttcttagagaaaacgtttattgtgcaataaatgatggaattatcaaccttattgacaaggtacgctagctgaaaaatcgtgcgaagcgaagggtgtggatcaaaacaacccacaagacaatgttgcccaaagtttaatgtattcatttttggctaatattacatgttggccaaacgcttggaacaatggaactattgcaaattcctttttacagactacaacttctatcgaactaggtggtcaaggctcaggattcagagtagaagatgcacataaatactggtgaatgatgccatcgacgatgatgaactgatgaaacgatggatgatgccatcgatgaaagatggaatggaactcaaattttggtggtcgcacaagtgtggagacttgaattcatatatacttagttaggctcaatgttagcacaaacagttgatgagcaagtttttccattagtagtttagtttgaatttagagtacaattatgtatgagttatttgacagtgcttatttatgagatattgaatgatatttatctatattgtattaattatagtgttattaaatatatgtgtttgtatttttttctct

SEQ ID NO: 21441 - DNA, 1727 bp, Zea Mays
cattccttccccaactctctgcaccagcaccttcccatggcgcagggttcccaggcgtccatcctctctcccttcttcccttgtgcaggcgcccccatctcctccccttttctgcagcaagcagcgcccagctgagccccgtccactcgcccagccctatctccctcacggcgccctcgctggtgctcgccccccctgctggatgccgctcctcaccctggtggccgagctctcccatggacgtcagccctcatcctcaggttgcccctcccaaggcgtttgttcctgcccaaccatggacgcgcccctcccttttgctgctcgtcgtggacaggcttggcgccctaatcctcaggttgcccctcccatgacggtcatggtgtcatctgttatcggaggaaaaatccctaggaatccgaaggtgatgaagtgatgccccagtgcagcgcctggtaggtgtccggtggaacgcctaagccaggactattgtcgttcttatgaacctggtatcgattgaggtacgctagttgatcacgtgatgcagaattcaagaattgagttgatctcaagatgatgaaatgatgaactactccgacaaacgatgtctgtgaatcaatcctactactatacaggttcttagagaaaacgtttattgtgcaataaatgatggaattatcaaccttattgacaaggttgcccaaagtttaatgtattcatttttggctaatattacatgttggccaaacgcttggaacaatggaactattgcaaattcctttttacagactacaacttctatcgaactaggtacaactaacaaatcttctgccaatgcatataacatatgtttattgcttccagcacacatcacttgccatgtcacaactccaactatattcactgcaacttttccatatttttcagcaatttgcataacagtacattgcattgcagttaaatgaatcttccatattcaaatttagagaaccttgccacttaggtctgcacacaagattttatcaacaatatgatttgtacataaagagaaaaagttccctgctgtaaacgactaaaaaaaagttccctgctgtaaacacacaacaaatcttccaagaactgaatattgcctcatatcatcatcaatatctacagttgtagaatgtctattttgcatgctctgtataattatatatgtacatatgtttaggccttcaaaaacaactcatctccatatgctactgcagatgctgaaacagaccaactagccttgcacaactcaactaacactgttttatatgagctttcctatttcagaactattgtaagatttatgtaaatacataaattaggacatgctgacatgttattgcaggtggtcaaggctcaggattcagagtagaagatgcacataaatactggtgaatgatgccatcgacgatgatgaactgatgaaacgatggatgatgccatcgatgaaagatggaatggaactcaaattttggtggtcgcacaagtgtggagacttgaattcatatatacttagttaggctcaatgttagcacaaacagttgatgagcaagtttttccattagtagtttagtttgaatttagagtacaattatgtatgagttatttgacagtgcttatttatgagatattgaatgatatttatctatattgtattaattatagtgttattaaatatatgtgtttgtatttttttctct

SEQ ID NO: 21442 - DNA, 3751 bp, Zea Mays
accccagcatatcctccgtcggtgctcaggaccgacagtgagcactcactgccaagcgggccctgcacggcccccagttcacccttcttccacctcccgcctcactggcacactctccccgacacaactcggcttaaactaatccgaacccatcccaccagacgcgcgcaaattaactagaatcaaaatcgtctcgctgctgcaataatcttttatcaattcttaatccctcgcgtcgaaagcgacagcggaaccaactcacgttgccgcggcttcctccatcggtgcggtgccctgtccttttctctcctccacctccctagtccctcctcccccccgcatacatagctactactagtagcaccacgctcgcagcgggagatgcggtgctgatccgtgcccctgctcggatctcgggagtggtgccgacttgtgtcggctcggctctgcctaggccagctccttgtcggttctgggcgagctcgcctgccatggagggcgacgcggacggcgtgaagtcggggaggcgcgggggagggcaggtgtgccagatctgcggcgatggcgtgggcactacggcggagggagacgtcttcaccgcctgcgacgtctgcgggttcccggtgtgccgcccctgctacgagtacgagcgcaaggacggcacacaagcgtgcccccagtgcaaaaacaagtacaagcgccacaaggggagtccagcgatccgaggggaggaaggagacgatactgatgccgatgatgctagcgacttcaactaccctgcatctggcaatgacgaccagaagcagaagattgctgacaggatgcgcagctggcgcatgaatgctgggggcagcggggatgttggccgccccaagtatgacagtggtgagatcgggcttaccaagtacgacagtggtgagatccctcggggatacatcccgtcagtcactaacagccagatttcgggagaaatccctggtgcttcccctgaccatcatatgatgtctcctactgggaacattggcaggcgcgccccatttccctatatgaatcattcatcaaatccgtcgagggaattctctggtagcgttgggaatgttgcctggaaagagagggttgatggctggaaaatgaagcaggacaagggaacaattcccatgacgaatggcacaagcattgctccctctgagggccggggtgttggtgatattgatgcatcaactgattacaacatggaagatgccttattaaacgatgaaactcgccagcctctatctaggaaagttccacttccttcctccaggataaatccatacaggatggtcattgtgctacgattgattgttctaagcatcttcttgcactaccggatcacaaatcctgtgcgtaatgcatacccactgtggcttctatctgttatatgtgagatctggtttgctctttcctggatattggatcagtttccaaagtggtttccaatcaaccgcgagacttaccttgatagactcgcattaaggtatgaccgggaaggtgagccatctcagttggctgctgttgacatttttgtcagtactgtcgacccaatgaaggagcctcctcttgtcactgccaataccgtgctatccattctcgctgtggactatcctgtggataaggtctcttgctatgtatctgatgatggagctgctatgctgacatttgatgcactagctgagacttcagagtttgctagaaaatgggtgccatttgttaagaagtacaacattgaacctagagctcctgaatggtacttctcccagaaaattgattacttgaaggacaaagtgcacccttcatttgttaaagaccgccgggccatgaagagagaatatgaagaattcaaaattagggtaaatggccttgttgctaaggcacaaaaagtccctgaggaaggatggatcatgcaagatggcacaccatggccaggaaacaataccagggaccatcctggaatgattcaggttttccttggtcacagtggtggtcttgatactgagggtaatgagctaccccgtttggtctatgtttctcgtgaaaaacgtcctggattccagcatcacaagaaagctggtgccatgaatgctcttgtccgcgtctcagctgtgcttaccaatggacaatacatgttgaatcttgattgtgatcactacatcaacaacagtaaggctctcagggaagctatgtgcttccttatggatcctaacctaggaaggagtgtctgctatgttcagtttccccagaggttcgatggtattgataggaatgatcgatatgccaacaggaacaccgtgtttttcgatattaacttgagaggtcttgatggcatccaaggaccagtttatgtgggcactggctgtgttttcaacagaacagctctatatggttatgagcccccaattaagcaaaagaagggtggtttcttgtcatcactatgtggtggcaggaagaagggaagcaaatcaaagaagggctcagacaagaaaaagtcacagaagcatgtggacagttctgtgccagtattcaatcttgaagatatagaggagggagttgaaggcgctggatttgatgatgagaaatcacttcttatgtctcaaggggaagttcatcatcccagagatcagcaacttcgctagtatctggttcatctctctcttcatctcgatcttcgccacgggtatcctggagatgaggtggagcggcgtgggcatcgacgagtggtggaggaacgagcagttctgggtcatcggaggcatctccgcccacctcttcgccgtcttccagggcctcctcaaggtgcttgccggcatcgacaccaacttcaccgtcacctccaaggcctcggatgaagacggcgacttcgcggagctgtacatgttcaagtggacgacacttctgatcccgcccaccaccatcctgatcatcaacctggtcggcgttgttgccggcatctcctacgccatcaacagcgggtaccagtcgtggggtccgctcttcggcaagctcttcttcgccttctgggtgatcgttcacctgtacccgttcctcaagggtctcatgggtcggcagaaccgcaccccgaccatcgtggttgtctgggcgatcctgctggcgtcgatcttctccttgctgtgggttcgcatcgatccgttcaccacccgcgtcactggcccggatactcgaacgtgtggcatcaactgctagggaggtggaaggtttgtagaaacagagagataccacgaatgtgccgctgccacaaattgtctgttagtaagttatataggcaggtggcgttatttacagctacgtacacacaaggggatactccgtttatcactggtgtgcattcttttgttgatataagttactatatatacgtattgcttctactttgtggagagtggctgacaggaccagttttgtaatgttatgaacagcaaagaaataagttagtttccattctttcaaatgagcacacacataggacatgtttggttcgacatttttaccaatgattccaatgcataacactattttatgttagtaagttatccagttgcattaccgttcctaaactccttgttgaaacaaacaacaccataatctcattgtaggtgttgatgcaccttgttaaggtagtgtttggtttcggagtatggtgggacggagccgctccgatcctaatttgttgttatttggattggtttcatatagg

SEQ ID NO: 21443 - DNA, 2968 bp, Zea Mays
gtgaaatcaggaatcaggaaaggaaaggagcaaccgccgctctctccatccatcgccttccccatctcccccagttcccctcgtcgtcgcttcttccaaaccctagcggcctagcctgcctcctacctcgcccgccgacctatctctgccagtcctattccccgcggcagcgcgggatctcctcgctcccgtcgctccctgcacctacggtacaaccgctccatccaaacgagatccagcggatggaacccccggcggcgaaggaggcgccgccacttcagcctgcggcggaggaggacgcgatgctctctgcgacggcggccatggcgaaggaagccgctgtagcgttccagggctgccgctacgccgactgtgccgcagtgctcacgaggctgctggacaagaaagagggcgatctcaaggtacaccataacatggccatcactgaattcttcttggatgattgtcctgattcaaacaggctgcttaaaattcttggtgattttaagagaagaagtgaagagcttgcatgtgcatctagagaacaagctgattctgctaatggggtaggaaacagcgctcattcaggatcaagagggagtggtgctttactacctttttcctctacacataatgcgtcaacttatggggatgaatttgacacgaccataattacattcaacatggctgtcatcctatatcatcttcatgactatgaatctgcactatctgttttggacccactgtaccgaaacattgaaccaatggacgagctttgcaagatgcaacaaaggctgtggatatagtacagtacttggaaaggtcgtttggagtagctaacacaatgaacccgaatgaaaatgcaagcatagctcagcagcaattagctcaagcgaagcctcctgtgaaaattagcatgcctccagattccgattcaaatgcttatgctggtggatatgagaacctttcgtcaggaattttcccagatgagcaaatagaatttgaatctctatgctctagttttgatggacatcagaatgtgggcaggcgtatcttgaatgatttctcaagggcgtctgctgatcttgctgctactgctgctgatttgaaagttagacttcagatttacaaggtccgtcttctactgctcactaggaaccttaaggttgcgaagcgagaactcaaagtactaatgaacatggcacgtggtagggattcatctacagagcttctcttgaaatctcagctggagtatgcccgggggaattataggaaggctgtgaagctattgagcacaccaaataatcggactgaaccagcaatgctagccattttccacaacaacatgggatgtatactccaccaacagagatcgtatcacgcctctatatggtgctttagcaaagcgctgaaatacagcttatcatttcgttcagagaaaccaatgaagttgtctacattatcacaagacaagtcttgccttatttcatacaactgtggtatccaacatttgatgtgtgggaagcctttgttagcagcttcttgttttcgtgaagccatgccgctcttctacaagcgaccccttttctggctccgtttttctgagtgcagcctgctagctctagaaaagggtctcctgtgtgcaaatggtgcttcctcattcaacgatgagattgaaatcaatgttgtggggtcaggacaatggaggcagttgattgtcaacccagtgaactcgagaagtaatttagattctgcaggtgtgactttaggcgaacataaaaatttggtttcacttggatttgctagacagtgtctacaaaatgcgctgctattattggatgctactgagaaggaaaattgggtaatcgcatctgatacagaggattgggaccaaggaaccgtacatggatataaaagctcaggccagaagaatactacaagtacagattctaaaacaccttcaggcccaactctagctaatgtaaatggagaacaaaagggcacaagcttgaatgctaccttgcagagttctcttgctttctatgacgagatccgtagaaaagagtacatcaaaatcagacaggctgtcctggcgaacttggcatttgttgaattgtgccttgataatcccttgaaaactttgacgtatgcaaagtcagtactgcaggtgacagactgttccaggatgtatgcgttcctcagccatgtatacgcagccgaagctctatgtactttgaacagaacagaggatgccgccgagaatctatcagtttatataagagatggtaatcatgtcgagttgccttatagtgtggagaattctgaaaaggccttggttgagaaagacagtgatggtgaagacttggttgctcctgcagtgacaaaactcgccacagaagaacctgagcagctcaggccggaggaggcccgtggtgtcctgtatatcaaccttggcatgattgctgcaaggcagggagaagttgaaaaagccaactacatggtgagccgtggcctggcgatgttgcccaacaacccccgggcagtgctagcatcggtttacgtagaccttttgcaagggaagtcccaggaagctgtcgtgaagttgagacggtgtaggaatgtgagatttagacccgctagcatagcagccagcagtcagcagtcgagcttagaaaagcctcccctttcatgatttctgtagtttacaattaccgttataatcttttttggaccctgaccccaatgtggatgatcaaagatggtaatgcttctcctgtgtaacatatataagaaatgaactctaactccccttctagctccctcccagattcaggggtggaatgtgttggaactgtaccgttttaatttgccctctttggactgaagagagccaagtgatcaaaatagtttcctatgtttattcaagaatttggaaaataatgtgcagtcagcagctgttcatctgaac

SEQ ID NO: 21444 - DNA, 3103 bp, Zea Mays
caggaatcaggaaaggaaaggagcaaccgccgctctctccatccatcgccttccccatctcccccagttcccctcgtcgtcgcttcttccaaaccctagcggcctagcctgcctcctacctcgcccgccgacctatctctgccagtcctattccccgcggcagcgcgggatctcctcgctcccgtcgctccctgcacctacggtacaaccgctccatccaaacgagatccagcggatggaacccccggcggcgaaggaggcgccgccacttcagcctgcggcggaggaggacgcgatgctctctgcgacggcggccatggcgaaggaagccgctgtagcgttccagggctgccgctacgccgactgtgccgcagtgctcacgaggctgctggacaagaaagagggcgatctcaaggtacaccataacatggccatcactgaattcttcttggatgattgtcctgattcaaacaggctgcttaaaattcttggtgattttaagctgcacttttttttgatattttgctggcgcacggggaacgctcgctacacgcatggggagggggacgacacacgacgaaactcacattttatatcaagaagaagtgaagagcttgcatgtgcatctagagaacaagctgattctgctaatggggtaggaaacagcgctcattcaggatcaagagggagtggtgctttactacctttttcctctacacataatgcgtcaacttatggggatgaatttgacacgaccataattacattcaacatggctgtcatcctatatcatcttcatgactatgaatctgcactatctgttttggacccactgtaccgaaacattgaaccaatggacgagccaactgctcttcatgtatgctttctattattggatattacattagctttgcaagatgcaacaaaggctgtggatatagtacagtacttggaaaggtcgtttggagtagctaacacaatgaacccgaatgaaaatgcaagcatagctcagcagcaattagctcaagcgaagcctcctgtgaaaattagcatgcctccagattccgattcaaatgcttatgctggtggatatgagaacctttcgtcaggaattttcccagatgagcaaatagaatttgaatctctatgctctagttttgatggacatcagaatgtgggcaggcgtatcttgaatgatttctcaagggcgtctgctgatcttgctgctactgctgctgatttgaaagttagacttcagatttacaaggtccgtcttctactgctcactaggaaccttaaggttgcgaagcgagaactcaaagtactaatgaacatggcacgtggtagggattcatctacagagcttctcttgaaatctcagctggagtatgcccgggggaattataggaaggctgtgaagctattgagcacaccaaataatcggactgaaccagcaatgctagccattttccacaacaacatgggatgtatactccaccaacagagatcgtatcacgcctctatatggtgctttagcaaagcgctgaaatacagcttatcatttcgttcagagaaaccaatgaagttgtctacattatcacaagacaagtcttgccttatttcatacaactgtggtatccaacatttgatgtgtgggaagcctttgttagcagcttcttgttttcgtgaagccatgccgctcttctacaagcgaccccttttctggctccgtttttctgagtgcagcctgctagctctagaaaagggtctcctgtgtgcaaatggtgcttcctcattcaacgatgagattgaaatcaatgttgtggggtcaggacaatggaggcagttgattgtcaacccagtgaactcgagaagtaatttagattctgcaggtgtgactttaggcgaacataaaaatttggtttcacttggatttgctagacagtgtctacaaaatgcgctgctattattggatgctactgagaaggaaaattgggtaatcgcatctgatacagaggattgggaccaaggaaccgtacatggatataaaagctcaggccagaagaatactacaagtacagattctaaaacaccttcaggcccaactctagctaatgtaaatggagaacaaaagggcacaagcttgaatgctaccttgcagagttctcttgctttctatgacgagatccgtagaaaagagtacatcaaaatcagacaggctgtcctggcgaacttggcatttgttgaattgtgccttgataatcccttgaaaactttgacgtatgcaaagtcagtactgcaggtgacagactgttccaggatgtatgcgttcctcagccatgtatacgcagccgaagctctatgtactttgaacagaacagaggatgccgccgagaatctatcagtttatataagagatggtaatcatgtcgagttgccttatagtgtggagaattctgaaaaggccttggttgagaaagacagtgatggtgaagacttggttgctcctgcagtgacaaaactcgccacagaagaacctgagcagctcaggccggaggaggcccgtggtgtcctgtatatcaaccttggcatgattgctgcaaggcagggagaagttgaaaaagccaactacatggtgagccgtggcctggcgatgttgcccaacaacccccgggcagtgctagcatcggtttacgtagaccttttgcaagggaagtcccaggaagctgtcgtgaagttgagacggtgtaggaatgtgagatttagacccgctagcatagcagccagcagtcagcagtcgagcttagaaaagcctcccctttcatgatttctgtagtttacaattaccgttataatcttttttggaccctgaccccaatgtggatgatcaaagatggtaatgcttctcctgtgtaacatatataagaaatgaactctaactccccttctagctccctcccagattcaggggtggaatgtgttggaactgtaccgttttaatttgccctctttggactgaagagagccaagtgatcaaaatagtttcctatgtttattcaagaatttggaaaataatgtgcagtcagcagctgttcatctgaac

SEQ ID NO: 21445 - DNA, 2916 bp, Zea Mays
aatcaggaaaggaaaggagcaaccgccgctctctccatccatcgccttccccatctcccccagttcccctcgtcgtcgcttcttccaaaccctagcggcctagcctgcctcctacctcgcccgccgacctatctctgccagtcctattccccgcggcagcgcgggatctcctcgctcccgtcgctccctgcacctacggtacaaccgctccatccaaacgagatccagcggatggaacccccggcggcgaaggaggcgccgccacttcagcctgcggcggaggaggacgcgatgctctctgcgacggcggccatggcgaaggaagccgctgtagcgttccagggctgccgctacgccgactgtgccgcagtgctcacgaggctgctggacaagaaagagggcgatctcaagagaagaagtgaagagcttgcatgtgcatctagagaacaagctgattctgctaatggggtaggaaacagcgctcattcaggatcaagagggagtggtgctttactacctttttcctctacacataatgcgtcaacttatggggatgaatttgacacgaccataattacattcaacatggctgtcatcctatatcatcttcatgactatgaatctgcactatctgttttggacccactgtaccgaaacattgaaccaatggacgagccaactgctcttcatgtatgctttctattattggatattacattagctttgcaagatgcaacaaaggctgtggatatagtacagtacttggaaaggtcgtttggagtagctaacacaatgaacccgaatgaaaatgcaagcatagctcagcagcaattagctcaagcgaagcctcctgtgaaaattagcatgcctccagattccgattcaaatgcttatgctggtggatatgagaacctttcgtcaggaattttcccagatgagcaaatagaatttgaatctctatgctctagttttgatggacatcagaatgtgggcaggcgtatcttgaatgatttctcaagggcgtctgctgatcttgctgctactgctgctgatttgaaagttagacttcagatttacaaggtccgtcttctactgctcactaggaaccttaaggttgcgaagcgagaactcaaagtactaatgaacatggcacgtggtagggattcatctacagagcttctcttgaaatctcagctggagtatgcccgggggaattataggaaggctgtgaagctattgagcacaccaaataatcggactgaaccagcaatgctagccattttccacaacaacatgggatgtatactccaccaacagagatcgtatcacgcctctatatggtgctttagcaaagcgctgaaatacagcttatcatttcgttcagagaaaccaatgaagttgtctacattatcacaagacaagtcttgccttatttcatacaactgtggtatccaacatttgatgtgtgggaagcctttgttagcagcttcttgttttcgtgaagccatgccgctcttctacaagcgaccccttttctggctccgtttttctgagtgcagcctgctagctctagaaaagggtctcctgtgtgcaaatggtgcttcctcattcaacgatgagattgaaatcaatgttgtggggtcaggacaatggaggcagttgattgtcaacccagtgaactcgagaagtaatttagattctgcaggtgtgactttaggcgaacataaaaatttggtttcacttggatttgctagacagtgtctacaaaatgcgctgctattattggatgctactgagaaggaaaattgggtaatcgcatctgatacagaggattgggaccaaggaaccgtacatggatataaaagctcaggccagaagaatactacaagtacagattctaaaacaccttcaggcccaactctagctaatgtaaatggagaacaaaagggcacaagcttgaatgctaccttgcagagttctcttgctttctatgacgagatccgtagaaaagagtacatcaaaatcagacaggctgtcctggcgaacttggcatttgttgaattgtgccttgataatcccttgaaaactttgacgtatgcaaagtcagtactgcaggtgacagactgttccaggatgtatgcgttcctcagccatgtatacgcagccgaagctctatgtactttgaacagaacagaggatgccgccgagaatctatcagtttatataagagatggtaatcatgtcgagttgccttatagtgtggagaattctgaaaaggccttggttgagaaagacagtgatggtgaagacttggttgctcctgcagtgacaaaactcgccacagaagaacctgagcagctcaggccggaggaggcccgtggtgtcctgtatatcaaccttggcatgattgctgcaaggcagggagaagttgaaaaagccaactacatggtgagccgtggcctggcgatgttgcccaacaacccccgggcagtgctagcatcggtttacgtagaccttttgcaagggaagtcccaggaagctgtcgtgaagttgagacggtgtaggaatgtgagatttagacccgctagcatagcagccagcagtcagcagtcgagcttagaaaagcctcccctttcatgatttctgtagtttacaattaccgttataatcttttttggaccctgaccccaatgtggatgatcaaagatggtaatgcttctcctgtgtaacatatataagaaatgaactctaactccccttctagctccctcccagattcaggggtggaatgtgttggaactgtaccgttttaatttgccctctttggactgaagagagccaagtgatcaaaatagtttcctatgtttattcaagaatttggaaaataatgtgcagtcagcagctgttcatctgaac

SEQ ID NO: 21446 - DNA, 2878 bp, Zea Mays
gcaaccgccgctctctccatccatcgccttccccatctcccccagttcccctcgtcgtcgcttcttccaaaccctagcggcctagcctgcctcctacctcgcccgccgacctatctctgccagtcctattccccgcggcagcgcgggatctcctcgctcccgtcgctccctgcacctacggtacaaccgctccatccaaacgagatccagcggatggaacccccggcggcgaaggaggcgccgccacttcagcctgcggcggaggaggacgcgatgctctctgcgacggcggccatggcgaaggaagccgctgtagcgttccagggctgccgctacgccgactgtgccgcagtgctcacgaggctgctggacaagaaagagggcgatctcaaggtacaccataacatggccatcactgaattcttcttggatgattgtcctgattcaaacaggctgcttaaaattcttggtgattttaaggctgtcatcctatatcatcttcatgactatgaatctgcactatctgttttggacccactgtaccgaaacattgaaccaatggacgaggtattattagcgattccgtagctttgtcataagagaaaattgtgtcaacactattttttctctcttacagccaactgctcttcatgtatgctttctattattggatattacattagctttgcaagatgcaacaaaggctgtggatatagtacagtacttggaaaggtcgtttggagtagctaacacaatgaacccgaatgaaaatgcaagcatagctcagcagcaattagctcaagcgaagcctcctgtgaaaattagcatgcctccagattccgattcaaatgcttatgctggtggatatgagaacctttcgtcaggaattttcccagatgagcaaatagaatttgaatctctatgctctagttttgatggacatcagaatgtgggcaggcgtatcttgaatgatttctcaagggcgtctgctgatcttgctgctactgctgctgatttgaaagttagacttcagatttacaaggtccgtcttctactgctcactaggaaccttaaggttgcgaagcgagaactcaaagtactaatgaacatggcacgtggtagggattcatctacagagcttctcttgaaatctcagctggagtatgcccgggggaattataggaaggctgtgaagctattgagcacaccaaataatcggactgaaccagcaatgctagccattttccacaacaacatgggatgtatactccaccaacagagatcgtatcacgcctctatatggtgctttagcaaagcgctgaaatacagcttatcatttcgttcagagaaaccaatgaagttgtctacattatcacaagacaagtcttgccttatttcatacaactgtggtatccaacatttgatgtgtgggaagcctttgttagcagcttcttgttttcgtgaagccatgccgctcttctacaagcgaccccttttctggctccgtttttctgagtgcagcctgctagctctagaaaagggtctcctgtgtgcaaatggtgcttcctcattcaacgatgagattgaaatcaatgttgtggggtcaggacaatggaggcagttgattgtcaacccagtgaactcgagaagtaatttagattctgcaggtgtgactttaggcgaacataaaaatttggtttcacttggatttgctagacagtgtctacaaaatgcgctgctattattggatgctactgagaaggaaaattgggtaatcgcatctgatacagaggattgggaccaaggaaccgtacatggatataaaagctcaggccagaagaatactacaagtacagattctaaaacaccttcaggcccaactctagctaatgtaaatggagaacaaaagggcacaagcttgaatgctaccttgcagagttctcttgctttctatgacgagatccgtagaaaagagtacatcaaaatcagacaggctgtcctggcgaacttggcatttgttgaattgtgccttgataatcccttgaaaactttgacgtatgcaaagtcagtactgcaggtgacagactgttccaggatgtatgcgttcctcagccatgtatacgcagccgaagctctatgtactttgaacagaacagaggatgccgccgagaatctatcagtttatataagagatggtaatcatgtcgagttgccttatagtgtggagaattctgaaaaggccttggttgagaaagacagtgatggtgaagacttggttgctcctgcagtgacaaaactcgccacagaagaacctgagcagctcaggccggaggaggcccgtggtgtcctgtatatcaaccttggcatgattgctgcaaggcagggagaagttgaaaaagccaactacatggtgagccgtggcctggcgatgttgcccaacaacccccgggcagtgctagcatcggtttacgtagaccttttgcaagggaagtcccaggaagctgtcgtgaagttgagacggtgtaggaatgtgagatttagacccgctagcatagcagccagcagtcagcagtcgagcttagaaaagcctcccctttcatgatttctgtagtttacaattaccgttataatcttttttggaccctgaccccaatgtggatgatcaaagatggtaatgcttctcctgtgtaacatatataagaaatgaactctaactccccttctagctccctcccagattcaggggtggaatgtgttggaactgtaccgttttaatttgccctctttggactgaagagagccaagtgatcaaaatagtttcctatgtttattcaagaatttggaaaataatgtgcagtcagcagctgttcatctgaac

SEQ ID NO: 21447 - DNA, 2972 bp, Zea Mays
cgctctctccatccatcgccttccccatctcccccagttcccctcgtcgtcgcttcttccaaaccctagcggcctagcctgcctcctacctcgcccgccgacctatctctgccagtcctattccccgcggcagcgcgggatctcctcgctcccgtcgctccctgcacctacggtacaaccgctccatccaaacgagatccagcggatggaacccccggcggcgaaggaggcgccgccacttcagcctgcggcggaggaggacgcgatgctctctgcgacggcggccatggcgaaggaagccgctgtagcgttccagggctgccgctacgccgactgtgccgcagtgctcacgaggctgctggacaagaaagagggcgatctcaaggtacaccataacatggccatcactgaattcttcttggatgattgtcctgattcaaacaggctgcttaaaattcttggtgattttaagaagtgaagagcttgcatgtgcatctagagaacaagctgattctgctaatggggtaggaaacagcgctcattcaggatcaagagggagtggtgctttactacctttttcctctacacataatgcgtcaacttatggggatgaatttgacacgaccataattacattcaacatggctgtcatcctatatcatcttcatgactatgaatctgcactatctgttttggacccactgtaccgaaacattgaaccaatggacgagccaactgctcttcatgtatgctttctattattggatattacattagctttgcaagatgcaacaaaggctgtggatatagtacagtacttggaaaggtcgtttggagtagctaacacaatgaacccgaatgaaaatgcaagcatagctcagcagcaattagctcaagcgaagcctcctgtgaaaattagcatgcctccagattccgattcaaatgcttatgctggtggatatgagaacctttcgtcaggaattttcccagatgagcaaatagaatttgaatctctatgctctagttttgatggacatcagaatgtgggcaggcgtatcttgaatgatttctcaagggcgtctgctgatcttgctgctactgctgctgatttgaaagttagacttcagatttacaaggtccgtcttctactgctcactaggaaccttaaggttgcgaagcgagaactcaaagtactaatgaacatggcacgtggtagggattcatctacagagcttctcttgaaatctcagctggagtatgcccgggggaattataggaaggctgtgaagctattgagcacaccaaataatcggactgaaccagcaatgctagccattttccacaacaacatgggatgtatactccaccaacagagatcgtatcacgcctctatatggtgctttagcaaagcgctgaaatacagcttatcatttcgttcagagaaaccaatgaagttgtctacattatcacaagacaagtcttgccttatttcatacaactgtggtatccaacatttgatgtgtgggaagcctttgttagcagcttcttgttttcgtgaagccatgccgctcttctacaagcgaccccttttctggctccgtttttctgagtgcagcctgctagctctagaaaagggtctcctgtgtgcaaatggtgcttcctcattcaacgatgagattgaaatcaatgttgtggggtcaggacaatggaggcagttgattgtcaacccagtgaactcgagaagtaatttagattctgcaggtgtgactttaggcgaacataaaaatttggtttcacttggatttgctagacagtgtctacaaaatgcgctgctattattggatgctactgagaaggaaaattgggtaatcgcatctgatacagaggattgggaccaaggaaccgtacatggatataaaagctcaggccagaagaatactacaagtacagattctaaaacaccttcaggcccaactctagctaatgtaaatggagaacaaaagggcacaagcttgaatgctaccttgcagagttctcttgctttctatgacgagatccgtagaaaagagtacatcaaaatcagacaggctgtcctggcgaacttggcatttgttgaattgtgccttgataatcccttgaaaactttgacgtatgcaaagtcagtactgcaggtgacagactgttccaggatgtatgcgttcctcagccatgtatacgcagccgaagctctatgtactttgaacagaacagaggatgccgccgagaatctatcagtttatataagagatggtaatcatgtcgagttgccttatagtgtggagaattctgaaaaggccttggttgagaaagacagtgatggtgaagacttggttgctcctgcagtgacaaaactcgccacagaagaacctgagcagctcaggccggaggaggcccgtggtgtcctgtatatcaaccttggcatgattgctgcaaggcagggagaagttgaaaaagccaactacatggtgagccgtggcctggcgatgttgcccaacaacccccgggcagtgctagcatcggtttacgtagaccttttgcaagggaagtcccaggaagctgtcgtgaagttgagacggtgtaggaatgtgagatttagacccgctagcatagcagccagcagtcagcagtcgagcttagaaaagcctcccctttcatgatttctgtagtttacaattaccgttataatcttttttggaccctgaccccaatgtggatgatcaaagatggtaatgcttctcctgtgtaacatatataagaaatgaactctaactccccttctagctccctcccagattcaggggtggaatgtgttggaactgtaccgttttaatttgccctctttggactgaagagagccaagtgatcaaaatagtttcctatgtttattcaagaatttggaaaataatgtgcagtcagcagctgttcatctgaac

SEQ ID NO: 21448 - DNA, 2557 bp, Zea Mays
gctcgctacacgcatggggagggggacgacacacgacgaaactcacattttatatcaaagtgaagagcttgcatgtgcatctagagaacaagctgattctgctaatggggtaggaaacagcgctcattcaggatcaagagggagtggtgctttactacctttttcctctacacataatgcgtcaacttatggggatgaatttgacacgaccataattacattcaacatggctgtcatcctatatcatcttcatgactatgaatctgcactatctgttttggacccactgtaccgaaacattgaaccaatggacgagccaactgctcttcatgtatgctttctattattggatattacattagctttgcaagatgcaacaaaggctgtggatatagtacagtacttggaaaggtcgtttggagtagctaacacaatgaacccgaatgaaaatgcaagcatagctcagcagcaattagctcaagcgaagcctcctgtgaaaattagcatgcctccagattccgattcaaatgcttatgctggtggatatgagaacctttcgtcaggaattttcccagatgagcaaatagaatttgaatctctatgctctagttttgatggacatcagaatgtgggcaggcgtatcttgaatgatttctcaagggcgtctgctgatcttgctgctactgctgctgatttgaaagttagacttcagatttacaaggtccgtcttctactgctcactaggaaccttaaggttgcgaagcgagaactcaaagtactaatgaacatggcacgtggtagggattcatctacagagcttctcttgaaatctcagctggagtatgcccgggggaattataggaaggctgtgaagctattgagcacaccaaataatcggactgaaccagcaatgctagccattttccacaacaacatgggatgtatactccaccaacagagatcgtatcacgcctctatatggtgctttagcaaagcgctgaaatacagcttatcatttcgttcagagaaaccaatgaagttgtctacattatcacaagacaagtcttgccttatttcatacaactgtggtatccaacatttgatgtgtgggaagcctttgttagcagcttcttgttttcgtgaagccatgccgctcttctacaagcgaccccttttctggctccgtttttctgagtgcagcctgctagctctagaaaagggtctcctgtgtgcaaatggtgcttcctcattcaacgatgagattgaaatcaatgttgtggggtcaggacaatggaggcagttgattgtcaacccagtgaactcgagaagtaatttagattctgcaggtgtgactttaggcgaacataaaaatttggtttcacttggatttgctagacagtgtctacaaaatgcgctgctattattggatgctactgagaaggaaaattgggtaatcgcatctgatacagaggattgggaccaaggaaccgtacatggatataaaagctcaggccagaagaatactacaagtacagattctaaaacaccttcaggcccaactctagctaatgtaaatggagaacaaaagggcacaagcttgaatgctaccttgcagagttctcttgctttctatgacgagatccgtagaaaagagtacatcaaaatcagacaggctgtcctggcgaacttggcatttgttgaattgtgccttgataatcccttgaaaactttgacgtatgcaaagtcagtactgcaggtgacagactgttccaggatgtatgcgttcctcagccatgtatacgcagccgaagctctatgtactttgaacagaacagaggatgccgccgagaatctatcagtttatataagagatggtaatcatgtcgagttgccttatagtgtggagaattctgaaaaggccttggttgagaaagacagtgatggtgaagacttggttgctcctgcagtgacaaaactcgccacagaagaacctgagcagctcaggccggaggaggcccgtggtgtcctgtatatcaaccttggcatgattgctgcaaggcagggagaagttgaaaaagccaactacatggtgagccgtggcctggcgatgttgcccaacaacccccgggcagtgctagcatcggtttacgtagaccttttgcaagggaagtcccaggaagctgtcgtgaagttgagacggtgtaggaatgtgagatttagacccgctagcatagcagccagcagtcagcagtcgagcttagaaaagcctcccctttcatgatttctgtagtttacaattaccgttataatcttttttggaccctgaccccaatgtggatgatcaaagatggtaatgcttctcctgtgtaacatatataagaaatgaactctaactccccttctagctccctcccagattcaggggtggaatgtgttggaactgtaccgttttaatttgccctctttggactgaagagagccaagtgatcaaaatagtttcctatgtttattcaagaatttggaaaataatgtgcagtcagcagctgttcatctgaac

SEQ ID NO: 21449 - DNA, 2634 bp, Zea Mays
cacgcatggggagggggacgacacacgacgaaactcacattttatatcacgcacgtgtgtgactgtgtgtggtcatacacacctgagtgacaaaagctggccaacgtagagagttcattgttgctttagagaagaagtgaagagcttgcatgtgcatctagagaacaagctgattctgctaatggggtaggaaacagcgctcattcaggatcaagagggagtggtgctttactacctttttcctctacacataatgcgtcaacttatggggatgaatttgacacgaccataattacattcaacatggctgtcatcctatatcatcttcatgactatgaatctgcactatctgttttggacccactgtaccgaaacattgaaccaatggacgagccaactgctcttcatgtatgctttctattattggatattacattagctttgcaagatgcaacaaaggctgtggatatagtacagtacttggaaaggtcgtttggagtagctaacacaatgaacccgaatgaaaatgcaagcatagctcagcagcaattagctcaagcgaagcctcctgtgaaaattagcatgcctccagattccgattcaaatgcttatgctggtggatatgagaacctttcgtcaggaattttcccagatgagcaaatagaatttgaatctctatgctctagttttgatggacatcagaatgtgggcaggcgtatcttgaatgatttctcaagggcgtctgctgatcttgctgctactgctgctgatttgaaagttagacttcagatttacaaggtccgtcttctactgctcactaggaaccttaaggttgcgaagcgagaactcaaagtactaatgaacatggcacgtggtagggattcatctacagagcttctcttgaaatctcagctggagtatgcccgggggaattataggaaggctgtgaagctattgagcacaccaaataatcggactgaaccagcaatgctagccattttccacaacaacatgggatgtatactccaccaacagagatcgtatcacgcctctatatggtgctttagcaaagcgctgaaatacagcttatcatttcgttcagagaaaccaatgaagttgtctacattatcacaagacaagtcttgccttatttcatacaactgtggtatccaacatttgatgtgtgggaagcctttgttagcagcttcttgttttcgtgaagccatgccgctcttctacaagcgaccccttttctggctccgtttttctgagtgcagcctgctagctctagaaaagggtctcctgtgtgcaaatggtgcttcctcattcaacgatgagattgaaatcaatgttgtggggtcaggacaatggaggcagttgattgtcaacccagtgaactcgagaagtaatttagattctgcaggtgtgactttaggcgaacataaaaatttggtttcacttggatttgctagacagtgtctacaaaatgcgctgctattattggatgctactgagaaggaaaattgggtaatcgcatctgatacagaggattgggaccaaggaaccgtacatggatataaaagctcaggccagaagaatactacaagtacagattctaaaacaccttcaggcccaactctagctaatgtaaatggagaacaaaagggcacaagcttgaatgctaccttgcagagttctcttgctttctatgacgagatccgtagaaaagagtacatcaaaatcagacaggctgtcctggcgaacttggcatttgttgaattgtgccttgataatcccttgaaaactttgacgtatgcaaagtcagtactgcaggtgacagactgttccaggatgtatgcgttcctcagccatgtatacgcagccgaagctctatgtactttgaacagaacagaggatgccgccgagaatctatcagtttatataagagatggtaatcatgtcgagttgccttatagtgtggagaattctgaaaaggccttggttgagaaagacagtgatggtgaagacttggttgctcctgcagtgacaaaactcgccacagaagaacctgagcagctcaggccggaggaggcccgtggtgtcctgtatatcaaccttggcatgattgctgcaaggcagggagaagttgaaaaagccaactacatggtgagccgtggcctggcgatgttgcccaacaacccccgggcagtgctagcatcggtttacgtagaccttttgcaagggaagtcccaggaagctgtcgtgaagttgagacggtgtaggaatgtgagatttagacccgctagcatagcagccagcagtcagcagtcgagcttagaaaagcctcccctttcatgatttctgtagtttacaattaccgttataatcttttttggaccctgaccccaatgtggatgatcaaagatggtaatgcttctcctgtgtaacatatataagaaatgaactctaactccccttctagctccctcccagattcaggggtggaatgtgttggaactgtaccgttttaatttgccctctttggactgaagagagccaagtgatcaaaatagtttcctatgtttattcaagaatttggaaaataatgtgcagtcagcagctgttcatctgaac

SEQ ID NO: 21450 - DNA, 2557 bp, Zea Mays
caacattgagttgcactggttagagatgagtgctctatttctagagaccacgagaagaagtgaagagcttgcatgtgcatctagagaacaagctgattctgctaatggggtaggaaacagcgctcattcaggatcaagagggagtggtgctttactacctttttcctctacacataatgcgtcaacttatggggatgaatttgacacgaccataattacattcaacatggctgtcatcctatatcatcttcatgactatgaatctgcactatctgttttggacccactgtaccgaaacattgaaccaatggacgagccaactgctcttcatgtatgctttctattattggatattacattagctttgcaagatgcaacaaaggctgtggatatagtacagtacttggaaaggtcgtttggagtagctaacacaatgaacccgaatgaaaatgcaagcatagctcagcagcaattagctcaagcgaagcctcctgtgaaaattagcatgcctccagattccgattcaaatgcttatgctggtggatatgagaacctttcgtcaggaattttcccagatgagcaaatagaatttgaatctctatgctctagttttgatggacatcagaatgtgggcaggcgtatcttgaatgatttctcaagggcgtctgctgatcttgctgctactgctgctgatttgaaagttagacttcagatttacaaggtccgtcttctactgctcactaggaaccttaaggttgcgaagcgagaactcaaagtactaatgaacatggcacgtggtagggattcatctacagagcttctcttgaaatctcagctggagtatgcccgggggaattataggaaggctgtgaagctattgagcacaccaaataatcggactgaaccagcaatgctagccattttccacaacaacatgggatgtatactccaccaacagagatcgtatcacgcctctatatggtgctttagcaaagcgctgaaatacagcttatcatttcgttcagagaaaccaatgaagttgtctacattatcacaagacaagtcttgccttatttcatacaactgtggtatccaacatttgatgtgtgggaagcctttgttagcagcttcttgttttcgtgaagccatgccgctcttctacaagcgaccccttttctggctccgtttttctgagtgcagcctgctagctctagaaaagggtctcctgtgtgcaaatggtgcttcctcattcaacgatgagattgaaatcaatgttgtggggtcaggacaatggaggcagttgattgtcaacccagtgaactcgagaagtaatttagattctgcaggtgtgactttaggcgaacataaaaatttggtttcacttggatttgctagacagtgtctacaaaatgcgctgctattattggatgctactgagaaggaaaattgggtaatcgcatctgatacagaggattgggaccaaggaaccgtacatggatataaaagctcaggccagaagaatactacaagtacagattctaaaacaccttcaggcccaactctagctaatgtaaatggagaacaaaagggcacaagcttgaatgctaccttgcagagttctcttgctttctatgacgagatccgtagaaaagagtacatcaaaatcagacaggctgtcctggcgaacttggcatttgttgaattgtgccttgataatcccttgaaaactttgacgtatgcaaagtcagtactgcaggtgacagactgttccaggatgtatgcgttcctcagccatgtatacgcagccgaagctctatgtactttgaacagaacagaggatgccgccgagaatctatcagtttatataagagatggtaatcatgtcgagttgccttatagtgtggagaattctgaaaaggccttggttgagaaagacagtgatggtgaagacttggttgctcctgcagtgacaaaactcgccacagaagaacctgagcagctcaggccggaggaggcccgtggtgtcctgtatatcaaccttggcatgattgctgcaaggcagggagaagttgaaaaagccaactacatggtgagccgtggcctggcgatgttgcccaacaacccccgggcagtgctagcatcggtttacgtagaccttttgcaagggaagtcccaggaagctgtcgtgaagttgagacggtgtaggaatgtgagatttagacccgctagcatagcagccagcagtcagcagtcgagcttagaaaagcctcccctttcatgatttctgtagtttacaattaccgttataatcttttttggaccctgaccccaatgtggatgatcaaagatggtaatgcttctcctgtgtaacatatataagaaatgaactctaactccccttctagctccctcccagattcaggggtggaatgtgttggaactgtaccgttttaatttgccctctttggactgaagagagccaagtgatcaaaatagtttcctatgtttattcaagaatttggaaaataatgtgcagtcagcagctgttcatctgaac

SEQ ID NO: 21451 - DNA, 2481 bp, Zea Mays
agagagttcattgttgctttagagaagaagtgaagagcttgcatgtgcatctagagaacaagctgattctgctaatggggtaggaaacagcgctcattcaggatcaagagggagtggtgctttactacctttttcctctacacataatgcgtcaacttatggggatgaatttgacacgaccataattacattcaacatggctgtcatcctatatcatcttcatgactatgaatctgcactatctgttttggacccactgtaccgaaacattgaaccaatggacgagctttgcaagatgcaacaaaggctgtggatatagtacagtacttggaaaggtcgtttggagtagctaacacaatgaacccgaatgaaaatgcaagcatagctcagcagcaattagctcaagcgaagcctcctgtgaaaattagcatgcctccagattccgattcaaatgcttatgctggtggatatgagaacctttcgtcaggaattttcccagatgagcaaatagaatttgaatctctatgctctagttttgatggacatcagaatgtgggcaggcgtatcttgaatgatttctcaagggcgtctgctgatcttgctgctactgctgctgatttgaaagttagacttcagatttacaaggtccgtcttctactgctcactaggaaccttaaggttgcgaagcgagaactcaaagtactaatgaacatggcacgtggtagggattcatctacagagcttctcttgaaatctcagctggagtatgcccgggggaattataggaaggctgtgaagctattgagcacaccaaataatcggactgaaccagcaatgctagccattttccacaacaacatgggatgtatactccaccaacagagatcgtatcacgcctctatatggtgctttagcaaagcgctgaaatacagcttatcatttcgttcagagaaaccaatgaagttgtctacattatcacaagacaagtcttgccttatttcatacaactgtggtatccaacatttgatgtgtgggaagcctttgttagcagcttcttgttttcgtgaagccatgccgctcttctacaagcgaccccttttctggctccgtttttctgagtgcagcctgctagctctagaaaagggtctcctgtgtgcaaatggtgcttcctcattcaacgatgagattgaaatcaatgttgtggggtcaggacaatggaggcagttgattgtcaacccagtgaactcgagaagtaatttagattctgcaggtgtgactttaggcgaacataaaaatttggtttcacttggatttgctagacagtgtctacaaaatgcgctgctattattggatgctactgagaaggaaaattgggtaatcgcatctgatacagaggattgggaccaaggaaccgtacatggatataaaagctcaggccagaagaatactacaagtacagattctaaaacaccttcaggcccaactctagctaatgtaaatggagaacaaaagggcacaagcttgaatgctaccttgcagagttctcttgctttctatgacgagatccgtagaaaagagtacatcaaaatcagacaggctgtcctggcgaacttggcatttgttgaattgtgccttgataatcccttgaaaactttgacgtatgcaaagtcagtactgcaggtgacagactgttccaggatgtatgcgttcctcagccatgtatacgcagccgaagctctatgtactttgaacagaacagaggatgccgccgagaatctatcagtttatataagagatggtaatcatgtcgagttgccttatagtgtggagaattctgaaaaggccttggttgagaaagacagtgatggtgaagacttggttgctcctgcagtgacaaaactcgccacagaagaacctgagcagctcaggccggaggaggcccgtggtgtcctgtatatcaaccttggcatgattgctgcaaggcagggagaagttgaaaaagccaactacatggtgagccgtggcctggcgatgttgcccaacaacccccgggcagtgctagcatcggtttacgtagaccttttgcaagggaagtcccaggaagctgtcgtgaagttgagacggtgtaggaatgtgagatttagacccgctagcatagcagccagcagtcagcagtcgagcttagaaaagcctcccctttcatgatttctgtagtttacaattaccgttataatcttttttggaccctgaccccaatgtggatgatcaaagatggtaatgcttctcctgtgtaacatatataagaaatgaactctaactccccttctagctccctcccagattcaggggtggaatgtgttggaactgtaccgttttaatttgccctctttggactgaagagagccaagtgatcaaaatagtttcctatgtttattcaagaatttggaaaataatgtgcagtcagcagctgttcatctgaac

SEQ ID NO: 21452 - DNA, 2814 bp, Zea Mays
ccgctctcgtcttcctctcccaatgtcaatagccacttccactcccaaagtcacaagggtccgaacccaacaaaaaaactctccaaaccccatttcatttttcaaatctgctcctgccccacctccgccgccggacttccaaacgatcaaaccccacccagtcgctgtctccagccccaaatcctcgagctccctccgtcagtggcgcgatggggttcgtggatccggcggcgccgctgctggcgacgtgcggcggcgacacggttaagcttttcgacgtcacggtggagaccggcgacccctgcgtcctcgcctacacccccgcgcccgcgcaccccgtcaacgccgtcaagtggaaccacaccaatcttattgtagcaagtgctggcgatgataaaaagatctcattgtggcataagaagggtcaaaatgtaggacaactaccaacatcaactgtcgaccgtggtgatgacatagaggagtgcatttattctatcagctttagcaacaaaggttctcgatatctctgttcctgtggaagtggccatattgttaggatatgggatttgcagcgtaagagatgtatcaaatggctaagcggtcacactgacacaattactggcgtaatgtataactgcaaagatgaacatttggcatcgatcagcatgaagggggacctgattcttcataatcttgcttctggagcacgtgtttctgaacttagcgatccaaacggacaggttctgagagtgcttgattattcacgaaatagtaggcatttattggtgacagctggagatgatggttctgtgcatctttgggatacaactgcaaagtctcctaaggtttcatggctgaagcaacattctgcacccacaagtggtgtttgtatttcaccatccagtgataagataattgctacagtgggccttgataagaagttatacactttagattcagggtcaagacggccggcccacactattcctcatgaggccccattctcctcattggcgtataatgatgatggtactataatagcagcgggcactaacagtggacgtgtggtgttctatgatattcgaggaaaaccaaagccattgaccatccttcgtgcatataatacttctgagatcccttgccttcagcaacacctacaggccttggttctggggtggccactacaagtcttctctctttgacagcaaacacaagtggctatctttcggcctcaaattcttctactatggaggaaacaccatatagaactcgtccgctgactggtggaccgttatcaaagctacaggctcctcttagtaactataatctgaaggatgatatggatgtattttctccacttgttgatgtccagcctttcacaccatctagtggcaactggtgggatgagcatggaagtgatgatgcaaaaaaggatgataaaccaggagaaaagaaattttcaacaaccaggaagtattcgtatatggaaggcaatgatgagccacatccgattgcagattggcggtctactgcaagacaggatagcatctcatctgtgactactacatccatgccatcatggaagagcgaactgtctgtatcttcgccagagccagcaactggaaatgcattaccagacaggcttactcaacgtcaactgatctcacgctttgggtcttcagcctttccaactggtggcttggcatttacagcctcacaagatccagcttcagcacccagtcactcactgaagggttctcttacaagtaacattttaatgaatctacaaaacaagggcatcttgaacaatcacaatccacttctttgtggagacccacaacatatactgatagaatgagctcatcatctgtttttagtgatggattagcttcagcatttggctcacccaaatcaaagaagacaggagcagaagcaaaagatgagttgctcagtaacattttgtcaagacaaacagcagctggctcttcatctgcaatccctttagcaagcaatggggtagtgccaccacaactggcgaacacaggttcttcatctgatcaactcggcgcttcttccttctcacttcagtatgtgcagcgcatgcttgaagaatctcttgggtctgtccagaagtccatccatgaggatgtgagaaatctccacattgaacttttaagacagtttcacatgcacgagatggaaatgtcaggcgtgctgaacttggtcctggaaaaggtggaaggcctgacaaaagaagtgcagcaactaagaagggagaaccaacagctcaggcagcagcttctctaatatgtgcctttgggcgcctctctggcaatcttatgctgtggaagagtgcaatttgctcaggagtcctaggtaggcccaaacctatgtagaggcctggcgatggttgattctcatattggttggaagctcgtgtttgactttgacacggttgtacatataatcctcttaatttagaagcatattttgatcgaattattgatttgtctgtttgccgtgcttcttggactggctccatgtatcttggtggaccttgggcgtcctgatggcatatgtgagaggtcaacacaggtttccgatgtagcttttgttaatataattccttgattaggctcaaaatactctcttaacgatggtatatgatattttgtgatgtgagtagattattactctttgtccagtttataaggcgtcttctgaaattggcacaatttcttaaattacacttgatcacttatttattttattctctttgtttctgaataaatcaatttagaaccttgatttgtg

SEQ ID NO: 21453 - DNA, 3027 bp, Zea Mays
ccgctctcgtcttcctctcccaatgtcaatagccacttccactcccaaagtcacaagggtccgaacccaacaaaaaaactctccaaaccccatttcatttttcaaatctgctcctgccccacctccgccgccggacttccaaacgatcaaaccccacccagtcgctgtctccagccccaaatcctcgagctccctccgtcagtggcgcgatggggttcgtggatccggcggcgccgctgctggcgacgtgcggcggcgacacggttaagcttttcgacgtcacggtggagaccggcgacccctgcgtcctcgcctacacccccgcgcccgcgcaccccgtcaacgccgtcaagtggaaccacaccaatcttattgtagcaagtgctggcgatgataaaaagatctcattgtggcataagaagggtcaaaatgtaggacaactaccaacatcaactgtcgaccgtggtgatgacatagaggagtgcatttattctatcagctttagcaacaaaggttctcgatatctctgttcctgtggaagtggccatattgttaggatatgggatttgcagcgtaagagatgtatcaaatggctaagcggtcacactgacacaattactggcgtaatgtataactgcaaagatgaacatttggcatcgatcagcatgaagggggacctgattcttcataatcttgcttctggagcacgtgtttctgaacttagcgatccaaacggacaggtcaggttctgagagtgcttgattattcacgaaatagtaggcatttattggtgacagctggagatgatggttctgtgcatctttgggatacaactgcaaagtctcctaaggtttcatggctgaagcaacattctgcacccacaagtggtgtttgtatttcaccatccagtgataagataattgctacagtgggccttgataagaagttatacactttagattcagggtcaagacggccggcccacactattcctcatgaggccccattctcctcattggcgtataatgatgatggtactataatagcagcgggcactaacagtggacgtgtggtgttctatgatattcgaggaaaaccaaagccattgaccatccttcgtgcatataatacttctgaggtttatgctggcaacggtcgaagcctgtcgttgttaatgagaacagttcttctgaagttgctcttcttgggggaactaatgaagagtctgttcttatgccagatcccttgccttcagcaacacctacaggccttggttctggggtggccactacaagtcttctctctttgacagcaaacacaagtggctatctttcggcctcaaattcttctactatggaggaaacaccatatagaactcgtccgctgactggtggaccgttatcaaagctacaggctcctcttagtaactataatctgaaggatgatatggatgtattttctccacttgttgatgtccagcctttcacaccatctagtggcaactggtgggatgagcatggaagtgatgatgcaaaaaaggatgataaaccaggagaaaagaaattttcaacaaccaggaagtattcgtatatggaaggcaatgatgagccacatccgattgcagattggcggtctactgcaagacaggatagcatctcatctgtgactactacatccatgccatcatggaagagcgaactgtctgtatcttcgccagagccagcaactggaaatgcattaccagacaggcttactcaacgtcaactgatctcacgctttgggtcttcagcctttccaactggtggcttggcatttacagcctcacaagatccagcttcagcacccagtcactcactgaagggttctcttacaagtaacattttaatgaatctacaaaacaagggcatcttgaacaatgtatcctcttccctggacgcatcctctcctaatcttcagagttcacttccctcatcatatgtttcaaaaactatgccatctgtgattcctgatcaactaggagcagcacaatccacttctttgtggagacccacaacatatactgatagaatgagctcatcatctgtttttagtgatggattagcttcagcatttggctcacccaaatcaaagaagacaggagcagaagcaaaagatgagttgctcagtaacattttgtcaagacaaacagcagctggctcttcatctgcaatccctttagcaagcaatggggtagtgccaccacaactggcgaacacaggttcttcatctgatcaactcggcgcttcttccttctcacttcagtatgtgcagcgcatgcttgaagaatctcttgggtctgtccagaagtccatccatgaggatgtgagaaatctccacattgaacttttaagacagtttcacatgcacgagatggaaatgtcaggcgtgctgaacttggtcctggaaaaggtggaaggcctgacaaaagaagtgcagcaactaagaagggagaaccaacagctcaggcagcagcttctctaatatgtgcctttgggcgcctctctggcaatcttatgctgtggaagagtgcaatttgctcaggagtcctaggtaggcccaaacctatgtagaggcctggcgatggttgattctcatattggttggaagctcgtgtttgactttgacacggttgtacatataatcctcttaatttagaagcatattttgatcgaattattgatttgtctgtttgccgtgcttcttggactggctccatgtatcttggtggaccttgggcgtcctgatggcatatgtgagaggtcaacacaggtttccgatgtagcttttgttaatataattccttgattaggctcaaaatactctcttaacgatggtatatgatattttgtgatgtgagtagattattactctttgtccagtttataaggcgtcttctgaaattggcacaatttcttaaattacacttgatcacttatttattttattctctttgtttctgaataaatcaatttagaaccttgatttgtg

SEQ ID NO: 21454 - DNA, 2595 bp, Zea Mays
ccgctctcgtcttcctctcccaatgtcaatagccacttccactcccaaagtcacaagggtccgaacccaacaaaaaaactctccaaaccccatttcatttttcaaatctgctcctgccccacctccgccgccggacttccaaacgatcaaaccccacccagtcgctgtctccagccccaaatcctcgagctccctccgtcagtggcgcgatggggttcgtggatccggcggcgccgctgctggcgacgtgcggcggcgacacggttaagcttttcgacgtcacggtggagaccggcgacccctgcgtcctcgcctacacccccgcgcccgcgcaccccgtcaacgccgtcaagtggaaccacaccaatcttattgtagcaagtgctggcgatgataaaaagatctcattgtggcataagaagggtcaaaatgtaggacaactaccaacatcaactgtcgaccgtggtgatgacatagaggagtgcatttattctatcagctttagcaacaaaggttctcgatatctctgttcctgtggaagtggccatattgttaggatatgggatttgcagcgtaagagatgtatcaaatggctaagcggtcacactgacacaattactggcgtaatgtataactgcaaagatgaacatttggcatcgatcagcatgaagggggacctgattcttcataatcttgcttctggagcacgtgtttctgaacttagcgatccaaacggacaggttctgagagtgcttgattattcacgaaatagtaggcatttattggtgacagctggagatgatggttctgtgcatctttgggatacaactgcaaagtctcctaaggtttcatggctgaagcaacattctgcacccacaagtggtgtttgtatttcaccatccagtgataagataattgctacagtgggccttgataagaagttatacactttagattcagggtcaagacggccggcccacactattcctcatgaggccccattctcctcattggcgtataatgatgatggtactataatagcagcgggcactaacagtggacgtgtggtgttctatgatattcgaggaaaaccaaagccattgaccatccttcgtgcatataatacttctgagatcccttgccttcagcaacacctacaggccttggttctggggtggccactacaagtcttctctctttgacagcaaacacaagtggctatctttcggcctcaaattcttctactatggaggaaacaccatatagaactcgtccgctgactggtggaccgttatcaaagctacaggctcctcttagtaactataatctgaaggatgatatggatgtattttctccacttgttgatgtccagcctttcacaccatctagtggcaactggtgggatgagcatggaagtgatgatgcaaaaaaggatgataaaccaggagaaaagaaattttcaacaaccaggaagtattcgtatatggaaggcaatgatgagccacatccgattgcagattggcggtctactgcaagacaggatagcatctcatctgtgactactacatccatgccatcatggaagagcgaactgtctgtatcttcgccagagccagcaactggaaatgcattaccagacaggcttactcaacgtcaactgatctcacgctttgggtcttcagcctttccaactggtggcttggcatttacagcctcacaagatccagcttcagcacccagtcactcactgaagggttctcttacaagtaacattttaatgaatctacaaaacaagggcatcttgaacaatcacaatccacttctttgtggagacccacaacatatactgatagaatgagctcatcatctgtttttagtgatggattagcttcagcatttggctcacccaaatcaaagaagacaggagcagaagcaaaagatgagttgctcagtaacattttgtcaagacaaacagcagctggctcttcatctgcaatccctttagcaagcaatggggtagtgccaccacaactggcgaacacaggttcttcatctgatcaactcggcgcttcttccttctcacttcagtatgtgcagcgcatgcttgaagaatctcttgggtctgtccagaagtccatccatgaggatgtgagaaatctccacattgaacttttaagacagtttcacatgcacgagatggaaatgtcaggcgtgctgaacttggtcctggaaaaggtggaaggcctgacaaaagaagtgcagcaactaagaagggagaaccaacagctcaggcagcagcttctctaatatgtgcctttgggcgcctctctggcaatcttatgctgtggaagagtgcaatttgctcaggagtcctaggtttccgatgtagcttttgttaatataattccttgattaggctcaaaatactctcttaacgatggtatatgatattttgtgatgtgagtagattattactctttgtccagtttataaggcgtcttctgaaattggcacaatttcttaaattacacttgatcacttatttattttattctctttgtttctgaataaatcaatttagaaccttgatttgtg

SEQ ID NO: 21455 - DNA, 2997 bp, Zea Mays
ccgctctcgtcttcctctcccaatgtcaatagccacttccactcccaaagtcacaagggtccgaacccaacaaaaaaactctccaaaccccatttcatttttcaaatctgctcctgccccacctccgccgccggacttccaaacgatcaaaccccacccagtcgctgtctccagccccaaatcctcgagctccctccgtcagtggcgcgatggggttcgtggatccggcggcgccgctgctggcgacgtgcggcggcgacacggttaagcttttcgacgtcacggtggagaccggcgacccctgcgtcctcgcctacacccccgcgcccgcgcaccccgtcaacgccgtcaagtggaaccacaccaatcttattgtagcaagtgctggcgatgataaaaagatctcattgtggcataagaagggtcaaaatgtaggacaactaccaacatcaactgtcgaccgtggtgatgacatagaggagtgcatttattctatcagctttagcaacaaaggttctcgatatctctgttcctgtggaagtggccatattgttaggatatgggatttgcagcgtaagagatgtatcaaatggctaagcggtcacactgacacaattactggcgtaatgtataactgcaaagatgaacatttggcatcgatcagcatgaagggggacctgattcttcataatcttgcttctggagcacgtgtttctgaacttagcgatccaaacggacaggcatttattggtgacagctggagatgatggttctgtgcatctttgggatacaactgcaaagtctcctaaggtttcatggctgaagcaacattctgcacccacaagtggtgtttgtatttcaccatccagtgataagataattgctacagtgggccttgataagaagttatacactttagattcagggtcaagacggccggcccacactattcctcatgaggccccattctcctcattggcgtataatgatgatggtactataatagcagcgggcactaacagtggacgtgtggtgttctatgatattcgaggaaaaccaaagccattgaccatccttcgtgcatataatacttctgaggctgtgacaggtttatgctggcaacggtcgaagcctgtcgttgttaatgagaacagttcttctgaagttgctcttcttgggggaactaatgaagagtctgttcttatgccagatcccttgccttcagcaacacctacaggccttggttctggggtggccactacaagtcttctctctttgacagcaaacacaagtggctatctttcggcctcaaattcttctactatggaggaaacaccatatagaactcgtccgctgactggtggaccgttatcaaagctacaggctcctcttagtaactataatctgaaggatgatatggatgtattttctccacttgttgatgtccagcctttcacaccatctagtggcaactggtgggatgagcatggaagtgatgatgcaaaaaaggatgataaaccaggagaaaagaaattttcaacaaccaggaagtattcgtatatggaaggcaatgatgagccacatccgattgcagattggcggtctactgcaagacaggatagcatctcatctgtgactactacatccatgccatcatggaagagcgaactgtctgtatcttcgccagagccagcaactggaaatgcattaccagacaggcttactcaacgtcaactgatctcacgctttgggtcttcagcctttccaactggtggcttggcatttacagcctcacaagatccagcttcagcacccagtcactcactgaagggttctcttacaagtaacattttaatgaatctacaaaacaagggcatcttgaacaatgtatcctcttccctggacgcatcctctcctaatcttcagagttcacttccctcatcatatgtttcaaaaactatgccatctgtgattcctgatcaactaggagcagcacaatccacttctttgtggagacccacaacatatactgatagaatgagctcatcatctgtttttagtgatggattagcttcagcatttggctcacccaaatcaaagaagacaggagcagaagcaaaagatgagttgctcagtaacattttgtcaagacaaacagcagctggctcttcatctgcaatccctttagcaagcaatggggtagtgccaccacaactggcgaacacaggttcttcatctgatcaactcggcgcttcttccttctcacttcagtatgtgcagcgcatgcttgaagaatctcttgggtctgtccagaagtccatccatgaggatgtgagaaatctccacattgaacttttaagacagtttcacatgcacgagatggaaatgtcaggcgtgctgaacttggtcctggaaaaggtggaaggcctgacaaaagaagtgcagcaactaagaagggagaaccaacagctcaggcagcagcttctctaatatgtgcctttgggcgcctctctggcaatcttatgctgtggaagagtgcaatttgctcaggagtcctaggtaggcccaaacctatgtagaggcctggcgatggttgattctcatattggttggaagctcgtgtttgactttgacacggttgtacatataatcctcttaatttagaagcatattttgatcgaattattgatttgtctgtttgccgtgcttcttggactggctccatgtatcttggtggaccttgggcgtcctgatggcatatgtgagaggtcaacacaggtttccgatgtagcttttgttaatataattccttgattaggctcaaaatactctcttaacgatggtatatgatattttgtgatgtgagtagattattactctttgtccagtttataaggcgtcttctgaaattggcacaatttcttaaattacacttgatcacttatttattttattctctttgtttctgaataaatcaatttagaaccttgatttgtg

SEQ ID NO: 21456 - DNA, 2637 bp, Zea Mays
caccgcgctctttctctttcctcacgacgccgccgttgggagccctgcttcgggagagccccaacccttatcaaaccctaaatcaaaaactacccaaaaaaatccgcaaaatccagaaaaaaatcccaaaaatcaccacttgattggagatggcgacgcaagggcaagcggcggctggatccgcgtccgagtccggcggctctccggctgccttagctgcagcagccgcggcggcggccgcgttcccggcgacttcgctctacgtgggtgatctgcacgagagcgtgcaggacgcgcagctcttcgacgttttcagccaagtcggcggcgtcgtctccgtgcgcgtctgcagggacatcaactcccgcaagtcgctcgggtacgcctacgtcaactacaacaaccagggcgacgctgcacgagcacttgaactgcttaacttcactcctatcaatggaaagcctatcaggatcatgtattctaaccgtgaccctagctcgcgcaaaagcggcacaggaaatatatttattaagaatcttgataagtcaatagacaacaaagctttatatgacacattctgtgcatttgggaatatactttcatgtaaaattgcaacagacccttcaggagaatcaaggggctatggttttgttcagtttgagaaggatgaatctgcacagtctgctattgataaactcaatgggatgcttatcaatgacaagaaagtgtttgttggaccttttgttcgcaagcaggacagggaaaatgtctcgagtaatatcaaatttagtaatgtatatgtgaagaatctgtcagatactgttactgatgatgagttgaaggagatgtttggaaaatatggaaccataactagtgctgttgttatgcgggatagcgatggaaaatccaggtgttttggatttgtcaattttgaaaatgcagatgctgctgctcaggctgttcaagagttgaatggcaagatattcaatgataaggaactgtatgttggaagagcacagaagaagtctgaaagagagatggagttgaaggagaaatttgaaaagaatgttcaagaggtagctgagaagttccaaaacacaaacttgtatttgaagaacttagaggagaacattgatgatgagaaattgcgtgaactctttgctgagtatggcaatattacttcctgcaaggttatgcgggattcgaatggtgtcagcagaggttctggatttgttgctttcaaatctgctgaagatgctaaccgagctcttacggagatgaatggcaaaatggttggaagcaagcccctttatgtagctcttgcgcagcgtaaagaagacagaaaggcaaagctacaggcacaattttcacaaatgcgtcctgttgcaatggcgccttcagtaggtcctcgcatgcccatgtttccacctggtgtccctggagttggtcagcagctgttctatggtcagccaccaccagccttcatcaaccctcaggctggatttgctttccagcaacctctgatgcctggtatgaggcctggtggtccaatgccgaactttatgatgcctatggttcagcaaggacagcaaccacagcgtcctgctggtagacgtgctggtggaatgcagcagcccatgccaatgggtggtcagcaacaggtgttccctagaggtggtcgtggctatcgctatcctactggacgtggaatgcctgatcctggcatgcacagtgttggtgctgtgatgccaccttcatatgagatgggagggatgccaatgagagaagctgccccccaacctgttccaattggggcgctagccactgcacttgctaacgccccaccagatcagcagagacttctggaacgtgagcaggctgccaaggtcactggcatgcttttggagatggatcagacggaggttcttcacctgctggagtcgccagatgctctgaaagccaaggttgctgaagccatggaggtcctccgctctgcccagcatctccagcagagcaatgtttctactgagcagcagctggctaatctatcattgaatgatggcgtcgtctccagctgaacgttaatgtttctgatgtttcggaagtgctgccagtttttgcttgaatactaccctatctagagtgtaatgactttgtttacttggtttgttggagttttagctgctcctattactaggggttggttttgtcttgactttgttattttggttgcatggataatcgtttcgtttggatctattgtccgattgttactcgaattacaacagttgagtttttgggcgtcattggttttctagctgatatttcattaccctatttaccgttaagtgtagcgccacaagcaaattctactacatgggtctgtttggttatatggattaagatgtggaaggagtaaattggatttttttaaggactggtttgactgcaaaaggtgaggaaaaaaactagggaagggttaaacatgcggttgtttggtaaccaagtaaaagaaatagttaaaaattcagaaaaaagcaaaggaaacagatatgattcacatcactaaaaatcgaagaaagaaatatttagacagatcataaacacaatgaaacatcacttaaaatcaaaaaaaaa

SEQ ID NO: 21457 - DNA, 2648 bp, Zea Mays
caccgcgctctttctctttcctcacgacgccgccgttgggagccctgcttcgggagagccccaacccttatcaaaccctaaatcaaaaactacccaaaaaaatccgcaaaatccagaaaaaaatcccaaaaatcaccacttgattggagatggcgacgcaagggcaagcggcggctggatccgcgtccgagtccggcggctctccggctgccttagctgcagcagccgcggcggcggccgcgttcccggcgacttcgctctacgtgggtgatctgcacgagagcgtgcaggacgcgcagctcttcgacgttttcagccaagtcggcggcgtcgtctccgtgcgcgtctgcagggacatcaactcccgcaagtcgctcgggtacgcctacgtcaactacaacaaccagggcgacgctgcacgagcacttgaactgcttaacttcactcctatcaatggaaagcctatcaggatcatgtattctaaccgtgaccctagctcgcgcaaaagcggcacaggaaatatatttattaagaatcttgataagtcaatagacaacaaagctttatatgacacattctgtgcatttgggaatatactttcatgtaaaattgcaacagacccttcaggagaatcaaggggctatggttttgttcagtttgagaaggatgaatctgcacagtctgctattgataaactcaatgggatgcttatcaatgacaagaaagtgtttgttggaccttttgttcgcaagcaggacagggaaaatgtctcgagtaatatcaaatttagtaatgtatatgtgaagaatctgtcagatactgttactgatgatgagttgaaggagatgtttggaaaatatggaaccataactagtgctgttgttatgcgggatagcgatggaaaatccaggtgttttggatttgtcaattttgaaaatgcagatgctgctgctcaggctgttcaagagttgaatggcaagatattcaatgataaggaactgtatgttggaagagcacagaagaagtctgaaagagagatggagttgaaggagaaatttgaaaagaatgttcaagaggtagctgagaagttccaaaacacaaacttgtatttgaagaacttagaggagaacattgatgatgagaaattgcgtgaactctttgctgagttatgcgggattcgaatggtgtcagcagaggttctggatttgttgctttcaaatctgctgaagatgctaaccgagctcttacggagatgaatggcaaaatggttggaagcaagcccctttatgtagctcttgcgcagcgtaaagaagacagaaaggcaaagctacaggcacaattttcacaaatgcgtcctgttgcaatggcgccttcagtaggtcctcgcatgcccatgtttccacctggtgtccctggagttggtcagcagctgttctatggtcagccaccaccagccttcatcaaccctcaggctggatttgctttccagcaacctctgatgcctggtatgaggcctggtggtccaatgccgaactttatgatgcctatggttcagcaaggacagcaaccacagcgtcctgctggtagacgtgctggtggaatgcagcagcccatgccaatgggtggtcagcaacaggtgttccctagaggtggtcgtggctatcgctatcctactggacgtggaatgcctgatcctggcatgcacagtgttggtgctgtgatgccaccttcatatgagatgggagggatgccaatgagagaagctgccccccaacctgttccaattggggcgctagccactgcacttgctaacgccccaccagatcagcagagacttatgcttggtgagaacctgtatcctcttgttgaacagctggaacgtgagcaggctgccaaggtcactggcatgcttttggagatggatcagacggaggttcttcacctgctggagtcgccagatgctctgaaagccaaggttgctgaagccatggaggtcctccgctctgcccagcatctccagcagagcaatgtttctactgagcagcagctggctaatctatcattgaatgatggcgtcgtctccagctgaacgttaatgtttctgatgtttcggaagtgctgccagtttttgcttgaatactaccctatctagagtgtaatgactttgtttacttggtttgttggagttttagctgctcctattactaggggttggttttgtcttgactttgttattttggttgcatggataatcgtttcgtttggatctattgtccgattgttactcgaattacaacagttgagtttttgggcgtcattggttttctagctgatatttcattaccctatttaccgttaagtgtagcgccacaagcaaattctactacatgggtctgtttggttatatggattaagatgtggaaggagtaaattggatttttttaaggactggtttgactgcaaaaggtgaggaaaaaaactagggaagggttaaacatgcggttgtttggtaaccaagtaaaagaaatagttaaaaattcagaaaaaagcaaaggaaacagatatgattcacatcactaaaaatcgaagaaagaaatatttagacagatcataaacacaatgaaacatcacttaaaatcaaaaaaaaa

SEQ ID NO: 21458 - DNA, 2059 bp, Zea Mays
caccgcgctctttctctttcctcacgacgccgccgttgggagccctgcttcgggagagccccaacccttatcaaaccctaaatcaaaaactacccaaaaaaatccgcaaaatccagaaaaaaatcccaaaaatcaccacttgattggagatggcgacgcaagggcaagcggcggctggatccgcgtccgagtccggcggctctccggctgccttagctgcagcagccgcggcggcggccgcgttcccggcgacttcgctctacgtgggtgatctgcacgagagcgtgcaggacgcgcagctcttcgacgttttcagccaagtcggcggcgtcgtctccgtgcgcgtctgcagggacatcaactcccgcaagtcgctcgggtacgcctacgtcaactacaacaaccagggcgacgctgcacgagcacttgaactgcttaacttcactcctatcaatggaaagcctatcaggatcatgtattctaaccgtgaccctagctcgcgcaaaagcggcacaggaaatatatttattaagaatcttgataagtcaatagacaacaaagctttatatgacacattctgtgcatttgggaatatactttcatgtaaaattgcaacagacccttcaggagaatcaaggggctatggttttgttcagtttgagaaggatgaatctgcacagtctgctattgataaactcaatgggatgcttatcaatgacaagaaagtgtttgttggaccttttgttcgcaagcaggacagggaaaatgtctcgagtaatatcaaatttagtaatgtatatgtgaagaatctgtcagatactgttactgatgatgagttgaaggagatgtttggaaaatatggaaccataactagtgctgttgttatgcgggatagcgatggaaaatccaggtgttttggatttgtcaattttgaaaatgcagatgctgctgctcaggctgttcaagagttgaatggcaagatattcaatgataaggaactgtatgttggaagagcacagaagaagtctgaaagagagatggagttgaaggagaaatttgaaaagaatgttcaagaggtagctgagaagttccaaaacacaaacttgtatttgaagaacttagaggagaacattgatgatgagaaattgcgtgaactctttgctgagtatggcaatattacttcctgcaaggttatgcgggattcgaatggtgtcagcagaggttctggatttgttgctttcaaatctgctgaagatgctaaccgagctcttacggagatgaatggcaaaatggttggaagcaagcccctttatgtagctcttgcgcagcgtaaagaagacagaaaggcaaagctacaggcacaattttcacaaatgcgtcctgttgcaatggcgccttcagtaggtcctccgctctgcccagcatctccagcagagcaatgtttctactgagcagcagctggctaatctatcattgaatgatggcgtcgtctccagctgaacgttaatgtttctgatgtttcggaagtgctgccagtttttgcttgaatactaccctatctagagtgtaatgactttgtttacttggtttgttggagttttagctgctcctattactaggggttggttttgtcttgactttgttattttggttgcatggataatcgtttcgtttggatctattgtccgattgttactcgaattacaacagttgagtttttgggcgtcattggttttctagctgatatttcattaccctatttaccgttaagtgtagcgccacaagcaaattctactacatgggtctgtttggttatatggattaagatgtggaaggagtaaattggatttttttaaggactggtttgactgcaaaaggtgaggaaaaaaactagggaagggttaaacatgcggttgtttggtaaccaagtaaaagaaatagttaaaaattcagaaaaaagcaaaggaaacagatatgattcacatcactaaaaatcgaagaaagaaatatttagacagatcataaacacaatgaaacatcacttaaaatcaaaaaaaaa

SEQ ID NO: 21459 - DNA, 2542 bp, Zea Mays
gttccttactacaatagcaagtactagcgatctagcgtgcatcgccagcccgtcccactatcgcctctcctctcattctctcgtgctctccacccgtttcccgcaaaaccctagctctgcgacatgcaccgcggcggcgatcgctccggcggcccctcgagcggcggagaccgctctggagcccggttccagcggggtccctcccgctggtctggcagcagcggcggcggattagggggtagcccgcccaatcgctactcctcccgcggcgcggcagatggaggtggtggagggggcggtggcagtggcggtggcgggaggttccacccttaccgtggttcttccgactattctagcggcggtggagggtacagaggcggtagtggcgttggtaacgacttcggcgaccagaggcaacgttacggcggcggcaacagaggcggaggccgtggggatttccaagatcatgatagtagaagtaactatgtcaaactttttgtcggatctgttccgaggacagcgactgaagaagacgttcgtcctttatttgaggaacatggagatgttcttgaagttgctctaattaaggataggaagaccggtgaacaacaaggttgttgtttcgttaaatatgctacttctgaggaggcggagagggccatcaggggtctgcacaaccactacactttacctggagcaatgggccctattcaagttagatatgctgatggtgaaagggaacgacatggggccatcgagcacaaattatttgttgcgtccctcaataagcaagcaactccaaaggagattgaagagatatttgccccatatggtcatgtggaagatgtttacattatgagagatagcgtgaagcagagccgaggttgtggctttgtcaaattctcatcaaaagaggcagcagtggaagctatgaatgcccttagtgggacttacacaatgagggggtgcgagcaaccattaatcattagatttgctgatcctaagaggcctagacctggagaatcaaggggtcgccctgcatttggaggtcctggtttcagtcctcgatcggatgcagcacttgttatcaggccaacagccaatcttgatgaatctaggggtcagcatatgcttcctgaatcttggcgtccatcaagtccaaggccaatggcacctaaccaatataataattttggatctgacaaccccttggcacttagtggtggcactgtaacatcagcagatactgctacttttcggcctccgatgttccctggaaatggctccttgtcaaatcagacggctgtgccaacttcgtcacacatgggcatgaacactcccatggtacaagaacaccatctacgaggccaacagatcccatccctgcaaaagccacctggtccaccacagaattttgctgtacaactgcagaatgcacagccaggacagcctctgcaggggcatattccacagattgggcagcttcaggccccacaatccacgggacctgtttcatttggccagaatatttcatctatgcaattacctggtcaacctcctgcatcacagccattgatgcaacggaatgcttctctaggtgctttacatgcccctccatctggacaatccaatccaatgcaagctgtccctggccagcagcaacttcccaccagtgttgctccccaaatgcttcagcagtcgatgcagcagatgccttcacaagcgccacagttgctgcttcaacagcaggcagctttgcagtctagttatcagtcttcacagcaggcgatttatcagcttcagcaacagctacaactaatgcagcagcagtctaacctaaatcagcaaccctctgcgcaggttggttcatctgcagtttcttcaacatgtaactggacagagcatacctcccctgaaggttttaagtactactacaatagcattactcgtgagagtaagtgggagaagcctgaagagtatgtgctgtatgagcaacagcagcagaaactgcttttgcttcaacagcaccaacagaatatcgctgtacagcaactgcagtcaccgccacagggtcaatcacttccatccatgcaaccgattcaacagcttccccaggcacaaggacaaacacaaatgcatatgaaacagcaggcagctggttccattgatcccaacaggattcaacagggcattccagctgcgcaagaacgtgcttggaaaaattaagtctgcaggtcgcaataataaagcgctagtcaaagactggggaagtgtacaagcccttgtgctgcccaatttcagtgcctgcacagcctttcgccaacgctgatgagtgtaactccggatttagatttagactgatacgtagatggtagatcccgtatgtgtacattgttgcaacttaggtcatgtactcgtgtatatttttcagcgtgctgccgtgctggtgtccgtacctagttggtagatgtcgtcacttgtgttttattttcgactgtggcatgatttgttatgttcggcactacgtgtgacgctctggttc

SEQ ID NO: 21460 - DNA, 2446 bp, Zea Mays
gttccttactacaatagcaagtactagcgatctagcgtgcatcgccagcccgtcccactatcgcctctcctctcattctctcgtgctctccacccgtttcccgcaaaaccctagctctgcgacatgcaccgcggcggcgatcgctccggcggcccctcgagcggcggagaccgctctggagcccggttccagcggggtccctcccgctggtctggcagcagcggcggcggattagggggtagcccgcccaatcgctactcctcccgcggcgcggcagatggaggtggtggagggggcggtggcagtggcggtggcgggaggttccacccttaccgtggttcttccgactattctagcggcggtggagggtacagaggcggtagtggcgttggtaacgacttcggcgaccagaggcaacgttacggcggcggcaacagaggcggaggccgtggggatttccaagatcatgatagtagaagtaactatgtcaaactttttgtcggatctgttccgaggacagcgactgaagaagacgttcgtcctttatttgaggaacatggagatgttcttgaagttgctctaattaaggataggaagaccggtgaacaacaaggttgttgtttcgttaaatatgctacttctgaggaggcggagagggccatcaggggtctgcacaaccactacactttacctggagcaatgggccctattcaagttagatatgctgatggtgaaagggaacgacatggggccatcgagcacaaattatttgttgcgtccctcaataagcaagcaactccaaaggagattgaagagatatttgccccatatggtcatgtggaagatgtttacattatgagagatagcgtgaagcagagccgaggttgtggctttgtcaaattctcatcaaaagaggcagcagtggaagctatgaatgcccttagtgggacttacacaatgagggggtgcgagcaaccattaatcattagatttgctgatcctaagaggcctagacctggagaatcaaggggtcgccctgcatttggaggtcctggtttcagtcctcgatcggatgcagcacttgttatcaggccaacagccaatcttgatgaatctaggggtcagcatatgcttcctgaatcttggcgtccatcaagtccaaggccaatggcacctaaccaatataataattttggatctgacaaccccttggcacttagtggtggcactgtaacatcagcagatactgctacttttcggcctccgatgttccctggaaatggctccttgtcaaatcagacggctgtgccaacttcgtcacacatgggcatgaacactcccatggtacaagaacaccatctacgaggccaacagatcccatccctgcaaaagccacctggtccaccacagaattttgctgtacaactgcagaatgcacagccaggacagcctctgcaggggcatattccacagattgggcagcttcaggccccacaatccacgggacctgtttcatttggccagaatatttcatctatgcaattacctggtcaacctcctgcatcacagccattgatgcaacggaatgcttctctaggtgctttacatgcccctccatctggacaatccaatccaatgcaagctgtccctggccagcagcaacttcccaccagtgttgctccccaaatgcttcagcagtcgatgcagcagatgccttcacaagcgccacagttgctgcttcaacagcaggcagctttgcagtctagttatcagtcttcacagcaggcgatttatcagcttcagcaacagctacaactaatgcagcagcagtctaacctaaatcagcaaccctctgcgcaggttggttcatctgcagtttcttcaacatgtaactggacagagcatacctcccctgaaggttttaagtactactacaatagcattactcgtgagagtaagtgggagaagcctgaagagtatgtgctgtatgagcaacagcagcagaaactgcttttgcttcaacagcaccaacagaatatcgctgtacagcaactgcagtcaccgccacagggtcaatcacttccatccatgcaaccgattcaacagcttccccaggcacaaggacaaacacaaatgcatatgaaacagcaggaattaaattattctcaatttcaggcagctggttccattgatcccaacaggattcaacagggcattccagctgcgcaagaacgtgcttggaaaaattaagtctgcaggtcgcaataataaagcgctagtcaaagactggggaagtgtacaagcccttgtgctgcccaatttcagtgcctgcacagcctttcgccaacgctgatgagtgtaactccggatttagatttagactgatacgtagatggtagatcccgttgttggtccaggataactgaattatcatccttgaatagat

SEQ ID NO: 21461 - DNA, 2802 bp, Zea Mays
gttccttactacaatagcaagtactagcgatctagcgtgcatcgccagcccgtcccactatcgcctctcctctcattctctcgtgctctccacccgtttcccgcaaaaccctagctctgcgacatgcaccgcggcggcgatcgctccggcggcccctcgagcggcggagaccgctctggagcccggttccagcggggtccctcccgctggtctggcagcagcggcggcggattagggggtagcccgcccaatcgctactcctcccgcggcgcggcagatggaggtggtggagggggcggtggcagtggcggtggcgggaggttccacccttaccgtggttcttccgactattctagcggcggtggagggtacagaggcggtagtggcgttggtaacgacttcggcgaccagaggcaacgttacggcggcggcaacagaggcggaggccgtggggatttccaagatcatgatagtagaagtaactatgtcaaactttttgtcggatctgttccgaggacagcgactgaagaagacgttcgtcctttatttgaggaacatggagatgttcttgaagttgctctaattaaggataggaagaccggtgaacaacaaggttgttgtttcgttaaatatgctacttctgaggaggcggagagggccatcaggggtctgcacaaccactacactttacctggagcaatgggccctattcaagttagatatgctgatggtgaaagggaacgacatggggccatcgagcacaaattatttgttgcgtccctcaataagcaagcaactccaaaggagattgaagagatatttgccccatatggtcatgtggaagatgtttacattatgagagatagcgtgaagcagagccgaggttgtggctttgtcaaattctcatcaaaagaggcagcagtggaagctatgaatgcccttagtgggacttacacaatgagggggtgcgagcaaccattaatcattagatttgctgatcctaagaggcctagacctggagaatcaaggggtcgccctgcatttggaggtcctggtttcagtcctcgatcggatgcagcacttgttatcaggccaacagccaatcttgatgaatctaggggtcagcatatgcttcctgaatcttggcgtccatcaagtccaaggccaatggcacctaaccaatataataattttggatctgacaaccccttggcacttagtggtggcactgtaacatcagcagatactgctacttttcggcctccgatgttccctggaaatggctccttgtcaaatcagacggctgtgccaacttcgtcacacatgggcatgaacactcccatggtacaagaacaccatctacgaggccaacagatcccatccctgcaaaagccacctggtccaccacagaattttgctgtacaactgcagaatgcacagccaggacagcctctgcaggggcatattccacagattgggcagcttcaggccccacaatccacgggacctgtttcatttggccagaatatttcatctatgcaattacctggtcaacctcctgcatcacagccattgatgcaacggaatgcttctctaggtgctttacatgcccctccatctggacaatccaatccaatgcaagctgtccctggccagcagcaacttcccaccagtgttgctccccaaatgcttcagcagtcgatgcagcagatgccttcacaagcgccacagttgctgcttcaacagcaggcagctttgcagtctagttatcagtcttcacagcagtctaacctaaatcagcaaccctctgcgcagtctgggcagccagtgcaatccagtaacactggtgatccgggtgccattattccgacaaaaattaatgcaatttcgcagcaggttggttcatctgcagtttcttcaacatgtaactggacagagcatacctcccctgaaggttttaagtactactacaatagcattactcgtgagagtaagtgggagaagcctgaagagtatgtgctgtatgagcaacagcagcagaaactgcttttgcttcaacagcaccaacagaatatcgctgtacagcaactgcagtcaccgccacagggtcaatcacttccatccatgcaaccgattcaacagcttccccaggcacaaggacaaacacaaatgcatatgaaacagcaggaattaaattattctcaatttcaggcagctggttccattgatcccaacaggattcaacagggcattccagctgcgcaagaacgtgcttggaaaaattaagtctgcaggtcgcaataataaagcgctagtcaaagactggggaagtgtacaagcccttgtgctgcccaatttcagtgcctgcacagcctttcgccaacgctgatgagtgtaactccggatttagatttagactgatacgtagatggtagatcccgttgttggtccaggataactgaattatcatccttgaatagataagctacctaagtgtgttaagtggaagcaacacatgaagcagacatggagaaggaagctggcatgaaactaaaacacattaagttgacatgtgacgttcattttttagatgtcttattctactgccaaacttcctaatactcatttttatattatattgtctatctgtacgtgtggatggagatgatgatattatgtgacgtgatgatggatggattattagcttcattgaatattagatgatattatgtgatgatgatattaagtgggcattgcagtattgatacatgcttcatatttctggatttttagtgatgtttt

SEQ ID NO: 21462 - DNA, 3491 bp, Zea Mays
aaagagagaagcttgcaatggcttgtcctggtgtggtttggtttggtcccagcaagcacaagagtaggccatggcagtgccagcgcgtccaaccatcatattttgcctgtcaagtctaaagtcttccccacgcccccaccttccttctgtaactgcaggtgcagctatcaggagcatgacttgtcacctcaccttaatctccaagcaccccaatattttatttttcagatcgggttagaaaaaaaaagaaggcaaggtcatatgcaggtgcaggcgtgcagcagtgcgatgccgaccccgctctgtcctcgctttctgtaatcttcctcacacaagtcacaaggctgcctccacttccatccagtaggaacaagtcagacacggaaggaaggaggagaaggcaccggaaatcctcccatcccgctagctggaacctggaagggctgaagctggagctggagtgctggacagtgaccgagagtgagagaggcagcagcggtccggtggctgtggcctccttggttgatgctcacccaccctcagggaggcacgagcgttccctctccggcgagccccaccccggaactcctccgagaaatgcggcggggcagccacagatgacaccttcctcttcttcctgacctgctgcagaggagggcagcctcctgcatttccgggttcccttgcgcttgcgcctcctatttcgtctttccacgagagtgggaaggggaagccggaggatgccggccaagtacctcggcccgggggcgttggcggaggacaggcgccaggacctccaccgccaggtgggctgcgtcaccgggatcttgcaggccttcgaccgccgccaccctctcgcctcctcctcccacaagaggctgcttcccccaacagcaggccatgcagtatccagtaacccaagcaaagagggcgattgcacaagatattcaccccagattgtgctggagaactcgagtaaaacatgggctgatagccaaagagcaccagcaacagaactgtctcaaacctcatattcatcgtcaccctcttcgtcattctcgtccgttgatgacaacaaatcaacacaacaggacctatcatccactgaccgaatgctatttccagagaggccgttcaagagctcgccgaagctcaagagttattttgacagtgacaccgggctcgactaccctgatgacgcgcctacgaagtccaaggacatgcccatagttcaatccagcctgccaactcttggtataagaaatcttgtgaaggattcaatctatatggatagccgtgaattgtcagtcagaatttgcactaaagaagtaacagatcacccatccaactgtggagatcaacctagggaattgaatgggcctccccgtgacagcacacaagaaaaaagcaagggtctcgtggacatcaatgaatcgcttcgagtgctagccaagctcagggaagcctcatggactcctgctgaatctgtccatcatgcaagactttcatatgatgctcctcggttctcatacgatgggaaggaggctgcatcaaaactgagggaggtaccaaggttgtcactggacatcaaggaaagtcaccttcggaatggtgaaattgactctagattgaacccaagcttgagttctacagacagaagcagcaacactgttattgggtccaatgcagcttttgagatccagcagaaacagcctgcctgcaagcggcttcctagcgttgttgcgaagctcatgggtttggaagagttgcctgagcataatcaaagtatagcatcatcacatgcatgcaaaaccgttcaagggagcaagcaagaggccatgttcaaccccttgagcatctcatctcacaacgagcatgctcttcgacaacaaaggaatcatgattcaactgttagaaatttacccaactcaaagtttcctgtcgaaactgcaccatggaagcaacaagaaaggattatccttcctcgcaaactgccaaagggatcaaaaggagcccacggaagagaacaacctgctgcatcagtcatcagtgacatagagaagcggctcaaggatcttgattttcgacaatcgtacaaggaccttagagcgcttaaacatattttggattccatgcaagcaaaaggactattggaaaacaaaaatagggaggaaatatctatgccaaagttatctgatggaaaccacaatggccaagagatagccagtgtgaacatgagagtgaacagtaacaccaacaacgtgtgtatgcctgaagagagcaacgctgaaagctctttcaaatcacctattgtgatcatgaaaccttcaaaatgtgcaaaccttttcaacgaagttgattcttctgtcttccccttagggggttcatctgatcccccacaacaacaaacaagcaatagcacctatagaaggaaagcttcaacgagaaatagaacagctaaagagcaacatgcaaaatttagttcaaaggtgcctacttctcaaccccttgtttcttatgacaggagatcatatggaaggaatgacgatagcagcaacaaccaaaaatctagttcactgctggttactgagagctcatccagaagacagcagctaccaagggacagtagcataagtatgaaaaagaataaacattccactaccccaaggttacaacagagaaaacttggttcagagcggagggctagaccacctattccttgtgctgagtctaacaaaagccaaaatcaatctggagataggaataatgcagaaacagtgtcaccccgaagcaaattcagaaggaaacttttgtgtccacaagaaggtgatgatgacatgccgagtggattgaacaacaggacaaggagcctgaaccagcatggcaatgatatgtccacaaggtcagatggcagtataactgttgcttcagagctggatattataagcaatgacagatctacggaagttgatattcctaattttgatcaaggcattggaactccatccggaaggaacccacaaagagtggtaaataatttccttgcaattttgccttatttctaaagcttcactaactttaacatgatttttttatttccaatacttaactactatggacaaaataataatctgtatttgaaatagtagctggttttggtcttctatcaatctctctccaagaatagttgtagttgggtcaggaaatgagaatgacaaattaaatcatacgacatactattggaaactaaaactcaatctactgcatagaagaccttaatgggccggcagcctaacagtggtgctgcccccccaccccacccccacacatacagagaacacacacagtctaacatccccatgcagtcgcaacggggcaccacacacgatgagactggggtaggaagccgacgaggttgcaatccccccgcattcgcagcatcatgaggtgcgattgttgtagctggagtagagaccggtgtgtactccaag

SEQ ID NO: 21463 - DNA, 4276 bp, Zea Mays
tccaaccatcatattttgcctgtcaagtctaaagtcttccccacgcccccaccttccttctgtaactgcaggtgcagctatcaggagcatgacttgtcacctcaccttaatctccaagcaccccaatattttatttttcagatcgggttagaaaaaaaaagaaggcaaggtcatatgcaggtgcaggcgtgcagcagtgcgatgccgaccccgctctgtcctcgctttctgtaatcttcctcacacaagtcacaaggctgcctccacttccatccagtaggaacaagtcagacacggaaggaaggaggagaaggcaccggaaatcctcccatcccgctagctggaacctggaagggctgaagctggagctggagtgctggacagtgaccgagagtgagagaggcagcagcggtccggtggctgtggcctccttggttgatgctcacccaccctcagggaggcacgagcgttccctctccggcgagccccaccccggaactcctccgagaaatgcggcggggcagccacagatgacaccttcctcttcttcctgacctgctgcagaggagggcagcctcctgcatttccgggttcccttgcgcttgcgcctcctatttcgtctttccacgagagtgggaaggggaagccggaggatgccggccaagtacctcggcccgggggcgttggcggaggacaggcgccaggacctccaccgccaggtgggctgcgtcaccgggatcttgcaggccttcgaccgccgccaccctctcgcctcctcctcccacaagaggctgcttcccccaacaggtcccgcttcctcactctctgctttctcttctcttgcgaggttggagatcccctgtgcggctgtgccctgcttcagtgtgtgtgtgtagccattcttgcttctccgtgcttccagccgtgatctatgccgtctatttctaccccatctctttgcctggtatcttttacttgggatgtgcccaataaaggactcagctttttgaagacacatattagattagatcaggttgtattttttattttagtatggaaaacagcctgtacccaagtgctccgcaggtttaagtccctgcagattcatgctccagacttgtgtgttggggattattggtaactgatgagttaccactttttccggtcagagtgttggttgttttggtttaaactgatgatgacctgcctgttttttttggacgaaaaggtgcttgctcatgatacaccaagaaccgtcctttcacagccccatttactatctccaaatcagccaccgacaaaaaccagtccttgcaaatttggaaccttttttcagataagaaaaatgtccttgactgaaaggaataagagctgtacgcagagtagtccattggatcaaaagaaaaaatgtttctgtgccttttcaactttagatgctgttactttgttttctctctctctattatcaggttccttgcaagattgtccctggcttgctcactccgttctttttatttgtcgtattttagttcaataatgaactagcgggcgacaaatattcgagaacggaggtaatatgattttgcaatgttgtccttttctagttttgctacaagaaagcagaaaggcatgctcttctcttgcccggttcagcattgacaatgattcacttcttgcagcaggccatgcagtatccagtaacccaagcaaagagggcgattgcacaagatattcaccccagattgtgctggagaactcgagtaaaacatgggctgatagccaaagagcaccagcaacagaactgtctcaaacctcatattcatcgtcaccctcttcgtcattctcgtccgttgatgacaacaaatcaacacaacaggacctatcatccactgaccgaatgctatttccagagaggccgttcaagagctcgccgaagctcaagagttattttgacagtgacaccgggctcgactaccctgatgacgcgcctacgaagtccaaggacatgcccatagttcaatccagcctgccaactcttggtataagaaatcttgtgaaggattcaatctatatggatagccgtgaattgtcagtcagaatttgcactaaagaagtaacagatcacccatccaactgtggagatcaacctagggaattgaatgggcctccccgtgacagcacacaagaaaaaagcaagggtctcgtggacatcaatgaatcgcttcgagtgctagccaagctcagggaagcctcatggactcctgctgaatctgtccatcatgcaagactttcatatgatgctcctcggttctcatacgatgggaaggaggctgcatcaaaactgagggaggtaccaaggttgtcactggacatcaaggaaagtcaccttcggaatggtgaaattgactctagattgaacccaagcttgagttctacagacagaagcagcaacactgttattgggtccaatgcagcttttgagatccagcagaaacagcctgcctgcaagcggcttcctagcgttgttgcgaagctcatgggtttggaagagttgcctgagcataatcaaagtatagcatcatcacatgcatgcaaaaccgttcaagggagcaagcaagaggccatgttcaaccccttgagcatctcatctcacaacgagcatgctcttcgacaacaaaggaatcatgattcaactgttagaaatttacccaactcaaagtttcctgtcgaaactgcaccatggaagcaacaagaaaggattatccttcctcgcaaactgccaaagggatcaaaaggagcccacggaagagaacaacctgctgcatcagtcatcagtgacatagagaagcggctcaaggatcttgattttcgacaatcgtacaaggaccttagagcgcttaaacatattttggattccatgcaagcaaaaggactattggaaaacaaaaatagggaggaaatatctatgccaaagttatctgatggaaaccacaatggccaagagatagccagtgtgaacatgagagtgaacagtaacaccaacaacgtgtgtatgcctgaagagagcaacgctgaaagctctttcaaatcacctattgtgatcatgaaaccttcaaaatgtgcaaaccttttcaacgaagttgattcttctgtcttccccttagggggttcatctgatcccccacaacaacaaacaagcaatagcacctatagaaggaaagcttcaacgagaaatagaacagctaaagagcaacatgcaaaatttagttcaaaggtgcctacttctcaaccccttgtttcttatgacaggagatcatatggaaggaatgacgatagcagcaacaaccaaaaatctagttcactgctggttactgagagctcatccagaagacagcagctaccaagggacagtagcataagtatgaaaaagaataaacattccactaccccaaggttacaacagagaaaacttggttcagagcggagggctagaccacctattccttgtgctgagtctaacaaaagccaaaatcaatctggagataggaataatgcagaaacagtgtcaccccgaagcaaattcagaaggaaacttttgtgtccacaagaaggtgatgatgacatgccgagtggattgaacaacaggacaaggagcctgaaccagcatggcaatgatatgtccacaaggtcagatggcagtataactgttgcttcagagctggatattataagcaatgacagatctacggaagttgatattcctaattttgatcaaggcattggaactccatccggaaggaacccacaaagagtggtaaataatttccttgcaattttgccttatttctaaagcttcactaactttaacatgatttttttatttccaatacttaactactatggacaaaataataatctgtatttgaaatagtagctggttttggtcttctatcaatctctctccaagaatagttgtagttgggtcaggaaatgagaatgacaaattaaatcatacgacatactattggaaactaaaactcaatctactgcatagaagaccttaatgggccggcagcctaacagtggtgctgcccccccaccccacccccacacatacagagaacacacacagtctaacatccccatgcagtcgcaacggggcaccacacacgatgagactggggtaggaagccgacgaggttgcaatccccccgcattcgcagcatcatgaggtgcgattgttgtagctggagtagagaccggtgtgtactccaag

SEQ ID NO: 21464 - DNA, 186 bp, Zea Mays
caaaatcaattaataaatcgcattagccctccaacttaatgcttcatcttatcaagatcataagatactggatattaagagatctagttctcagtggccttacatgcgatcagatagatatcggcagactgactgttcataaagtgataaaacactcccgcctggcgcctattgatggcaatgctc

SEQ ID NO: 21465 - DNA, 534 bp, Zea Mays
tcggagttggagccggtgatgcgggcgagcgcgaggaggccctggaagctggtgtaggcgttgccatcgctcgagccggatccggaagctgctgcggcgctggcggctgcgttggcgtcgttggcggccgcggcggcagcggcggcggagacggaggaggaggggcggcccggctgttgcttgttgttctcgggcgcgtaggggtcgtatccgatggcgctctgccagatgccgtgcgtctgcaatgccgcgctgctgtgcacgcggttgttcgcgggcatgcggacgcgccccgccgtcgccggcatctttggtcgcagccggttgcgctcggtggaggggtaaagttagggtttgttgggaggtgggtgtagggattgggatctgggattgatttttgctcgattggggaacgcgtggataccggtggataggcggatgaaaacgagtgttatctggcgcataactacgcagagctcccgaggccgcaatcgctgttttttttttctttcccgccgcgacgaaacatctgtg

SEQ ID NO: 21466 - DNA, 1623 bp, Zea Mays
ggccaattccctgtatgccactggaaaatatactcattccttgtatgccactggccccacatgtcatagacaccaaaaaatatacctatatgccactcagtggcacacaagggatgagtataaaatctgatggcataccaggaattttctctagtttttagttaataacaacctaaattaatttttggacgtttttagggagatgctctcaaggccacaggatgacaggaccgagtctgccgactagctattagggttttgtttgcaaaccccaattcgattcccaaccacatcagccgccgccgtcccgtcaccaccaccaaccttggtagcagccgccgtccggtcatcaccaccaccttggtagccgccgccgaagcgcgccgcgggcgcgggcgctcgcgatggctaaccgcacggaccccctcgcgaagagcatccatgggacgaacccacaaaacctggtggagaagatcgtgcgctccaagatctatcagagcacctactggaaggagcaatgcttcggcctcaccgcagagacgctagtcgacaaggacatcgtagtcgagttcatcaagaacgaggattacaagtatgttcgtgttctcggggccttctacctgcgtctcactggcacaattgctgacgtctaccagtatcttgagccgctctacaacgactaccgcaagatcaggcacaagctcagcgatggacagttcacacttacccatgttgatgagttcattgatgagttgctgaccaaggattactcctgtgatacagccatgcctcgcatccagaaaagatgggttcttgaagcgtctggaactctggaaccgagaagaagtgcacttgaggacgattttgaggaagaagaggaagacaaggaggaacagcctatggaaattgatgaaccgaatggtcgtgaaaatgataatcatcgtggaaggagccttgccagggaacgggatagggactgggaccatgacaggaaacatgaaaggcataacagggacaaagattatgatagagatcgggattatgatagggactatgggagagggcgggaaagacaccgagatagagatcgtgaaagagacagaaaccgggatagggatagagaccgtcaccgcctgcgagatgatgattacaatcgcaacagggatagggacagggagagggatggtagggaaagggagcgccgagacagagaccgtggcaggcacaggagccgctcaaggagcagagatcgacgggacagagaccgtgaagatggagagtaccgcaggaggcgtggtcgtggcagtgtaagtcctcgaggacgtggtgaagacggtggcccaagagaggaacctaagaggaagaaggaaaagaaagagaagggtgaaggaaatgctccggacccgaatgaccctgagatcatagaaatgaacaagctacgggcctcactggggttgaaaccactaaagtagtttacacgagtaatgttcaacttgacctgcatccaaccttttttgtgctggactttttcagcttgatgtaactaaacttttgtattgatgtggttatatattcatcagggcttccatttctgtctgcatttcaatgcatttgttttgtaat

SEQ ID NO: 21467 - DNA, 989 bp, Zea Mays
gctcgcttccttatctccgttaacattgtatgttcgtgttctcggggccttctacctgcgtctcactggcacaattgctgacgtctaccagtatcttgagccgctctacaacgactaccgcaagatcaggcacaagctcagcgatggacagttcacacttacccatgttgatgagttcattgatgagttgctgaccaaggattactcctgtgatacagccatgcctcgcatccagaaaagatgggttcttgaagcgtctggaactctggaaccgagaagaagtgcacttgaggacgattttgaggaagaagaggaagacaaggaggaacagcctatggaaattgatgaaccgaatggtcgtgaaaatgataatcatcgtggaaggagccttgccagggaacgggatagggactgggaccatgacaggaaacatgaaagacaccgagatagagatcgtgaaagagacagaaaccgggatagggatagagaccgtcaccgcctgcgagatgatgattacaatcgcaacagggatagggacagggagagggatggtagggaaagggagcgccgagacagagaccgtggcaggcacaggagccgctcaaggagcagagatcgacgggacagagaccgtgaagatggagagtaccgcaggaggcgtggtcgtggcagtgtaagtcctcgaggacgtggtgaagacggtggcccaagagaggaacctaagaggaagaaggaaaagaaagagaagggtgaaggaaatgctccggacccgaatgaccctgagatcatagaaatgaacaagctacgggcctcactggggttgaaaccactaaagtagtttacacgagtaatgttcaacttgacctgcatccaaccttttttgtgctggactttttcagcttgatgtaactaaacttttgtattgatgtggttatatattcatcagggcttccatttctgtctgcatttcaatgcatttgttttgtaat

SEQ ID NO: 21468 - DNA, 2459 bp, Zea Mays
agaaccagaaccagaacaagaccggaggaaccagacgacgcaagggaaaggagagccaccggagcggaccgccaccttcccttctgccggcgacctccagccacggcgcccatggcgtcggcgaagctgctgtacattgtggtggttgacgagaacgcctcctccttccgatacacgcgctccctcctccatagcaccctccagctcatgggatgcaagccacgccacgccttcgagatcagccgcagggtgtttgatgtcatccggggtgaccaccagggccacggcgacacggccacctccgcccgggtacaaaggtacgaggtcgccgaagccaccccgaccgcaagcccccgccagttccagttcgagctatacaagcgccggaccaccgtcctcctcccaagggacctcttcctcgacctcgtcctcgacgccctcgccctctacaagattcgtgaacgaaaggaatctatcacggttcttctttgtggaactagtggctgtggcaagtctactctttctacgttgctgggaagcaggttaggaattacaactgtagtttctacagattcaatacgtcacatgatgcgaagctttgttgaagaaaaagaaaaccctcttctctgggcatcaacttaccatgcaggtgaatgtcttgatccagtagcagttgctgaagcaaaagctaggaggaaagcaaaaaaacgctcaggcgtatcaagcagctcaactattgattatgagaaaagtgggtctcttaccgaaaaagttgatgggaaatcaatcgggaagaagcaaatggccgttgaaggttttaaagcacagagcgagatggtgattgatagtttggatcggttaattactgcgtgggaagataggaaagaatcagttgttgtcgagggtgttcacttaagccttaattttgtgatgggtctaatgaggaaacatccttcgatcatacctttcatgatctacatctctaatgagggtaagcacacagagaggtttgctgtacgtgcaaagtacatgacacttgacccaacaaaaaataagtatgttaaatacatcagcaacattagaactatccaggagtatctctgcagcagagctgacaagtacctagttcccaaggtcaacaacactaatgttgatcggagcgtggcttcgatccatgccactgtcttcagttgcctccgtaggcgaagtaatggagatcaattatacgaccctgaaggaaatactattgctattgtaaatgaagagtacaaaaaccaatgtgtggctaattccatgagttccaaggggatgtttaaattgatccaacgtcttggatcctcaagaaagctcatggccatcattaatgtcgacggttctgtttctaaggcctggccagttgagtctagtggagatggaaaatgcagttctgacaacagtaataagaaatctgtggggaatccaatctatggacctctaaatattggaagagcagagtcagtcaatctgcagtttggcacctttggaataagtgcctggcctactgatacaggctgtacaagtcaagctggaaatgctgatgaatcatgggtaaatgctgctgaaggtagtagcagtcatgttcaatcatcatccggttctacgaagaagttggatggacattgtaaagagatcaaagagtcatcagcagcatatggcagtgatgaagaagaggaagaagaagctgatgtccgtcctaattcagggagtgatgaggacctaagtgaagaagacaccatggagatcgatgaggagatggaagggtctgtggacgaggactgcaacaggtctgatgaggaatatgacgacctggccatgcgggacagtttggagaacggctatttaactgacgatggtgttttctgttctggtttaagcaactcgtcaagcggcaagttctttggtggcaatcaactaagccacagcacgccaaagaaaccccaagagaagttcgatgctggtgttcctgagacgtcacgctcttattctgctgcagtccctgctggtacaagtagcaagcggcatgctactaggaagtggaagcgctcgctcagtgaccccttccgttcacggccgcacagtgctccggaattggtgtcaggatgcaagggatcaccgcccgtgcctgtggctccagaggagaggtagccgatgagctacagaagacgtatcgtgttatgttttttagcataaattgcaaatgaattatgaatattgttatctgaggcatcatggatgtgaaaaaagtactatgcaactaactttttaaggtgttgattttgtaagaggatgtttggtgaaaggaccaagatgtccataggaattgaattaggctaatgtaattttttaataattaaattatatcaaatagttcactcgaccccttgtgcctaagagcgttatttattctatataaaagtttt

SEQ ID NO: 21469 - DNA, 2417 bp, Zea Mays
agaaccagaaccagaacaagaccggaggaaccagacgacgcaagggaaaggagagccaccggagcggaccgccaccttcccttctgccggcgacctccagccacggcgcccatggcgtcggcgaagctgctgtacattgtggtggttgacgagaacgcctcctccttccgatacacgcgctccctcctccatagcaccctccagctcatgggatgcaagccacgccacgccttcgagggccacggcgacacggccacctccgcccgggtacaaaggtacgaggtcgccgaagccaccccgaccgcaagcccccgccagttccagttcgagctatacaagcgccggaccaccgtcctcctcccaagggacctcttcctcgacctcgtcctcgacgccctcgccctctacaagattcgtgaacgaaaggaatctatcacggttcttctttgtggaactagtggctgtggcaagtctactctttctacgttgctgggaagcaggttaggaattacaactgtagtttctacagattcaatacgtcacatgatgcgaagctttgttgaagaaaaagaaaaccctcttctctgggcatcaacttaccatgcaggtgaatgtcttgatccagtagcagttgctgaagcaaaagctaggaggaaagcaaaaaaacgctcaggcgtatcaagcagctcaactattgattatgagaaaagtgggtctcttaccgaaaaagttgatgggaaatcaatcgggaagaagcaaatggccgttgaaggttttaaagcacagagcgagatggtgattgatagtttggatcggttaattactgcgtgggaagataggaaagaatcagttgttgtcgagggtgttcacttaagccttaattttgtgatgggtctaatgaggaaacatccttcgatcatacctttcatgatctacatctctaatgagggtaagcacacagagaggtttgctgtacgtgcaaagtacatgacacttgacccaacaaaaaataagtatgttaaatacatcagcaacattagaactatccaggagtatctctgcagcagagctgacaagtacctagttcccaaggtcaacaacactaatgttgatcggagcgtggcttcgatccatgccactgtcttcagttgcctccgtaggcgaagtaatggagatcaattatacgaccctgaaggaaatactattgctattgtaaatgaagagtacaaaaaccaatgtgtggctaattccatgagttccaaggggatgtttaaattgatccaacgtcttggatcctcaagaaagctcatggccatcattaatgtcgacggttctgtttctaaggcctggccagttgagtctagtggagatggaaaatgcagttctgacaacagtaataagaaatctgtggggaatccaatctatggacctctaaatattggaagagcagagtcagtcaatctgcagtttggcacctttggaataagtgcctggcctactgatacaggctgtacaagtcaagctggaaatgctgatgaatcatgggtaaatgctgctgaaggtagtagcagtcatgttcaatcatcatccggttctacgaagaagttggatggacattgtaaagagatcaaagagtcatcagcagcatatggcagtgatgaagaagaggaagaagaagctgatgtccgtcctaattcagggagtgatgaggacctaagtgaagaagacaccatggagatcgatgaggagatggaagggtctgtggacgaggactgcaacaggtctgatgaggaatatgacgacctggccatgcgggacagtttggagaacggctatttaactgacgatggtgttttctgttctggtttaagcaactcgtcaagcggcaagttctttggtggcaatcaactaagccacagcacgccaaagaaaccccaagagaagttcgatgctggtgttcctgagacgtcacgctcttattctgctgcagtccctgctggtacaagtagcaagcggcatgctactaggaagtggaagcgctcgctcagtgaccccttccgttcacggccgcacagtgctccggaattggtgtcaggatgcaagggatcaccgcccgtgcctgtggctccagaggagaggtagccgatgagctacagaagacgtatcgtgttatgttttttagcataaattgcaaatgaattatgaatattgttatctgaggcatcatggatgtgaaaaaagtactatgcaactaactttttaaggtgttgattttgtaagaggatgtttggtgaaaggaccaagatgtccataggaattgaattaggctaatgtaattttttaataattaaattatatcaaatagttcactcgaccccttgtgcctaagagcgttatttattctatataaaagtttt

SEQ ID NO: 21470 - DNA, 2462 bp, Zea Mays
agaaccagaaccagaacaagaccggaggaaccagacgacgcaagggaaaggagagccaccggagcggaccgccaccttcccttctgccggcgacctccagccacggcgcccatggcgtcggcgaagctgctgtacattgtggtggttgacgagaacgcctcctccttccgatacacgcgctccctcctccatagcaccctccagctcatgggatgcaagccacgccacgccttcgagggccacggcgacacggccacctccgcccgggtacaaaggtacgaggtcgccgaagccaccccgaccgcaagcccccgccagttccagttcgagctatacaagcgccggaccaccgtcctcctcccaagggacctcttcctcgacctcgtcctcgacgccctcgccctctacaagtacgttgcccccaaccagcgcgccgatctcatgctcgcctgcaggattcgtgaacgaaaggaatctatcacggttcttctttgtggaactagtggctgtggcaagtctactctttctacgttgctgggaagcaggttaggaattacaactgtagtttctacagattcaatacgtcacatgatgcgaagctttgttgaagaaaaagaaaaccctcttctctgggcatcaacttaccatgcaggtgaatgtcttgatccagtagcagttgctgaagcaaaagctaggaggaaagcaaaaaaacgctcaggcgtatcaagcagctcaactattgattatgagaaaagtgggtctcttaccgaaaaagttgatgggaaatcaatcgggaagaagcaaatggccgttgaaggttttaaagcacagagcgagatggtgattgatagtttggatcggttaattactgcgtgggaagataggaaagaatcagttgttgtcgagggtgttcacttaagccttaattttgtgatgggtctaatgaggaaacatccttcgatcatacctttcatgatctacatctctaatgagggtaagcacacagagaggtttgctgtacgtgcaaagtacatgacacttgacccaacaaaaaataagtatgttaaatacatcagcaacattagaactatccaggagtatctctgcagcagagctgacaagtacctagttcccaaggtcaacaacactaatgttgatcggagcgtggcttcgatccatgccactgtcttcagttgcctccgtaggcgaagtaatggagatcaattatacgaccctgaaggaaatactattgctattgtaaatgaagagtacaaaaaccaatgtgtggctaattccatgagttccaaggggatgtttaaattgatccaacgtcttggatcctcaagaaagctcatggccatcattaatgtcgacggttctgtttctaaggcctggccagttgagtctagtggagatggaaaatgcagttctgacaacagtaataagaaatctgtggggaatccaatctatggacctctaaatattggaagagcagagtcagtcaatctgcagtttggcacctttggaataagtgcctggcctactgatacaggctgtacaagtcaagctggaaatgctgatgaatcatgggtaaatgctgctgaaggtagtagcagtcatgttcaatcatcatccggttctacgaagaagttggatggacattgtaaagagatcaaagagtcatcagcagcatatggcagtgatgaagaagaggaagaagaagctgatgtccgtcctaattcagggagtgatgaggacctaagtgaagaagacaccatggagatcgatgaggagatggaagggtctgtggacgaggactgcaacaggtctgatgaggaatatgacgacctggccatgcgggacagtttggagaacggctatttaactgacgatggtgttttctgttctggtttaagcaactcgtcaagcggcaagttctttggtggcaatcaactaagccacagcacgccaaagaaaccccaagagaagttcgatgctggtgttcctgagacgtcacgctcttattctgctgcagtccctgctggtacaagtagcaagcggcatgctactaggaagtggaagcgctcgctcagtgaccccttccgttcacggccgcacagtgctccggaattggtgtcaggatgcaagggatcaccgcccgtgcctgtggctccagaggagaggtagccgatgagctacagaagacgtatcgtgttatgttttttagcataaattgcaaatgaattatgaatattgttatctgaggcatcatggatgtgaaaaaagtactatgcaactaactttttaaggtgttgattttgtaagaggatgtttggtgaaaggaccaagatgtccataggaattgaattaggctaatgtaattttttaataattaaattatatcaaatagttcactcgaccccttgtgcctaagagcgttatttattctatataaaagtttt

SEQ ID NO: 21471 - DNA, 2422 bp, Zea Mays
agaaccagaaccagaacaagaccggaggaaccagacgacgcaagggaaaggagagccaccggagcggaccgccaccttcccttctgccggcgacctccagccacggcgcccatggcgtcggcgaagctgctgtacattgtggtggttgacgagaacgcctcctccttccgatacacgcgctccctcctccatagcaccctccagctcatgggatgcaagccacgccacgccttcgagatcagccgcagggtgtttgatgtcatccggggtgaccaccagggccacggcgacacggccacctccgcccgggtacaaaggtacgaggtcgccgaagccaccccgaccgcaagcccccgccagttccagttcgagctatacaagcgccggaccaccgtcctcctcccaagggacctcttcctcgacctcgtcctcgacgccctcgccctctacaagtacgttgcccccaaccagcgcgccgatctcatgctcgcctgcagggaagcaggttaggaattacaactgtagtttctacagattcaatacgtcacatgatgcgaagctttgttgaagaaaaagaaaaccctcttctctgggcatcaacttaccatgcaggtgaatgtcttgatccagtagcagttgctgaagcaaaagctaggaggaaagcaaaaaaacgctcaggcgtatcaagcagctcaactattgattatgagaaaagtgggtctcttaccgaaaaagttgatgggaaatcaatcgggaagaagcaaatggccgttgaaggttttaaagcacagagcgagatggtgattgatagtttggatcggttaattactgcgtgggaagataggaaagaatcagttgttgtcgagggtgttcacttaagccttaattttgtgatgggtctaatgaggaaacatccttcgatcatacctttcatgatctacatctctaatgagggtaagcacacagagaggtttgctgtacgtgcaaagtacatgacacttgacccaacaaaaaataagtatgttaaatacatcagcaacattagaactatccaggagtatctctgcagcagagctgacaagtacctagttcccaaggtcaacaacactaatgttgatcggagcgtggcttcgatccatgccactgtcttcagttgcctccgtaggcgaagtaatggagatcaattatacgaccctgaaggaaatactattgctattgtaaatgaagagtacaaaaaccaatgtgtggctaattccatgagttccaaggggatgtttaaattgatccaacgtcttggatcctcaagaaagctcatggccatcattaatgtcgacggttctgtttctaaggcctggccagttgagtctagtggagatggaaaatgcagttctgacaacagtaataagaaatctgtggggaatccaatctatggacctctaaatattggaagagcagagtcagtcaatctgcagtttggcacctttggaataagtgcctggcctactgatacaggctgtacaagtcaagctggaaatgctgatgaatcatgggtaaatgctgctgaaggtagtagcagtcatgttcaatcatcatccggttctacgaagaagttggatggacattgtaaagagatcaaagagtcatcagcagcatatggcagtgatgaagaagaggaagaagaagctgatgtccgtcctaattcagggagtgatgaggacctaagtgaagaagacaccatggagatcgatgaggagatggaagggtctgtggacgaggactgcaacaggtctgatgaggaatatgacgacctggccatgcgggacagtttggagaacggctatttaactgacgatggtgttttctgttctggtttaagcaactcgtcaagcggcaagttctttggtggcaatcaactaagccacagcacgccaaagaaaccccaagagaagttcgatgctggtgttcctgagacgtcacgctcttattctgctgcagtccctgctggtacaagtagcaagcggcatgctactaggaagtggaagcgctcgctcagtgaccccttccgttcacggccgcacagtgctccggaattggtgtcaggatgcaagggatcaccgcccgtgcctgtggctccagaggagaggtagccgatgagctacagaagacgtatcgtgttatgttttttagcataaattgcaaatgaattatgaatattgttatctgaggcatcatggatgtgaaaaaagtactatgcaactaactttttaaggtgttgattttgtaagaggatgtttggtgaaaggaccaagatgtccataggaattgaattaggctaatgtaattttttaataattaaattatatcaaatagttcactcgaccccttgtgcctaagagcgttatttattctatataaaagtttt

SEQ ID NO: 21472 - DNA, 992 bp, Zea Mays
atatcgtcgcaagctctccgtgtttctctcgtttcttcactgctgccaactgtgctgtgcagtagttgcaagagctgattggtagctaggtacgctaggcaagtaggcatggctcccaagcggcgcggaaacaaggtggtgggctccgtggtgaagaccaaactagtgcaggagaccgtggaggtcatcgtcgccgacgacgatgggttgcacgaggagaagcagccggagactccgcgcgtggcgtcggagaagaggaagaaagcagcaacaccaacaaagaagacgaagacgcagcagccgcggcggcggcggcagcggctggggcaggccagctccggaggcgacgccgggatgggcggcgtgggagggtacaggcggtacgtgtggcgcgtgctgaagcaggtgcacccggacctgggcgtgtcggggcacgccatgcaggtgctggacatgatgatggccgacatgttcgagcgcctcgcggaggaggcggcgcgcctgtccaaggccacgggcagggcgacgctcacctcccgcgaggtgcagagcgccgtcaggctcgtgctccccggggagctgggcaggcacgccatctctgagggcaccaaagccatctccaagtacatgtcctatgccgcctaggtagctaccgtacatgttttctgtaccttggaagtagtgcgtactgcagctgatgtattttcatgcatgccaactagactagctagtagttactgtacgtatgtagttgatagtgtaatcaggccgggtagcagctagctagaccaacttaattagctaatgtagtttgatgtacctgtctgtcagtctgtgtatgtttcgttgttttaatcgaccaacttgttccgtgtcctttttgttgtctagttctgtctactgttctgtttgtctgattggatccatcagcccatccatgtaccgcctggctagcttatcaggtattgcaatccaattcaggaactcacctc

SEQ ID NO: 21473 - DNA, 428 bp, Zea Mays
atatcgtcgcaagctctccgtgtttctctcgtttcttcactgctgccaactgtgctgtgcagtagttgcaagagctgattggtagctaccgtacatgttttctgtaccttggaagtagtgcgtactgcagctgatgtattttcatgcatgccaactagactagctagtagttactgtacgtatgtagttgatagtgtaatcaggccgggtagcagctagctagaccaacttaattagctaatgtagtttgatgtacctgtctgtcagtctgtgtatgtttcgttgttttaatcgaccaacttgttccgtgtcctttttgttgtctagttctgtctactgttctgtttgtctgattggatccatcagcccatccatgtaccgcctggctagcttatcaggtattgcaatccaattcaggaactcacctc

SEQ ID NO: 21474 - DNA, 408 bp, Zea Mays
atatcgtcgcaagctctccgtgtttctctcgtttcttcactgctgccaactgtgctgtgcagtagctaccgtacatgttttctgtaccttggaagtagtgcgtactgcagctgatgtattttcatgcatgccaactagactagctagtagttactgtacgtatgtagttgatagtgtaatcaggccgggtagcagctagctagaccaacttaattagctaatgtagtttgatgtacctgtctgtcagtctgtgtatgtttcgttgttttaatcgaccaacttgttccgtgtcctttttgttgtctagttctgtctactgttctgtttgtctgattggatccatcagcccatccatgtaccgcctggctagcttatcaggtattgcaatccaattcaggaactcacctc

SEQ ID NO: 21475 - DNA, 1811 bp, Zea Mays
catttccaggatttactagctgggtttaccatagcccgtaggatgtcgagcgatctccactcggcatcggacgtgatcgccggtcgccgcctcctctccaggctgcagcacctgagcgccagcttcatgagcttctcggcctgcacctccggccagggcccggcggacgcgtccagcacgctgtgcacggcgtccatcttcaccgcctcgcgcgcctgctccgcgacgttgagatccagcagccccgtgagcatctgcagaatcaccatgccgaacgcgtacacgtccgactccgttgtgagctcgccggtcatgaagaacacggggtccatgtaccccgccgtgcccatcgggttcgtgcggcggccgatggtctcctcctccagcggtttcacgtgcaccgcccgcgccgtcccgaagtctcccagccggctcgcgttgccggcgtccaggaggatgttggtcagcttcacgtcggcgtggatgatggcgtggggccgcctggagtggaggtacgccagcgcagagcgcagctcgccgaggatcctgacgcggtccttccacaggaggcccttggagagcctgtccttgagcgtgccgttggggaggtgctcgtacaccaggccgcacgactccgggcacacgccaatcagcctcacgatgtgtgggtgctccaatttgctcagcaccaccacctgaggatcagagcacccccagtgcgattatgactgggccataacctcctcctccgatgaaatttcttgagtggaagttgtcggtcgccttttcgatttgcgacatcgagaattgttcaatgttctctggaatctgcagctctggatatctaggctctgatagactctttcgcttcagtgacgcagccatttgtctaggtgacaagctcctctcgtcgtgattacgctcctctccttgcagctgtttcagtttcttttgcagccggtctatttcctcctgatcaaacaaaacaagagttgctgaacacccatgcttatatgatgcactagtcaatgtttcatcttcctgcacatcatggtggacgcaatcaatctattgcacctacactggtgggcacaagttaaagactccctgtcaagggcgtcgggccctagtgacgccggacctcaactacgaagttcgtagtctcagaagaaggagattagatttgaatgtgatgtttgatgtgtagattcagttctgaccttgaaccgatgactattcttttaattttgagcttctttatgaggttcacaacaccggcaacagtgtcatcatgtgtaagtatcggattcgagggccatgccactttaaattcagcacaacagaaaaaaaatcggatgttgatttgtctgaaggattataaagatcttactgaaaggcatccacttggagggccagtgaacatggacaagaacgatggtggccctggggaaattggcggcggcccacagtatgttggctttctcctttcttgagttcttcccaactgcgatatggacctcttcctcgtccatgtttctcggctcgcttcctacatgtgctatcatgaatcaagctaagatcctgctatgccttcgcaatctgcttcggtggagcacgcatggcctgaacagcagaacaggggaaagtgaggtggttacctttttttctcctctggcgccactttacatcaacgctatggtatttgcatcggtatcggcgtcgcccttgtgccttttgcagcttattattcttcctagggaggttagctgagagatagctaataagtgacaacaagaggctggaagcgtggc

SEQ ID NO: 21476 - DNA, 1195 bp, Zea Mays
catttccaggatttactagctgggtttaccatagcccgtaggatgtcgagcgatctccactcggcatcggacgtgatcgccggtcgccgcctcctctccaggctgcagcacctgagcgccagcttcatgagcttctcggcctgcacctccggccagggcccggcggacgcgtccagcacgctgtgcacggcgtccatcttcaccgcctcgcgcgcctgctccgcgacgttgagatccagcagccccgtgagcatctgcagaatcaccatgccgaacgcgtacacgtccgactccgttgtgagctcgccggtcatgaagaacacggggtccatgtaccccgccgtgcccatcgggttcgtgcggcggccgatggtctcctcctccagcggtttcacgtgcaccgcccgcgccgtcccgaagtctcccagccggctcgcgttgccggcgtccaggaggatgttggtcagcttcacgtcggcgtggatgatggcgtggggccgcctggagtggaggtacgccagcgcagagcgcagctcgccgaggatcctgacgcggtccttccacaggaggcccttggagagcctgtccttgagcgtgccgttggggaggtgctcgtacaccaggccgcacgactccgggcacacgccaatcagcctcacgatgtgtgggtgctccaatttgctcagcaccaccacctgaggatcagagcacccccagtgcgattatgactgggccataacctcctcctccgatgaaatttcttgagtggaagttgtcggtcgccttttcgatttgcgacatcgagaattgttcaatgttctctggaatctgcagctctggatatctaggctctgatagactctttcgcttcagtgacgcagccatttgtctaggtgacaagctcctctcgtcgtgattacgctcctctccttgcagctgtttcagtttcttttgcagccggtctatttcctcctgatcaaacaaaacaagagttgctgaacacccatgcttatatgatgcactagaatgtgatgtttgatgtgtagattcagttctgaccttgaaccgatgactattcttttaattttgagcttctttatgaggttcacaacaccggcaacagtgtcatcatgtgtaagatgtgagttgacgaggaacccggcgccgaacttttgggtcagcatctcgacaacag

SEQ ID NO: 21477 - DNA, 661 bp, Zea Mays
atatggcatgacagccttggatcctggcgcgccggtgaatggcgattggaccttcggcatcggcacgacgcctgtcgcagcaagcattcattcatgctgtcaaagctgtcagcgttcacgcagagacatctgcttcaagtttatcaacatgggattcaagagcatataccggtatcattcttcgagctggcagctggctgacgtgaagactgaggccgaaacttctgtcccgtcccggtgcgcacctgacctgcagaagaggctgtgctgtacgtgagataggtagaggggtcgacgatgactcgatgagacagacggctagaaatctggaacgcaaggcacgacggagtactggcttcagaggatccatccttcccccagttgctttcgcccgtcgccatgcagctccaatttccttcttagggtgagactttgacaaacctgggcactggacacggctttcaaaccaagatctttttttttttgcctgtctcactcgtctcagtgacgttcattcacctaaaagcagtcaacgaggcaagcatacagcattacttatgtatggaagttggaaggccattctgatgattccattattacctcagatgtgagttgacgaggaacccggcgccgaacttttgggtcagcatctcgacaacag

SEQ ID NO: 21478 - DNA, 2093 bp, Zea Mays
gattgagtcggattaaatccatagcaagttaaaatacatctcaatcccacccaatacactctaatccacatggaataccaataaccgaacaagaccttaggagttccctatccaactcccctatacactataactgagatatctaacttactcagcgcaaccagttttcactcctccacatcacaccaaagaggtcaccacctcaccacagtgaatgcctctccggcgcccgccccgccctcgtggcctcatcacaaagcgagggaaaaaaaaagaaaagaaaagaaaaatcacgagtggaatcgttgatccgcacgagacaatccttgctcgcttagaagattcctacccttacgtttggttggatgcttggatctccatttcctccctctgaacattcacccgtaccgaagactctgattccagactcgatccacgcggcgcgccacctgttcgaggtaattccctcccagatacaacctgccatcgccgcctcctagtgctccggcccggcgccggccatgtcgctggcctgcggcctgccgctgctcgagtgcgtctactgcctcgcttgcgcgcgctgggcatggaagcgctgcctccacagcggcgaggtcgacagcgccacctggggcctcgcctccgccgacgacttcgagcccgtgccgcgcatgtgccgcctcgtcatggccaactacgaacccgatctctccccctccgccccgctcctcttcgcgccgcccggcggctacggcatcgaccccgcctgcgtcctccgccgccggacctacgccgacacacgcggccgcgtcacgccctacctcctctacctcgatcacgcccacgccgacatcgtcctcgcgctccgcgggctcaacctcgtcaaggagtccgactacgcgctccttctcgacaaccgtctcggcaagcgccgcttcgacggcggctacgtccacaacggcctcctcagggccgccggctgggtgctcgatgctgagtgcgacctcctcagggaactcctcgagacgtaccccgactacacgctcaccttcacgggtcattctctgggcgccggcatcgccgccatgctcaccatggtcgtcgtcctcaacctcgacaagattggcaacatcgacaggacccgcacacgctgctacgccatggcgccggccaggacgacttcttgccccggacggctactcctcttgaagacattttcaagtcgatcctctgcttgccttgcctcctaggtttgagatgtttgagggatacatgtatacctgaagacgctatgcttaaggatccaaggaggctttatgcaccaggccggatttatcacatagtcgaaagaagaacgtgcaggtgcggaagatatccaccggtagtcaaaacagctgtgccggtggatggtagatttgagcacatagttctttcctgcaatgccacagcggaccatgccattatttggattgagagggaggcccagaaggctttggatctgatgctggaggaggagaacacgctggcagtgccgtcggagcagcggatggagcggaacgaaaccctgcagagggagcatgtggaggagcacagggccgctctgcgccgggccgtcacgctgtcggtgccagacgggcggcgaccgtcgccgtacggtacgtttgacgacgtggagcagcatcgccagcagccggagaggagcgagagcttcccgccggcggggcccaggcagcgcatgagctggaacgacctgatcgagcgagtgttcgacaaggacgaggacggccagatcgtgctgcgcagctcggttcttctctgacgggcggctgggccgttgtaaattcctttggtcttgtagctgtgctgcctctccctgtagtacccccatttttcctgtgttattattggttgttcaatgtaattccttcattcattgaagaggattctttttctcatgcgcggttcatttagcgacatcagctccgtgcagacaagttttgtgaataaattatcaaggtagagtagatcaatttttgaaatcattttcctgttgattttgatatgtaaagttaggatccaaaatcaaaacctgc

SEQ ID NO: 21479 - DNA, 1995 bp, Zea Mays
gcaagttaaaatacatctcaatcccacccaatacactctaatccacatggaataccaataaccgaacaagaccttaggagttccctatccaactcccctatacactataactgagatatctaacttactcagcgcaaccagttttcactcctccacatcacaccaaagaggtcaccacctcaccacagtgaatgcctctccggcgcccgccccgccctcgtggcctcatcacaaagcgagggaaaaaaaaagaaaagaaaagaaaaatcacgagtggaatcgttgatccgcacgagacaatccttgctcgcttagaagattcctacccttacgtttggttggatgcttggatctccatttcctccctctgaacattcacccgtaccgaagactctgattccagactcgatccacgcggcgcgccacctgttcgaggtaattccctcccagatacaacctgccatcgccgcctcctagtgctccggcccggcgccggccatgtcgctggcctgcggcctgccgctgctcgagtgcgtctactgcctcgcttgcgcgcgctgggcatggaagcgctgcctccacagcggcgaggtcgacagcgccacctggggcctcgcctccgccgacgacttcgagcccgtgccgcgcatgtgccgcctcgtcatggccaactacgaacccgatctctccccctccgccccgctcctcttcgcgccgcccggcggctacggcatcgaccccgcctgcgtcctccgccgccggacctacgccgacacacgcggccgcgtcacgccctacctcctctacctcgatcacgcccacgccgacatcgtcctcgcgctccgcgggctcaacctcgtcaaggagtccgactacgcgctccttctcgacaaccgtctcggcaagcgccgcttcgacggcggctacgtccacaacggcctcctcagggccgccggctgggtgctcgatgctgagtgcgacctcctcagggaactcctcgagacgtaccccgactacacgctcaccttcacgggtcattctctgggcgccggcatcgccgccatgctcaccatggtcgtcgtcctcaacctcgacaagattggcaacatcgacaggacccgcacacgctgctacgccatggcgccggccaggtgcatgtcgctcaacctcgccgtcagatatgctgacgttatcaattcggtcgtccttcaggacgacttcttgccccggacggctactcctcttgaagacattttcaagtcgatcctctgcttgccttgcctcctaggtttgagatgtttgagggatacatgtatacctgaagacgctatgcttaaggatccaaggaggctttatgcaccaggccggatttatcacatagtcgaaagaagaacgtgcagctgatgctggaggaggagaacacgctggcagtgccgtcggagcagcggatggagcggaacgaaaccctgcagagggagcatgtggaggagcacagggccgctctgcgccgggccgtcacgctgtcggtgccagacgggcggcgaccgtcgccgtacggtacgtttgacgacgtggagcagcatcgccagcagccggagaggagcgagagcttcccgccggcggggcccaggcagcgcatgagctggaacgacctgatcgagcgagtgttcgacaaggacgaggacggccagatcgtgctgcgcagctcggttcttctctgacgggcggctgggccgttgtaaattcctttggtcttgtagctgtgctgcctctccctgtagtacccccatttttcctgtgttattattggttgttcaatgtaattccttcattcattgaagaggattctttttctcatgcgcggttcatttagcgacatcagctccgtgcagacaagttttgtgaataaattatcaaggtagagtagatcaatttttgaaatcattttcctgttgattttgatatgtaaagttaggatccaaaatcaaaacctgc

SEQ ID NO: 21480 - DNA, 1551 bp, Zea Mays
gtgtttctcggttttgggacttttctgatcctcaggatgatgcaaggctgctacgctgtgatatggtgttgctcgacgaagagggaaatagcatacatgctacgatatacccacccttcatagagaaattcaggccactcataaaagaaggcagcgtatacaacatgacatactttcgagttcgagcatcgaacaacttgtaaaagctagttccaaatgatatcattattaccttcacgaattggacaaagttagagcaggttattgatattcctcctgcatttcctacacttacctactccctcactcacatagagcagatccatgcgcgcatcgaccataaagactactatacagttacttcagtctcgaatgttttgccacatcgctccaaaggacaacaagcttccagcttgaagaggaacatttccatatgcagtgcaagaggtgcttcagtcaatgtcgtgttgtggggtgcccaagccaccctattcccaggagagcgcatatacgaagatgggcagaattccccatagattgtgctatttgttggcacactcgtcaaaaaatatgcagatgggctttgtctgactggaagctcaccatgtaagtggtacatcaatccatccattcctgaggtagaaacccttatgtccagcgcacgcggtgatcataaaccagtgaagtggaatgcaactgttacttcgagccagcttatatctcctgttgctgaggagcaaaaggtgtcgtacatcaagtatctccatccctttgaaaacaagggaaaggaattcttgtttacagtcactataaggaaaattgacaacaagtggtggtataactcatgcagaaaatgtgcctgcacagctgtcactcacggagactcttacaaatgcacaaactgtgattgtgctaacattgctatgcccgtccaaaggtataaaatacttgtcactgcaggagacgagacagctgatacatacttcattctctttgggcgcatggctcaaagaattgtcaaaaggccttgcgatatgctcatagcgaacactccatcaggcttcattccagatgcaatcacaaagctgcttgaaaggacgttcatttggaacgttagcttctctgggcacacaattaactctggagacgtttgcttccaggtcaatgctactgtaaaggaactaggcaatcaaaatgttgacatttcaacatcaaccgtagggacacaccagtcttcacttatgttctcacaaggtgcaagcagcagcatggaagacactcctcacaagacagacaccttgtcttcacctctgacacctttgacgcctcagggtagcatcgccactacaaagtatttggaaaccgttgacattggagatgctgagcgtgtgactactcagtcctcgacaactaggaagagatcatgctcttcgcctagcaaatcaatagcgaaaaaactgttcgttgctgacgatgaggaaggaagcattagtcaatccagtggaggtggtgttggtggatccaggtcaggttgtttgagctctgattatt

SEQ ID NO: 21481 - DNA, 1445 bp, Zea Mays
gtgtttctcggttttgggacttttctgatcctcaggatgatgcaaggctgctacgctgtgatatggtgttgctcgacgaagagggaaatagcatacatgctacgatatacccacccttcatagagaaattcaggccactcataaaagaaggcagcgtatacaacatgacatactttcgagttcgagcatcgaacaacttgtaaaagctagttccaaatgatatcattattaccttcacgaattggacaaagttagagcaggttattgatattcctcctgcatttcctacacttacctactccctcactcacatagagcagatccatgcgcgcatcgaccataaagactactatacagttacttcagtctcgaatgttttgccacatcgctccaaaggacaacaagcttccagcttgaagaggaacatttccatatgcagtgcaagcagaggtgcttcagtcaatgtcgtgttgtggggtgcccaagccaccctattcccaggagagcgcatatacgaagatgggcagaattccccatagattgtgctatttgttggcacactcgtcaaaaaatatgcagatgggctttgtctgactggaagctcaccatgtaagtggtacatcaatccatccattcctgaggtagaaacccttatgtccagcgcacgcggtgatcataaaccagtgaagtggaatgcaactgttacttcgagccagcttatatctcctgttgctgaggagcaaaaggtgtcgtacatcaagtatctccatccctttgaaaacaagggaaaggaattcttgtttacagtcactataaggaaaattgacaacaagtggtggtataactcatgcagaaaatgtgcctgcacagctgtcactcacggagactcttacaaatgcacaaactgtgattgtgctaacattgctatgcccgtccaaaggtataaaatacttgtcactgcaggagacgagacagctgatacatacttcattctctttgggcgcatggctcaaagaattgtcaaaaggccttgcgatatgctcatagcgaacactccatcaggcttcattccagatgcaatcacaaagctgcttgaaaggacgttcatttggaacggacacaccagtcttcacttatgttctcacaaggtgcaagcagcagcatggaagacactcctcacaagacagacaccttgtcttcacctctgacacctttgacgcctcagggtagcatcgccactacaaagtatttggaaaccgttgacattggagatgctgagcgtgtgactactcagtcctcgacaactaggaagagatcatgctcttcgcctagcaaatcaatagcgaaaaaactgttcgttgctgacgatgaggaaggaagcattagtcaatccagtggaggtggtgttggtggatccaggtcaggttgtttgagctctgattatt

SEQ ID NO: 21482 - DNA, 172 bp, Zea Mays
atggtgcgaggtaacatactcattacccaccactacgagctaatatacacacacctacagtctcccattgctaaaatcactggacatgtctttcaatcaaataaacactctgcccaaagagattggcctggctactgctttagtcaaggttgagttctcaaacaattgcctt

SEQ ID NO: 21483 - DNA, 2326 bp, Zea Mays
catagccgtatagatgtcactgcagtgcttatcctcaccttgctccattgaagttaacctaaagggcacagttacagattttaatacatacaggagagatataaaaccttacggttgaggtaaaacacatccatcgcataaacgcacaaatccaagatcatcactccatcagattgttccaacaccaaacacttctgtagtaaataggcctgtgaggcatacacgattcgtcatcatctttagcaactatagtcgttgcttgtcatgcacatggtacaagaaataggtttgttcactcaaactaacactgattgatttacaacacaacactgactacaaagaacttaaaaacaccagctccgtgaacagcagctgcacagagatgcctctgcttctaaacctgaccaagaatggtgccacgattgcactaggcaaagcaagaaccagcatcgtcatcatgccacctcagctcaacccggcaagcatcccatgggcaacggggcttaaggctgcatgagattcatctccattactaagtgccaagaggaccaagttttaagcaaaaagaaaagtgagagttgcactaacccacatccctgtcgcctgttcacatactggaccatcccaatctttccccttgccaatcacccgctcactgcgcaatcccattttttttaccaacactatcagtccttcaacaacagagcccattcaacgagggcaagatgtgctcctccagcatctcaatctgtgagaggaagcaaaagcaccgagaatgaagctgaaagaggggcatgcagggccaccaacccccccccccccccccccccagcccacgcatcacctctcagcttcttgtggatcttcttgtggattagtggggttgtccaataaacctagagctgcttctgtttaaaggagaacagtgcccctcctgcatctcagtatgcagggagcaactacaccgagagtgcatacaggctgacaacatcaaacagatggctgactctgccttacgcctctcggtttttttatgcctgctaccatctgccagtaacaaaggataatgtgtttgttgcacactggcaggtgcaggcatgcccgggcccctcaccggggccgggcaaagcgtagactagcatcaggttgttgttggtgaacctgtgcaaatggtcccattgattcctgtggatgtgcaaatgggactccagggcgagaaggtatagcatattgctgtgaagcatgcatgaaaacagacgatctcacaggtgcaccagggctgtaaggtcccatgacaccatctggcccatagccaattgcattagatgcttgagccactgaccatgatgcaggcatgtgctgagctattggacgaggttgctgttcgacagcaacaggtgatcggtgtgctgacccaagctgggggaattcggtgttgtagttaacagcaggggcatagaggggttgaattgtgtatgggcctccactaaatccaaatccaggatcaaatctttgcatatacctgtacaagtcactcatggccagtaaataatttctactgatcaagtatgtctaccacattgaacaagaacacaaaaaaacatcatttaatgatttaacctgaagttctgaactagcttaaccaactgcatagaaaataagtactccctccgttcctaagtctccatcgtataagcaaattggatttattcaaaaatctccatcgtattaggtggtacttccgtctttttagtttctcgagcatgcatgcatatcagcagatggctaatacactcctttgctggtccttccgtatttttagtttctcgagcatgcatgcatgcatgcagatttattcgaaagtgcatggttaaaaagactgcgagtaaaagcatatcggcgctcctttgccgctccttggtcactgtgcagatgactaatacgctggagacttaggaacggagggagtacatcacaagatttagtgtttactataaaaagaaagaatcctcttattgccatgcttcactaggatcccatcattagcaatcaaactgatatttttcagttgacttgaaagttttggacgatagtcaaatgaagaacttcatacaatgcataagaaactacggagcagaagcatggtaaaaatagccataaaagatttcctgtctacggtgtgctaagagtttagcatcaaagagatgtgttacgacaaaagaaactgacctgtcatagcttctgtcataatcaggatccttgcgctctgactcacgatctctgaaaattgcaaccctattgttctgcttgtttctattgactgcag

SEQ ID NO: 21484 - DNA, 454 bp, Zea Mays
gcgatacaacgacatgtacactcttctccttcagagggctggcttggacgtcgtatcgttctaggttcgccgcgggttgcccacaatcaaccttgcggagatcacgacattggtcaacaagtgacaacccgagactcacactttccaccttctgagcggcgagatgactgtgacactgagagactactagatgcagcttagtctcagcattcatgggcgtcctgtgactagttagacggctagagaaagagagtcaatgcttttcttagaagacaactccccaccgacacaccagacagccacacctcggggtacctctcaccttgctcaggcagtcgttcgatgcgtgtgtccagctagagcagatgaccagacaattggctattactattgagcttgggtcctccaccttcttggctccatcctttttctagacgcgatgagtgacatcgtg

SEQ ID NO: 21485 - DNA, 1419 bp, Zea Mays
gtgcttggccagttggccacatgccttgccttgcctttgcctacctgttgatcgagccgagcgagcagggagagacacggcaccgagtgaggccgccgcatcctcctcctctccgatcctccgcctgctgcctgcctcaacggatcgacgcgacaggagggagggaggaaggagacggtcgatcagagtctgagacggaggccgatccaccaccgcagcgacgagcgggaggagatgaagatcatcattgacacggatcccggcatcgatgacagcgtggccatcctgatggcattccagatgccgggcgtccaggtcctagggctcaccaccatcttcggaaactgcaccacagagcatgccacacgcaacgccttgatcctgtgcgagaaggcaagccatctagaggtcccagtagctgagggcagccatgagcctctcaagggaggaaagccgcacgttgctgacttcgttcatggacctgatggcctcgggaacgtagatcttcctgatcccactatcaagaaagtggaggaaagtgctaccgacttcttggttgataaggtctcgcgatttcctggagaggtctctgtgctcgccttgggtcctctgacaaacatagcattggccatcaagaaggatccctcattcgtgaaaaacgttaagaagatcgttgtgctgggtggagcgttctttgcggctggaaatgccactccttccgctgaagcaaatatccacagtgatccggaggcagccgacatggttttcacttctggggcggacatctacgtcgttggcctcaacatcacaacgcaagtcagcttcacaggtcctgaagcaagatgaatacgataaggatctcctggagctaagaaactcgcaagggaagtacgcacagttcctatgtgatgtatgcaagttctacttggactggcacaccgagtcttatggtgctcctgtgattttcctccacgatccggtcagctttgccgcgctagttcgtccggagctgttcacgttcaagaagggcgtggtgagggtggagacgcagggcatctgcgtcgggcatacttccatggacatgttgctgaagaagtggaactcagagaacccgtggactggctactcaccgatttcggtcgcatggacggtcgatgtgcccaaggtggtcgcgtttgtgaaggagctcgtcaccaagccgtgaaccaagttaactaacgtgttgtggtctcgcgcaccagatgtgcagcaaatttgagatgtcgatatatttactcacattcgaagcactgcaaacactattatctcaatagttggttcctgtggaggattgcaaatcaatttgagatgttttaaattgcagcatgtgccttcggccattgaatggtatgatgttttttttttcttcatatatactcc

SEQ ID NO: 21486 - DNA, 1221 bp, Zea Mays
gtgcttggccagttggccacatgccttgccttgcctttgcctacctgttgatcgagccgagcgagcagggagagacacggcaccgagtgaggccgccgcatcctcctcctctccgatcctccgcctgctgcctgcctcaacggatcgacgcgacaggagggagggaggaaggagacggtcgatcagagtctgagacggaggccgatccaccaccgcagcgacgagcgggaggagatgaagatcatcattgacacggatcccggcatcgggaggaaagccgcacgttgctgacttcgttcatggacctgatggcctcgggaacgtagatcttcctgatcccactatcaagaaagtggaggaaagtgctaccgacttcttggttgataaggtctcgcgatttcctggagaggtctctgtgctcgccttgggtcctctgacaaacatagcattggccatcaagaaggatccctcattcgtgaaaaacgttaagaagatcgttgtgctgggtggagcgttctttgcggctggaaatgccactccttccgctgaagcaaatatccacagtgatccggaggcagccgacatggttttcacttctggggcggacatctacgtcgttggcctcaacatcacaacgcaagtcagcttcacagataaggatctcctggagctaagaaactcgcaagggaagtacgcacagttcctatgtgatgtatgcaagttctacttggactggcacaccgagtcttatggtgctcctgtgattttcctccacgatccggtcagctttgccgcgctagttcgtccggagctgttcacgttcaagaagggcgtggtgagggtggagacgcagggcatctgcgtcgggcatacttccatggacatgttgctgaagaagtggaactcagagaacccgtggactggctactcaccgatttcggtcgcatggacggtcgatgtgcccaaggtggtcgcgtttgtgaaggagctcgtcaccaagccgtgaaccaagttaactaacgtgttgtggtctcgcgcaccagatgtgcagcaaatttgagatgtcgatatatttactcacattcgaagcactgcaaacactattatctcaatagttggttcctgtggaggattgcaaatcaatttgagatgttttaaattgcagcatgtgccttcggccattgaatggtatgatgttttttttttcttcatatatactcc

SEQ ID NO: 21487 - DNA, 1230 bp, Zea Mays
gtgcttggccagttggccacatgccttgccttgcctttgcctacctgttgatcgagccgagcgagcagggagagacacggcaccgagtgaggccgccgcatcctcctcctctccgatccttagtccagtccgcctgctgcctgcctcaacggatcgacgcgacaggagggagggaggaaggagacggtcgatcagagtctgagacggaggccgatccaccaccgcagcgacgagcgggaggagatgaagatcatcattgacacggatcccggcatcgggaggaaagccgcacgttgctgacttcgttcatggacctgatggcctcgggaacgtagatcttcctgatcccactatcaagaaagtggaggaaagtgctaccgacttcttggttgataaggtctcgcgatttcctggagaggtctctgtgctcgccttgggtcctctgacaaacatagcattggccatcaagaaggatccctcattcgtgaaaaacgttaagaagatcgttgtgctgggtggagcgttctttgcggctggaaatgccactccttccgctgaagcaaatatccacagtgatccggaggcagccgacatggttttcacttctggggcggacatctacgtcgttggcctcaacatcacaacgcaagtcagcttcacagataaggatctcctggagctaagaaactcgcaagggaagtacgcacagttcctatgtgatgtatgcaagttctacttggactggcacaccgagtcttatggtgctcctgtgattttcctccacgatccggtcagctttgccgcgctagttcgtccggagctgttcacgttcaagaagggcgtggtgagggtggagacgcagggcatctgcgtcgggcatacttccatggacatgttgctgaagaagtggaactcagagaacccgtggactggctactcaccgatttcggtcgcatggacggtcgatgtgcccaaggtggtcgcgtttgtgaaggagctcgtcaccaagccgtgaaccaagttaactaacgtgttgtggtctcgcgcaccagatgtgcagcaaatttgagatgtcgatatatttactcacattcgaagcactgcaaacactattatctcaatagttggttcctgtggaggattgcaaatcaatttgagatgttttaaattgcagcatgtgccttcggccattgaatggtatgatgttttttttttcttcatatatactcc

SEQ ID NO: 21488 - DNA, 1402 bp, Zea Mays
gtgcttggccagttggccacatgccttgccttgcctttgcctacctgttgatcgagccgagcgagcagggagagacacggcaccgagtgaggccgccgcatcctcctcctctccgatcctccagtccgcctgctgcctgcctcaacggatcgacgcgacaggagggagggaggaaggagacggtcgatcagagtctgagacggaggccgatccaccaccgcagcgacgagcgggaggagatgaagatcatcattgacacggatcccggcatcgatgacagcgtggccatcctgatggcattccagatgccgggcgtccaggtcctagggctcaccaccatcttcggaaactgcaccacagagcatgccacacgcaacgccttgatcctgtgcgagaaggcaagccatctagaggtcccagtagctgagggcagccatgagcctctcaagggaggaaagccgcacgttgctgacttcgttcatggacctgatggcctcgggaacgtagatcttcctgatcccactatcaagaaagtggaggaaagtgctaccgacttcttggttgataaggtctcgcgatttcctggagaggtctctgtgctcgccttgggtcctctgacaaacatagcattggccatcaagaaggatccctcattcgtgaaaaacgttaagaagatcgttgtgctgggtggagcgttctttgcggctggaaatgccactccttccgctgaagcaaatatccacagtgatccggaggcagccgacatggttttcacttctggggcggacatctacgtcgttggcctcaacatcacaacgcaagtcagcttcacagataaggatctcctggagctaagaaactcgcaagggaagtacgcacagttcctatgtgatgtatgcaagttctacttggactggcacaccgagtcttatggtgctcctgtgattttcctccacgatccggtcagctttgccgcgctagttcgtccggagctgttcacgttcaagaagggcgtggtgagggtggagacgcagggcatctgcgtcgggcatacttccatggacatgttgctgaagaagtggaactcagagaacccgtggactggctactcaccgatttcggtcgcatggacggtcgatgtgcccaaggtggtcgcgtttgtgaaggagctcgtcaccaagccgtgaaccaagttaactaacgtgttgtggtctcgcgcaccagatgtgcagcaaatttgagatgtcgatatatttactcacattcgaagcactgcaaacactattatctcaatagttggttcctgtggaggattgcaaatcaatttgagatgttttaaattgcagcatgtgccttcggccattgaatggtatgatgttttttttttcttcatatatactcc

SEQ ID NO: 21489 - DNA, 917 bp, Zea Mays
taattattcttaggtatgtgactttggcctttcaagactgaaagctaacactttcctgtcttccaagtctttggctggaactcctgaatggatggcacctgaagtgcttcgagatgaaccatccaatgagaaatctgatgtctatagcttcggtgttatcctatgggaactaatgacactgcaacaaccatggtgtaacctgaatcctgcccaggtggttgctgctgtaggtttcaaaggaagaaggcttgaaatcccaaaagatctgaatcctctagtagccgtattaattgaatcttgctgggccaatgaaccatggcgaagaccctcgtttgcaaatattatggacactttgaaaccattaataaataaggttccggcacagttgatccgttcagattcgtagcctgttctatacgggtacgggaagatgtattttactgagtggtcctgataacatcaacatgagtgtcctaatactgatctgctataattgaataatccttggatggtattactcattatgataatacaattctcataatctttcaaatgaagtgtgcctggcaatttctttccatggcttaaggaagtaaagcaatgctgatgttaagcaaactatgttgatggacaagttaaacgaggctaaatatcaaacacggactgtgctagctgtagttccttagtgtccattttgtcttgtgttaattttcagttgttctcttgcaacctatgttgtataaaaggttgactgagttaaaaccattttgttcatttatataattatatgtatcaagttcatagctacggactgcagcaattcattgattactcaaaattatacttctgatattttaatacattaaagacaagatttgattagtgtgctctgatagctggtactactagtacttatg

SEQ ID NO: 21490 - DNA, 615 bp, Zea Mays
taattattcttaggtatgtgactttggcctttcaagactgaaagctaacactttcctgtcttccaagtctttggctggaactcctgaatggatggcacctgaagtgcttcgagatgaaccatccaatgagaaatctgatgtctatagcttcggtgttatcctatgggaactaatgacactgcaacaaccatggtgtaacctgaatcctgcccaggtggttgctgctgtaggtttcaaaggaagaaggcttgaaatcccaaaagatctgaatcctctagtagccgtattaattgaatcttgctgggccaatgaaccatggcgaagaccctcgtttgcaaatattatggacactttgaaaccattaataaataaggttccggcacagttgatccgttcagattcgtagcctgttctatacgggtacgggaagatgtattttactgagtggtcctgataacatcaacatgagtgtcctaatactgatctgctataattgaataatccttggatggtattactcattatgataatacaattctcataatctttcaaatgaagtgtgcctggcaatttctttccatggcttaagggcttgggttgacacaatttatcaag

SEQ ID NO: 21491 - DNA, 810 bp, Zea Mays
taattattcttaggtatgtgactttggcctttcaagactgaaagctaacactttcctgtcttccaagtctttggctggaactcctgaatggatggcacctgaagtgcttcgagatgaaccatccaatgagaaatctgatgtctatagcttcggtgttatcctatgggaactaatgacactgcaacaaccatggtgtaacctgaatcctgcccaggtggttgctgctgtaggtttcaaaggaagaaggcttgaaatcccaaaagatctgaatcctctagtagccgtattaattgaatcttgctgggccaatgaaccatggcgaagaccctcgtttgcaaatattatggacactttgaaaccattaataaataaggttccggcacagttgatccgttcagattcgtagcctgttctatacgggtacgggaagatgtattttactgagtggtcctgataacatcaacatgagtgtcctaatactgatctgctataattgaataatccttggatggtattactcattatgataatacaattctcataatctttcaaatgaagtgtgcctggcaatttctttccatggcttaagtcctgggagtgggcgctggttgcgctgccctcgaagggggcaccgccggctggaaaggggtgaccaccaggcgccgggcgctagtcgagccgccggggctggggcgagtgcgccgggcgcctgcgcgactgtgtggctgcgccggaagtagacggggcaggggcaccgccgtgccgctgcgccagccgccttgggtccgcccctgctcattggcgttgttt

SEQ ID NO: 21492 - DNA, 660 bp, Zea Mays
taattattcttaggtatgtgactttggcctttcaagactgaaagctaacactttcctgtcttccaagtctttggctggaactcctgaatggatggcacctgaagtgcttcgagatgaaccatccaatgagaaatctgatgtctatagcttcggtgttatcctatgggaactaatgacactgcaacaaccatggtgtaacctgaatcctgcccaggtggttgctgctgtaggtttcaaaggaagaaggcttgaaatcccaaaagatctgaatcctctagtagccgtattaattgaatcttgctgggccaatgaaccatggcgaagaccctcgtttgcaaatattatggacactttgaaaccattaataaataaggttccggcacagttgatccgttcagattcgtagcctgttctatacgggtacgggaagatgtattttactgagtggtcctgataacatcaacatgagtgtcctaatactgatctgctataattgaataatccttggatggtattactcattatgataatacaattctcataatctttcaaatgaagtgtgcctggcaatttctttccatggcttaagaaactgtagtgtacaacattggtagtgaagacccatgtggctcgcaatatgttgcgagtgcttctagaggg

SEQ ID NO: 21493 - DNA, 697 bp, Zea Mays
taattattcttaggtatgtgactttggcctttcaagactgaaagctaacactttcctgtcttccaagtctttggctggaactcctgaatggatggcacctgaagtgcttcgagatgaaccatccaatgagaaatctgatgtctatagcttcggtgttatcctatgggaactaatgacactgcaacaaccatggtgtaacctgaatcctgcccaggtggttgctgctgtaggtttcaaaggaagaaggcttgaaatcccaaaagatctgaatcctctagtagccgtattaattgaatcttgctgggccaatgaaccatggcgaagaccctcgtttgcaaatattatggacactttgaaaccattaataaataaggttccggcacagttgatccgttcagattcgtagcctgttctatacgggtacgggaagatgtattttactgagtggtcctgataacatcaacatgagtgtcctaatactgatctgctataattgaataatccttggatggtattactcattatgataatacaattctcataatctttcaaatgaagtgtgcctggcaatttctttccatggcttaaggcaccaaggactatcattttggcctagactctaatcagtcagtgtcgctctaataaatcgggtgcccgcgaaaataaggcggcgcagatctgtccaagcagccttaac

SEQ ID NO: 21494 - DNA, 709 bp, Zea Mays
taattattcttaggtatgtgactttggcctttcaagactgaaagctaacactttcctgtcttccaagtctttggctggaactcctgaatggatggcacctgaagtgcttcgagatgaaccatccaatgagaaatctgatgtctatagcttcggtgttatcctatgggaactaatgacactgcaacaaccatggtgtaacctgaatcctgcccaggtggttgctgctgtaggtttcaaaggaagaaggcttgaaatcccaaaagatctgaatcctctagtagccgtattaattgaatcttgctgggccaatgaaccatggcgaagaccctcgtttgcaaatattatggacactttgaaaccattaataaataaggttccggcacagttgatccgttcagattcgtagcctgttctatacgggtacgggaagatgtattttactgagtggtcctgataacatcaacatgagtgtcctaatactgatctgctataattgaataatccttggatggtattactcattatgataatacaattctcataatctttcaaatgaagtgtgcctggcaatttctttccatggcttaaggtgctgtttgagtttttgttggtctgggatttactccaagaggtgcagctgtatcctaatgttgaggatcagcatcggtggttgccatcctcctcggggctgtattccgccagctctgct

SEQ ID NO: 21495 - DNA, 832 bp, Zea Mays
taattattcttaggtatgtgactttggcctttcaagactgaaagctaacactttcctgtcttccaagtctttggctggaactcctgaatggatggcacctgaagtgcttcgagatgaaccatccaatgagaaatctgatgtctatagcttcggtgttatcctatgggaactaatgacactgcaacaaccatggtgtaacctgaatcctgcccaggtggttgctgctgtaggtttcaaaggaagaaggcttgaaatcccaaaagatctgaatcctctagtagccgtattaattgaatcttgctgggccaatgaaccatggcgaagaccctcgtttgcaaatattatggacactttgaaaccattaataaataaggttccggcacagttgatccgttcagattcgtagcctgttctatacgggtacgggaagatgtattttactgagtggtcctgataacatcaacatgagtgtcctaatactgatctgctataattgaataatccttggatggtattactcattatgataatacaattctcataatctttcaaatgaagtgtgcctggcaatttctttccatggcttaagttgtgactttgagggaagggcgtacatccagcagcaactgctttccttattgcccattcagggtgaggagcaacgacctgagcataagccactgttgccacatcaattagtgagttgcccctggaaaacaatgttaaagacctgagcataagccactgttgtcgcatcccatagtgagttgcccctgaaaaacaatgttgattgatcaaattgattgagaaggcattgtaaggaaatatggag

SEQ ID NO: 21496 - DNA, 659 bp, Zea Mays
taattattcttaggtatgtgactttggcctttcaagactgaaagctaacactttcctgtcttccaagtctttggctggaactcctgaatggatggcacctgaagtgcttcgagatgaaccatccaatgagaaatctgatgtctatagcttcggtgttatcctatgggaactaatgacactgcaacaaccatggtgtaacctgaatcctgcccaggtggttgctgctgtaggtttcaaaggaagaaggcttgaaatcccaaaagatctgaatcctctagtagccgtattaattgaatcttgctgggccaatgaaccatggcgaagaccctcgtttgcaaatattatggacactttgaaaccattaataaataaggttccggcacagttgatccgttcagattcgtagcctgttctatacgggtacgggaagatgtattttactgagtggtcctgataacatcaacatgagtgtcctaatactgatctgctataattgaataatccttggatggtattactcattatgataatacaattctcataatctttcaaatgaagtgtgcctggcaatttctttccatggcttaagggcaattatgaaacaatttcatcagatgaagcacgattgcccagacacagtgctatccagagatcagaag

SEQ ID NO: 21497 - DNA, 930 bp, Zea Mays
taattattcttaggtatgtgactttggcctttcaagactgaaagctaacactttcctgtcttccaagtctttggctggaactcctgaatggatggcacctgaagtgcttcgagatgaaccatccaatgagaaatctgatgtctatagcttcggtgttatcctatgggaactaatgacactgcaacaaccatggtgtaacctgaatcctgcccaggtggttgctgctgtaggtttcaaaggaagaaggcttgaaatcccaaaagatctgaatcctctagtagccgtattaattgaatcttgctgggccaatgaaccatggcgaagaccctcgtttgcaaatattatggacactttgaaaccattaataaataaggttccggcacagttgatccgttcagattcgtagcctgttctatacgggtcggcatggacatcaccaggaaatgtgtatgggttttgattgattactaattcagactttcgtttgggttcttatacgaacaggaattgtcctgtgtgatgtcgggcattgtattaaggctatttttgggttcaaactcatctagaggtccttttgtgtttgtacagtatattactgtaggcaaccatgaaaaccaaaggtttaggctgacctacgtttaggcctcatttctgatacggctccggagcgagcaaatgcagtgccgtagaaggtgatatcagtcgtatgcatgcctgtttcttcgtctcttgtactgtaacatgtcttaaatttacctagtgatggcgcatgtacttctgtcgatctgtaccattgttgctgttgaagacaaagtgcgccaaacaaacacgaaccttttccggtctccttccatgcttgtggggagggttcacatggattgccacgtattttgttcctgcagcagatatgtttgatctgttggaatattt

SEQ ID NO: 21498 - DNA, 819 bp, Zea Mays
taattattcttaggtatgtgactttggcctttcaagactgaaagctaacactttcctgtcttccaagtctttggctggaactcctgaatggatggcacctgaagtgcttcgagatgaaccatccaatgagaaatctgatgtctatagcttcggtgttatcctatgggaactaatgacactgcaacaaccatggtgtaacctgaatcctgcccaggtggttgctgctgtaggtttcaaaggaagaaggcttgaaatcccaaaagatctgaatcctctagtagccgtattaattgaatcttgctgggccaagtcggcatggacatcaccaggaaatgtgtatgggttttgattgattactaattcagactttcgtttgggttcttatacgaacaggaattgtcctgtgtgatgtcgggcattgtattaaggctatttttgggttcaaactcatctagaggtccttttgtgtttgtacagtatattactgtaggcaaccatgaaaaccaaaggtttaggctgacctacgtttaggcctcatttctgatacggctccggagcgagcaaatgcagtgccgtagaaggtgatatcagtcgtatgcatgcctgtttcttcgtctcttgtactgtaacatgtcttaaatttacctagtgatggcgcatgtacttctgtcgatctgtaccattgttgctgttgaagacaaagtgcgccaaacaaacacgaaccttttccggtctccttccatgcttgtggggagggttcacatggattgccacgtattttgttcctgcagcagatatgtttgatctgttggaatattt

SEQ ID NO: 21499 - DNA, 856 bp, Zea Mays
taattattcttaggtatgtgactttggcctttcaagactgaaagctaacactttcctgtcttccaagtctttggctggaactcctgaatggatggcacctgaagtgcttcgagatgaaccatccaatgagaaatctgatgtctatagcttcggtgttatcctatgggaactaatgacactgcaacaaccatggtgtaacctgaatcctgcccaggtggttgctgctgtaggtttcaaaggaagaaggcttgaaatcccaaaagatctgaatcctctagtagccgtattaattgaatcttgctgggccaatgaaccatggcgaagaccctcgtttgcaaatattatggacactttgaaaccattaataaataaggttccggcacagttgatccgttcagattcgtagcctgttctatacgggtacgggaagatgtattttactgagtggtcctgataacatcaacatgagtgtcctaatactgatctgctataattgaataatccttggatggtattactcattatgataatacaattctcataatctttcaaatgaagtgtgcctggcaatttctttccatggcttaagtgcatgcaggtactcgcgctgcctcaggagctaagttgctaacccattgcccttccacgtggagttcaaatcttgggattcaattgttgatctccaaacagctttaattgattaccataaccaagaagctaatatagccattgttgaaaaaaatgtgtaccatgtttaactaagataacttatgagtagaggatcatatatcgttactagtatacgtgcaatgtagcagaaaaatgatgtagtggaagtagcagaaaaatgatgtag

SEQ ID NO: 21500 - DNA, 4131 bp, Zea Mays
ataaaagggcagccagcagtgtgtgtgcctgtgccatggtctcggtctgcgcgtcctcttcgtcgtttcacggctcgcgttaccgtcccagccaagccgccgcttctgcctcctcgccgtcgctgacgcccaatccattccccccggatcctcagaggccagccgcttcgattacgcgcctcgccttgcaaaccctagctcccccgccctctccctctcccatgggcccgaaaccctagtacctagtatccccccttcatgcgcgcctccgcggtccccatggaggcctccgcttccgcccgcagatccgccgcgggccccgacccccgcgccaagaagccgcgcctcgcgccgccgcctcgggaccccagatcttacgccgccaccgcctcctccaatggcaacacaagcgccgccgagcaagcgctggtcgacgagctgctcggccagtaccggaccgcgctcggggagctcaccttcaactccaagcccatcatcaccaacctcaccatcatcgccggcgagaaccttcaggccgccaagcccatagccgctctcatctgcgccaacatcctcgaggttccaagtgaacagaaactaccatcactatatctacttgacagtattgtaaaaaatattggaaaagattatgttaaacatttctcagcaagattaccagaggtgttctgcaaggcatataaacaagttgatccttctatacatcatagcatgaggcacctttttggaacatggaaaggagtgtttcctctacctccgctccaaatgattgagaaggaacttggttttcagtcatctgccaatggatcatctagtgctgcaccatcaaggactgattctcaatccccgcgcccatccaatagcatacatgtaaatccaaaatatttggaagcgagacaacaactcaatcaaccaactaaggggatacttggaagtggtgctaagacaactgtaattgctgatacaggcggtgatattgagaggcctaataggctaggtactgatagaaatgcggggagacgattagatgcttctaatgctagacctaacatacaacgcactcagagggacccttctagcaattctcttcatgaaaaacaggcagttagagatgtgggaggccttggattctccaacatttcgcagcaggctgttgtgggaactggtcaagttcgctcaaaacctaaagctcaagatggaattggggggccttattatgcctctggtgttgggtcttctgaagaacaatttgacagacgcagcaacttttatgcaagcaaggatgctcgaccatcaggatctgtacgtttggaaagtgcacttcttccaactccatcaatcaatgccgatagagttggtaagccttcatccaacaaaagctggaaacactctgaggaagaagaatatgtctgggatgatgtacattctaaagcagcagaatatggtggtagccataatgtaataaaaggagaatggatgtctgatgatggcaatgctaagtttgcaaacctccaaagggctaaatgggcagatgcaggacctgtggaacgtatagatcccaacacacataaacttgataacgtgtcaagatttggacttggagcaggtcaagaaagaagaatttcagaatacatggatcaggaagagtaccttcttggcaagcgtgaggtggaagcaagaattgataaggaaattaggtctgatggacaacagttcccagcagctcgaggttctcctctctgggtgtcccaggaaaaaacactcctagacattgggttggagcctaggatatcaaggttttcaactcagccagcagagaggtccaccatttatactggcaccatgtcagcaggtatcacttcatctgtacctgttgggttatcaggaaactatgctggaaggtcaagcctagatactgcaaatggtatgccaataagatcaactgaggcttttgggcagcagaagcatagatattggtcatcttcccctccacaagctgacacatcttcatctactgcaccctttgcacgtcagggttctccaaatcctgccgagtctgatttttatccttccagatcactttctcgccaaaatcctcaagaatatagcaaaagagcattgccggtacttgctaaagattctcatgttgtggttcacaatgatggatttactcagggccaacctagtctacaggcaacccggcagacacaaaagtaccctatcttacagtcgaagtcgcatattaagccatctgatcaattgcaggcaagtttttcgcgtgaaaattctccatcattgttcagaccttccatcgaacttggagaagtctctttacccagtgactccacccccataagctcagatctgacaagtgctagtaatttgttggctagtctcgtaaagagtgggttcaaaccaaataaccacagtgatgcacaggctcttggtccaagtggaccacttccagtggcttctttatcacttcaaaatgctgctggtgaaaataccactttgcaggcacatacaccaaacacttctcgtccaccattgccaccacctccatcaacacagagtgcggagaaagctgcgccgctctcaagtcttctcagttccctggttgcaaagggattaatctcttctccagcctatgattcatcgagtgctgtcatttcacagccaaataaagcatcaagcatgaatgttaaagatgccacagcttcagctgtgcctttgctagctctgagaccttcagttggtaaggcgtcatctaattctgattcatctgctccaacaaacgcttcattaaccaaagctatcgaaattaagatgagtgacctcattggcctggagttcaagccagagaaacttcgcaagtaccatgagcacgtgattagcagcctctttgacgacgaccaaagccatcagtgtaaaacatgtggcaataggttcaggcttgaagaactgagcttgcacacatcaagctgtgggcaaaggaagtctgagactatatatactggtatcgcacctaaaagatggtaccctagcaagaacatttacattgatggatcacatgaaattgaggacagcactgaggcttctgatggagatttaggttctgcagaagaagtgtgtgagtttatggtcccttcagacgagaggcaaattatctgtgcactatgtggggaaccatttgatgacatatattcttttgagaagggggactggatgtacaaggatgcagtgtttttggattaccccaagggagaaagcagctgcagaaacagtgttgagggtgaagagcatgtgcccattgtccatgtaagatgtatgccaagaggctcaaacgatggcatggaggttgactagaatgagtattgttcacagcagttatgctcttgaggggccttgaggtggatgagcctaaagctggggtttgcacgaggaactgtgcatcatcaggttgtctgttgcaattggactgatgacatacatgtaggatgattggtggaaggtggcaggcgttatcagaaacaaaactttggcgaagatctggaactgcccgtggatttctcagtgcccattacaaagtgcttacacaaagaataaagctttagaggaacaatttggccatgcaaatcagaattatcaaaatcttcatattttgggtctccatctgagaaggatctttatgttgatggaaagaaagctgtgcaggtgcatgtcaaaagaatgtatgatttctttacgagggaaaaggggtatggtaccccacatgtaactcggatactgctgttttttgacgatacatttctcgtcttttggagtaggaatttttgtgtagttaagaaactgataatagaacattatagaggtaggactaaacaagttagggtgtgtttggcgtttggctttaacttttgcccactaaaagccaaaagaaaaaacaaaggtatgaatttagaaagtagctttttctaaaagatgactttgtgcaaaactgaaaatatctttgaacttgcttttagtggatttctgatacaactgtaaaaatatatatggaagaatttttagtggcttttagttgtttctaccaaataatttttagctttttag

SEQ ID NO: 21501 - DNA, 4040 bp, Zea Mays
ctcggtctgcgcgtcctcttcgtcgtttcacggctcgcgttaccgtcccagccaagccgccgcttctgcctcctcgccgtcgctgacgcccaatccattccccccggatcctcagaggccagccgcttcgattacgcgcctcgccttgcaaaccctagctcccccgccctctccctctcccatgggcccgaaaccctagtacctagtatccccccttcatgcgcgcctccgcggtccccatggaggcctccgcttccgcccgcagatccgccgcgggccccgacccccgcgccaagaagccgcgcctcgcgccgccgcctcgggaccccagatcttacgccgccaccgcctcctccaatggcaacacaagcgccgccgagcaagcgctggtcgacgagctgctcggccagtaccggaccgcgctcggggagctcaccttcaactccaagcccatcatcaccaacctcaccatcatcgccggcgagaaccttcaggccgccaagcccatagccgctctcatctgcgccaacatcctcgaggttccaagtgaacagaaactaccatcactatatctacttgacagtattgtaaaaaatattggaaaagattatgttaaacatttctcagcaagattaccagaggtgttctgcaaggcatataaacaagttgatccttctatacatcatagcatgaggcacctttttggaacatggaaaggagtgtttcctctacctccgctccaaatgattgagaaggaacttggttttcagtcatctgccaatggatcatctagtgctgcaccatcaaggactgattctcaatccccgcgcccatccaatagcatacatgggatacttggaagtggtgctaagacaactgtaattgctgatacaggcggtgatattgagaggcctaataggctaggtactgatagaaatgcggggagacgattagatgcttctaatgctagacctaacatacaacgcactcagagggacccttctagcaattctcttcatgaaaaacaggcagttagagatgtgggaggccttggattctccaacatttcgcagcaggctgttgtgggaactggtcaagttcgctcaaaacctaaagctcaagatggaattggggggccttattatgcctctggtgttgggtcttctgaagaacaatttgacagacgcagcaacttttatgcaagcaaggatgctcgaccatcaggatctgtacgtttggaaagtgcacttcttccaactccatcaatcaatgccgatagagttggtaagccttcatccaacaaaagctggaaacactctgaggaagaagaatatgtctgggatgatgtacattctaaagcagcagaatatggtggtagccataatgtaataaaaggagaatggatgtctgatgatggcaatgctaagtttgcaaacctccaaagggctaaatgggcagatgcaggacctgtggaacgtatagatcccaacacacataaacttgataacgtgtcaagatttggacttggagcaggtcaagaaagaagaatttcagaatacatggatcaggaagagtaccttcttggcaagcgtgaggtggaagcaagaattgataaggaaattaggtctgatggacaacagttcccagcagctcgaggttctcctctctgggtgtcccaggaaaaaacactcctagacattgggttggagcctaggatatcaaggttttcaactcagccagcagagaggtccaccatttatactggcaccatgtcagcaggtatcacttcatctgtacctgttgggttatcaggaaactatgctggaaggtcaagcctagatactgcaaatggtatgccaataagatcaactgaggcttttgggcagcagaagcatagatattggtcatcttcccctccacaagctgacacatcttcatctactgcaccctttgcacgtcagggttctccaaatcctgccgagtctgatttttatccttccagatcactttctcgccaaaatcctcaagaatatagcaaaagagcattgccggtacttgctaaagattctcatgttgtggttcacaatgatggatttactcagggccaacctagtctacaggcaacccggcagacacaaaagtaccctatcttacagtcgaagtcgcatattaagccatctgatcaattgcaggcaagtttttcgcgtgaaaattctccatcattgttcagaccttccatcgaacttggagaagtctctttacccagtgactccacccccataagctcagatctgacaagtgctagtaatttgttggctagtctcgtaaagagtgggttcaaaccaaataaccacagtgatgcacaggctcttggtccaagtggaccacttccagtggcttctttatcacttcaaaatgctgctggtgaaaataccactttgcaggcacatacaccaaacacttctcgtccaccattgccaccacctccatcaacacagagtgcggagaaagctgcgccgctctcaagtcttctcagttccctggttgcaaagggattaatctcttctccagcctatgattcatcgagtgctgtcatttcacagccaaataaagcatcaagcatgaatgttaaagatgccacagcttcagctgtgcctttgctagctctgagaccttcagttggtaaggcgtcatctaattctgattcatctgctccaacaaacgcttcattaaccaaagctatcgaaattaagatgagtgacctcattggcctggagttcaagccagagaaacttcgcaagtaccatgagcacgtgattagcagcctctttgacgacgaccaaagccatcagtgtaaaacatgtggcaataggttcaggcttgaagaactgagcttgcacacatcaagctgtgggcaaaggaagtctgagactatatatactggtatcgcacctaaaagatggtaccctagcaagaacatttacattgatggatcacatgaaattgaggacagcactgaggcttctgatggagatttaggttctgcagaagaagtgtgtgagtttatggtcccttcagacgagaggcaaattatctgtgcactatgtggggaaccatttgatgacatatattcttttgagaagggggactggatgtacaaggatgcagtgtttttggattaccccaagggagaaagcagctgcagaaacagtgttgagggtgaagagcatgtgcccattgtccatgtaagatgtatgccaagaggctcaaacgatggcatggaggttgactagaatgagtattgttcacagcagttatgctcttgaggggccttgaggtggatgagcctaaagctggggtttgcacgaggaactgtgcatcatcaggttgtctgttgcaattggactgatgacatacatgtaggatgattggtggaaggtggcaggcgttatcagaaacaaaactttggcgaagatctggaactgcccgtggatttctcagtgcccattacaaagtgcttacacaaagaataaagctttagaggaacaatttggccatgcaaatcagaattatcaaaatcttcatattttgggtctccatctgagaaggatctttatgttgatggaaagaaagctgtgcaggtgcatgtcaaaagaatgtatgatttctttacgagggaaaaggggtatggtaccccacatgtaactcggatactgctgttttttgacgatacatttctcgtcttttggagtaggaatttttgtgtagttaagaaactgataatagaacattatagaggtaggactaaacaagttagggtgtgtttggcgtttggctttaacttttgcccactaaaagccaaaagaaaaaacaaaggtatgaatttagaaagtagctttttctaaaagatgactttgtgcaaaactgaaaatatctttgaacttgcttttagtggatttctgatacaactgtaaaaatatatatggaagaatttttagtggcttttagttgtttctaccaaataatttttagctttttag

SEQ ID NO: 21502 - DNA, 4229 bp, Zea Mays
gtttcacggctcgcgttaccgtcccagccaagccgccgcttctgcctcctcgccgtcgctgacgcccaatccattccccccggatcctcagaggccagccgcttcgattacgcgcctcgccttgcaaaccctagctcccccgccctctccctctcccatgggcccgaaaccctagtacctagtatccccccttcatgcgcgcctccgcggtccccatggaggcctccgcttccgcccgcagatccgccgcgggccccgacccccgcgccaagaagccgcgcctcgcgccgccgcctcgggaccccagatcttacgccgccaccgcctcctccaatggcaacacaagcgccgccgagcaagcgctggtcgacgagctgctcggccagtaccggaccgcgctcggggagctcaccttcaactccaagcccatcatcaccaacctcaccatcatcgccggcgagaaccttcaggccgccaagcccatagccgctctcatctgcgccaacatcctcgaggtgacctttgtctttgactcctcttacgctcgtcaaactgccgtcttcccctcctctttctcaattgaccatgtaaaagtaattctaaggcgccatcaagtagtgacaagcacccactggctgtctgttatgctagatatatcacatgtgctcggtggtgcggttccaagtgaacagaaactaccatcactatatctacttgacagtattgtaaaaaatattggaaaagattatgttaaacatttctcagcaagattaccagaggtgttctgcaaggcatataaacaagttgatccttctatacatcatagcatgaggcacctttttggaacatggaaaggagtgtttcctctacctccgctccaaatgattgagaaggaacttggttttcagtcatctgccaatggatcatctagtgctgcaccatcaaggactgattctcaatccccgcgcccatccaatagcatacatgtaaatccaaaatatttggaagcgagacaacaactcaatcaaccaactaaggggatacttggaagtggtgctaagacaactgtaattgctgatacaggcggtgatattgagaggcctaataggctaggtactgatagaaatgcggggagacgattagatgcttctaatgctagacctaacatacaacgcactcagagggacccttctagcaattctcttcatgaaaaacaggcagttagagatgtgggaggccttggattctccaacatttcgcagcaggctgttgtgggaactggtcaagttcgctcaaaacctaaagctcaagatggaattggggggccttattatgcctctggtgttgggtcttctgaagaacaatttgacagacgcagcaacttttatgcaagcaaggatgctcgaccatcaggatctgtacgtttggaaagtgcacttcttccaactccatcaatcaatgccgatagagttggtaagccttcatccaacaaaagctggaaacactctgaggaagaagaatatgtctgggatgatgtacattctaaagcagcagaatatggtggtagccataatgtaataaaaggagaatggatgtctgatgatggcaatgctaagtttgcaaacctccaaagggctaaatgggcagatgcaggacctgtggaacgtatagatcccaacacacataaacttgataacgtgtcaagatttggacttggagcaggtcaagaaagaagaatttcagaatacatggatcaggaagagtaccttcttggcaagcgtgaggtggaagcaagaattgataaggaaattaggtctgatggacaacagttcccagcagctcgaggttctcctctctgggtgtcccaggaaaaaacactcctagacattgggttggagcctaggatatcaaggttttcaactcagccagcagagaggtccaccatttatactggcaccatgtcagcaggtatcacttcatctgtacctgttgggttatcaggaaactatgctggaaggtcaagcctagatactgcaaatggtatgccaataagatcaactgaggcttttgggcagcagaagcatagatattggtcatcttcccctccacaagctgacacatcttcatctactgcaccctttgcacgtcagggttctccaaatcctgccgagtctgatttttatccttccagatcactttctcgccaaaatcctcaagaatatagcaaaagagcattgccggtacttgctaaagattctcatgttgtggttcacaatgatggatttactcagggccaacctagtctacaggcaacccggcagacacaaaagtaccctatcttacagtcgaagtcgcatattaagccatctgatcaattgcaggcaagtttttcgcgtgaaaattctccatcattgttcagaccttccatcgaacttggagaagtctctttacccagtgactccacccccataagctcagatctgacaagtgctagtaatttgttggctagtctcgtaaagagtgggttcaaaccaaataaccacagtgatgcacaggctcttggtccaagtggaccacttccagtggcttctttatcacttcaaaatgctgctggtgaaaataccactttgcaggcacatacaccaaacacttctcgtccaccattgccaccacctccatcaacacagagtgcggagaaagctgcgccgctctcaagtcttctcagttccctggttgcaaagggattaatctcttctccagcctatgattcatcgagtgctgtcatttcacagccaaataaagcatcaagcatgaatgttaaagatgccacagcttcagctgtgcctttgctagctctgagaccttcagttggtaaggcgtcatctaattctgattcatctgctccaacaaacgcttcattaaccaaagctatcgaaattaagatgagtgacctcattggcctggagttcaagccagagaaacttcgcaagtaccatgagcacgtgattagcagcctctttgacgacgaccaaagccatcagtgtaaaacatgtggcaataggttcaggcttgaagaactgagcttgcacacatcaagctgtgggcaaaggaagtctgagactatatatactggtatcgcacctaaaagatggtaccctagcaagaacatttacattgatggatcacatgaaattgaggacagcactgaggcttctgatggagatttaggttctgcagaagaagtgtgtgagtttatggtcccttcagacgagaggcaaattatctgtgcactatgtggggaaccatttgatgacatatattcttttgagaagggggactggatgtacaaggatgcagtgtttttggattaccccaagggagaaagcagctgcagaaacagtgttgagggtgaagagcatgtgcccattgtccatgtaagatgtatgccaagaggctcaaacgatggcatggaggttgactagaatgagtattgttcacagcagttatgctcttgaggggccttgaggtggatgagcctaaagctggggtttgcacgaggaactgtgcatcatcaggttgtctgttgcaattggactgatgacatacatgtaggatgattggtggaaggtggcaggcgttatcagaaacaaaactttggcgaagatctggaactgcccgtggatttctcagtgcccattacaaagtgcttacacaaagaataaagctttagaggaacaatttggccatgcaaatcagaattatcaaaatcttcatattttgggtctccatctgagaaggatctttatgttgatggaaagaaagctgtgcaggtgcatgtcaaaagaatgtatgatttctttacgagggaaaaggggtatggtaccccacatgtaactcggatactgctgttttttgacgatacatttctcgtcttttggagtaggaatttttgtgtagttaagaaactgataatagaacattatagaggtaggactaaacaagttagggtgtgtttggcgtttggctttaacttttgcccactaaaagccaaaagaaaaaacaaaggtatgaatttagaaagtagctttttctaaaagatgactttgtgcaaaactgaaaatatctttgaacttgcttttagtggatttctgatacaactgtaaaaatatatatggaagaatttttagtggcttttagttgtttctaccaaataatttttagctttttag

SEQ ID NO: 21503 - DNA, 4008 bp, Zea Mays
cgttaccgtcccagccaagccgccgcttctgcctcctcgccgtcgctgacgcccaatccattccccccggatcctcagaggccagccgcttcgattacgcgcctcgccttgcaaaccctagctcccccgccctctccctctcccatgggcccgaaaccctagtacctagtatccccccttcatgcgcgcctccgcggtccccatggaggcctccgcttccgcccgcagatccgccgcgggccccgacccccgcgccaagaagccgcgcctcgcgccgccgcctcgggaccccagatcttacgccgccaccgcctcctccaatggcaacacaagcgccgccgagcaagcgctggtcgacgagctgctcggccagtaccggaccgcgctcggggagctcaccttcaactccaagcccatcatcaccaacctcaccatcatcgccggcgagaaccttcaggccgccaagcccatagccgctctcatctgcgccaacatcctcgaggttccaagtgaacagaaactaccatcactatatctacttgacagtattgtaaaaaatattggaaaagattatgttaaacatttctcagcaagattaccagaggtgttctgcaaggcatataaacaagttgatccttctatacatcatagcatgaggcacctttttggaacatggaaaggagtgtttcctctacctccgctccaaatgattgagaaggaacttggttttcagtcatctgccaatggatcatctagtgctgcaccatcaaggactgattctcaatccccgcgcccatccaatagcatacatgtaaatccaaaatatttggaagcgagacaacaactcaatcaaccaactaaggcggtgatattgagaggcctaataggctaggtactgatagaaatgcggggagacgattagatgcttctaatgctagacctaacatacaacgcactcagagggacccttctagcaattctcttcatgaaaaacaggcagttagagatgtgggaggccttggattctccaacatttcgcagcaggctgttgtgggaactggtcaagttcgctcaaaacctaaagctcaagatggaattggggggccttattatgcctctggtgttgggtcttctgaagaacaatttgacagacgcagcaacttttatgcaagcaaggatgctcgaccatcaggatctgtacgtttggaaagtgcacttcttccaactccatcaatcaatgccgatagagttggtaagccttcatccaacaaaagctggaaacactctgaggaagaagaatatgtctgggatgatgtacattctaaagcagcagaatatggtggtagccataatgtaataaaaggagaatggatgtctgatgatggcaatgctaagtttgcaaacctccaaagggctaaatgggcagatgcaggacctgtggaacgtatagatcccaacacacataaacttgataacgtgtcaagatttggacttggagcaggtcaagaaagaagaatttcagaatacatggatcaggaagagtaccttcttggcaagcgtgaggtggaagcaagaattgataaggaaattaggtctgatggacaacagttcccagcagctcgaggttctcctctctgggtgtcccaggaaaaaacactcctagacattgggttggagcctaggatatcaaggttttcaactcagccagcagagaggtccaccatttatactggcaccatgtcagcaggtatcacttcatctgtacctgttgggttatcaggaaactatgctggaaggtcaagcctagatactgcaaatggtatgccaataagatcaactgaggcttttgggcagcagaagcatagatattggtcatcttcccctccacaagctgacacatcttcatctactgcaccctttgcacgtcagggttctccaaatcctgccgagtctgatttttatccttccagatcactttctcgccaaaatcctcaagaatatagcaaaagagcattgccggtacttgctaaagattctcatgttgtggttcacaatgatggatttactcagggccaacctagtctacaggcaacccggcagacacaaaagtaccctatcttacagtcgaagtcgcatattaagccatctgatcaattgcaggcaagtttttcgcgtgaaaattctccatcattgttcagaccttccatcgaacttggagaagtctctttacccagtgactccacccccataagctcagatctgacaagtgctagtaatttgttggctagtctcgtaaagagtgggttcaaaccaaataaccacagtgatgcacaggctcttggtccaagtggaccacttccagtggcttctttatcacttcaaaatgctgctggtgaaaataccactttgcaggcacatacaccaaacacttctcgtccaccattgccaccacctccatcaacacagagtgcggagaaagctgcgccgctctcaagtcttctcagttccctggttgcaaagggattaatctcttctccagcctatgattcatcgagtgctgtcatttcacagccaaataaagcatcaagcatgaatgttaaagatgccacagcttcagctgtgcctttgctagctctgagaccttcagttggtaaggcgtcatctaattctgattcatctgctccaacaaacgcttcattaaccaaagctatcgaaattaagatgagtgacctcattggcctggagttcaagccagagaaacttcgcaagtaccatgagcacgtgattagcagcctctttgacgacgaccaaagccatcagtgtaaaacatgtggcaataggttcaggcttgaagaactgagcttgcacacatcaagctgtgggcaaaggaagtctgagactatatatactggtatcgcacctaaaagatggtaccctagcaagaacatttacattgatggatcacatgaaattgaggacagcactgaggcttctgatggagatttaggttctgcagaagaagtgtgtgagtttatggtcccttcagacgagaggcaaattatctgtgcactatgtggggaaccatttgatgacatatattcttttgagaagggggactggatgtacaaggatgcagtgtttttggattaccccaagggagaaagcagctgcagaaacagtgttgagggtgaagagcatgtgcccattgtccatgtaagatgtatgccaagaggctcaaacgatggcatggaggttgactagaatgagtattgttcacagcagttatgctcttgaggggccttgaggtggatgagcctaaagctggggtttgcacgaggaactgtgcatcatcaggttgtctgttgcaattggactgatgacatacatgtaggatgattggtggaaggtggcaggcgttatcagaaacaaaactttggcgaagatctggaactgcccgtggatttctcagtgcccattacaaagtgcttacacaaagaataaagctttagaggaacaatttggccatgcaaatcagaattatcaaaatcttcatattttgggtctccatctgagaaggatctttatgttgatggaaagaaagctgtgcaggtgcatgtcaaaagaatgtatgatttctttacgagggaaaaggggtatggtaccccacatgtaactcggatactgctgttttttgacgatacatttctcgtcttttggagtaggaatttttgtgtagttaagaaactgataatagaacattatagaggtaggactaaacaagttagggtgtgtttggcgtttggctttaacttttgcccactaaaagccaaaagaaaaaacaaaggtatgaatttagaaagtagctttttctaaaagatgactttgtgcaaaactgaaaatatctttgaacttgcttttagtggatttctgatacaactgtaaaaatatatatggaagaatttttagtggcttttagttgtttctaccaaataatttttagctttttag

SEQ ID NO: 21504 - DNA, 3584 bp, Zea Mays
agccggctaactgctgagcgttggttgacttggttccaagtgaacagaaactaccatcactatatctacttgacagtattgtaaaaaatattggaaaagattatgttaaacatttctcagcaagattaccagaggtgttctgcaaggcatataaacaagttgatccttctatacatcatagcatgaggcacctttttggaacatggaaaggagtgtttcctctacctccgctccaaatgattgagaaggaacttggttttcagtcatctgccaatggatcatctagtgctgcaccatcaaggactgattctcaatccccgcgcccatccaatagcatacatgtaaatccaaaatatttggaagcgagacaacaactcaatcaaccaactaaggggatacttggaagtggtgctaagacaactgtaattgctgatacaggcggtgatattgagaggcctaataggctaggtactgatagaaatgcggggagacgattagatgcttctaatgctagacctaacatacaacgcactcagagggacccttctagcaattctcttcatgaaaaacaggcagttagagatgtgggaggccttggattctccaacatttcgcagcaggctgttgtgggaactggtcaagttcgctcaaaacctaaagctcaagatggaattggggggccttattatgcctctggtgttgggtcttctgaagaacaatttgacagacgcagcaacttttatgcaagcaaggatgctcgaccatcaggatctgtacgtttggaaagtgcacttcttccaactccatcaatcaatgccgatagagttggtaagccttcatccaacaaaagctggaaacactctgaggaagaagaatatgtctgggatgatgtacattctaaagcagcagaatatggtggtagccataatgtaataaaaggagaatggatgtctgatgatggcaatgctaagtttgcaaacctccaaagggctaaatgggcagatgcaggacctgtggaacgtatagatcccaacacacataaacttgataacgtgtcaagatttggacttggagcaggtcaagaaagaagaatttcagaatacatggatcaggaagagtaccttcttggcaagcgtgaggtggaagcaagaattgataaggaaattaggtctgatggacaacagttcccagcagctcgaggttctcctctctgggtgtcccaggaaaaaacactcctagacattgggttggagcctaggatatcaaggttttcaactcagccagcagagaggtccaccatttatactggcaccatgtcagcaggtatcacttcatctgtacctgttgggttatcaggaaactatgctggaaggtcaagcctagatactgcaaatggtatgccaataagatcaactgaggcttttgggcagcagaagcatagatattggtcatcttcccctccacaagctgacacatcttcatctactgcaccctttgcacgtcagggttctccaaatcctgccgagtctgatttttatccttccagatcactttctcgccaaaatcctcaagaatatagcaaaagagcattgccggtacttgctaaagattctcatgttgtggttcacaatgatggatttactcagggccaacctagtctacaggcaacccggcagacacaaaagtaccctatcttacagtcgaagtcgcatattaagccatctgatcaattgcaggcaagtttttcgcgtgaaaattctccatcattgttcagaccttccatcgaacttggagaagtctctttacccagtgactccacccccataagctcagatctgacaagtgctagtaatttgttggctagtctcgtaaagagtgggttcaaaccaaataaccacagtgatgcacaggctcttggtccaagtggaccacttccagtggcttctttatcacttcaaaatgctgctggtgaaaataccactttgcaggcacatacaccaaacacttctcgtccaccattgccaccacctccatcaacacagagtgcggagaaagctgcgccgctctcaagtcttctcagttccctggttgcaaagggattaatctcttctccagcctatgattcatcgagtgctgtcatttcacagccaaataaagcatcaagcatgaatgttaaagatgccacagcttcagctgtgcctttgctagctctgagaccttcagttggtaaggcgtcatctaattctgattcatctgctccaacaaacgcttcattaaccaaagctatcgaaattaagatgagtgacctcattggcctggagttcaagccagagaaacttcgcaagtaccatgagcacgtgattagcagcctctttgacgacgaccaaagccatcagtgtaaaacatgtggcaataggttcaggcttgaagaactgagcttgcacacatcaagctgtgggcaaaggaagtctgagactatatatactggtatcgcacctaaaagatggtaccctagcaagaacatttacattgatggatcacatgaaattgaggacagcactgaggcttctgatggagatttaggttctgcagaagaagtgtgtgagtttatggtcccttcagacgagaggcaaattatctgtgcactatgtggggaaccatttgatgacatatattcttttgagaagggggactggatgtacaaggatgcagtgtttttggattaccccaagggagaaagcagctgcagaaacagtgttgagggtgaagagcatgtgcccattgtccatgtaagatgtatgccaagaggctcaaacgatggcatggaggttgactagaatgagtattgttcacagcagttatgctcttgaggggccttgaggtggatgagcctaaagctggggtttgcacgaggaactgtgcatcatcaggttgtctgttgcaattggactgatgacatacatgtaggatgattggtggaaggtggcaggcgttatcagaaacaaaactttggcgaagatctggaactgcccgtggatttctcagtgcccattacaaagtgcttacacaaagaataaagctttagaggaacaatttggccatgcaaatcagaattatcaaaatcttcatattttgggtctccatctgagaaggatctttatgttgatggaaagaaagctgtgcaggtgcatgtcaaaagaatgtatgatttctttacgagggaaaaggggtatggtaccccacatgtaactcggatactgctgttttttgacgatacatttctcgtcttttggagtaggaatttttgtgtagttaagaaactgataatagaacattatagaggtaggactaaacaagttagggtgtgtttggcgtttggctttaacttttgcccactaaaagccaaaagaaaaaacaaaggtatgaatttagaaagtagctttttctaaaagatgactttgtgcaaaactgaaaatatctttgaacttgcttttagtggatttctgatacaactgtaaaaatatatatggaagaatttttagtggcttttagttgtttctaccaaataatttttagctttttag

SEQ ID NO: 21505 - DNA, 6477 bp, Zea Mays
cttcgctttccctttcccgttctcgcgcaaagccacctttcacttttccttgctccgcctctcctgggtccctccctgcccccctttccaactagggtttatcactggccgggctcgtcactgcatagagttccacaagcttcgcggggcgatggtgtcgccgccggcctttgcggcggcggtcgcggtggtggccgtgctgctatgcgcctcggctgccgccaaccccgcaggcgggccccacatggcggacctgagcgtgctgttgcccccgcggatgacaaagcctgtcgagtaccgtctcatcggcggggatggatgcttctcctggtcatgggatcatcatgaccttatttcagttaaaccagagtataatgatagcagcagatgctcgactagtgctcgtttggcatcaattgccccatactctggccggagggagacttctgtctatgcgactgatatcatcagtggaatcacgatacactgcaaagtattcgtagacaagatctcccggatcagtattttccaccatgctgttaaaattgatctagatgaaattgctacattacgtatacatgccttcgatgatgaagaaaatgtgttctcgacattggtgggcttgcagtttttgtggcaccttaccccgaggttggttgataacagtagccatcatcttattcgtattccactgaaagaaacacatttgagtgactgtggtggcttctgcggtgatatgaatattcggtttgagctagaagacaagaatcttggttcagatttctctgtggtgaagggtattgagattggccaagaggttgttaaagctcagttgtttgagcctcagtttgaacatgtgattgacacaatcacattaactgttgctgaatccatgtcactagagccatcatcaccagttctcgtgactgttggtgttttggtgaagtttaaactcaaggtattccgacagaaagttgctcaagtggttaaattaccatcacaatatcatcgctggtatgcgacaaactcttctgtggcccaagtggattccttgggtatcttgcatgcattgagtctagggtttactaaggtggttgttgaagacacaagagtttctggtcatgaacaagtatcatctctacatgttgttattccacggacacttttcctttatctggtccctattatggatgattctgcccatcttcatgggattacaaacattccatcctcaaaagtatggtatgtttatcctggaagaaaatacatggtccttgccaaagcttttgcagagggatttgatgctagggaaatatatattacagaggaaaatgagcttaaactggagagtagtaccatggaattctggaacttatcgcaggtgccagacagttctacaagttcctatgaagtgcaaacttctagattgttaagtcctattttccaggggcaagggcatttagatgcttccttaacttacctaacgggggcatctggaccaacaaaggtgctcaagcttgtgcaagaagttaatgtttgtagtaaggtgaaggcattctgggatgaaggattggagaactccaacgttatttacctgccctgggttcctggagttcaccaggaagttgaaatgatggcaattggagggtgtggtaagacgctggatgactacaagttattttcctctgatgaggatgttgcttctgtgtctgattcccgtatcgtgcgtgcaaaaaagcctggtcaagctgtcatccgagtagtttctgctttcgatttcttgaattttgatgaggtaattgttgaagtttccattccttcagtactgtctatcttgccaatctttcctgtggaggtgcctgttggaacacgacttcattctgctgcagtgttaaaaacatctgctggacacccattctcacaatgtacccattttaatgcttttataaggtggagtctactatccgaggatgaggcctttcacattcttaacaccgctgaggcctcaagcatcgacgacataaaacataattctggttattggggacaaaatggcaatccttgtgcctgggtctctctgagtgcatttgctgctggcagatcaacaatagttgcaacatttgctgttgattcagattcagatattgagacatttggtggacccatttctctggaggcaacttcaaaaatttctgcatattatcctcttgtagttctccaaggggggaatggaaatcattttggtgggtactggtttgacttatctggaattcatagtaggattaagaacatggataacaactctcccaaggagctgtacttagttcctggatcaacaatggatgtccttatcttcggaggacctgagcgttgggaccaagttattgattttgttgaaacagttgatgttattgatccatccaaaaatcatattattagttctaccgctgtgaagaaactatctagtggactatatcgagtatcttgcctaagcaaagtgagctataaattgctgttttcacgtgggaacatggttggtaaagatcatcctgtgcctgcaatttccaaatcagagttcactgttatttgtgacttcccatcagaaataacattgatagcaaatgaaaatgaaaaccgacttgatatattggaagctgctaggaaagctgaccgtggtccagatagattgcaagcatcacccattgtaatctccaacggaagaaatatacgtctagctgctgcgagtatacatgtaaatggaagatttttcgctaattcatcttctcttcgcttgaaatgggaagccactggatgtgaagggcttgcttactttgaagaaaccaaatctgttgaaatgcttgatgagtcagcttgggagagatctcttgtcctacagaattctacaggagtgtgcactgtacgtgctacagttgatgacttttctaccaaatatgctggccaaactcatgaggaagaatacacattccatagtctcacagatgctattcagttgcagattgtttcttctttaagagtcacccctgaatatgtcttattagttttccatcctgaagcacaggaaaacctgattgtaagtggtggaacatgctccctagatgcttctaccaatgacacacatgtggtgcaaatagttacacatccaggaaaagccttatgttctcaattgattcttgcggctaaaggtttaggcgaagctataatcataatccaggatgttggcctttctccaagagcaactactcattctttggttagagttgcaaatgttgactggattaagataacagcagaagagcaaatcagtcttatggaaggaagcacaaaagatttccaaatattagctggcacccaagatggacaaatatttggtgattctcagttcaaatatatggacattgagttgcatcttgacgatgagattctggagcttattggtccaagcgaatcaatggatggacccgaattttcaattaaagctgcaaaaatcggcattacatctctatatgtcagtactaaacaaagctctggacacagagttttaagtcaggttgtcaaggtggaagtgtatggaccattgcaaatacatcctgagtatatttacctcactccaggcgcctcttttgtgctttctgttaaaggtggtccaaaaactggagtttccattgaatactcaagtctgaacatgggaattgtagaagttcaaaataccactgggaaactatctgcaaaatctgtggggaactctactgtacgtgctgctgttttagcaaatggaggtatcttagtctgtgaagcttttggaagagttgaagtggatatcccagtggctatgacattgaatactcaaagtgaacgtctttgtattggctgtagcatgccagtttatccatctctgcctaagggagatctattttccttctatgaaacttgccaaagttacagttggatgatagcagatgagaaggttgtgacattccaatcagctaaatcctggcgatacagacttgaccaaggactatattcagatggaaaaaagagtccatggttttccaatggcagcagcaaattttttatcagtcatatgcttggaaggtctgctggcaaaaccaaaatttccatttcagttgtttgtgatttcttgctacctggcacctctggatctgttgtatcatacaatgcctccaagatcattcttgtggttccagatcctccccttgcacttgcgctaccgatgacttggttattcccacccttctataccactatgagccttttgcctagatcagcaaattcccttggggaaccaaactcacttgacctggagagctccgttgggtattctctgctaaggggcaatggtaggataattgatggaagtaaaattcagactggagaaagcaatacagttgattgtattcaagcaaaagatcactcagctgggagaacggaaatagcagcatgtctacgagttgctcaggttgcacaagtgcgggtagctgctgcagaatcatcaatccagattgtctatctatctgtaaacgataaagttgaattggatataaaatatgctgatgaattaggttatattttcaacgaagctcatggagtagtccctgtaaagattgagacaaattatccagatgttgtttcggttctcatgccaagagattttaatggtacatatgacacacgtgaacgttttgttcttcaggcgagaagtcatggaacagctcttgtaaggctccacacaaacaatgtccctaacaaagtggatttcataatggtatccgtaggagcacaaatatatcctagggatgtgatccttcattctggccagcacctgaacttcactgttatcggagacagtatggacatgtgtggacatggtcactggttaagtagcaatgggaagatcgtccacatcaatcgggtaactggtgaagcacaagcacgtagtgaaggtgtagcggaagtaatcttcaaaggttcaaattttaagctgcaaacaactatcactgttctcaaggtgaaccagatagttgttgatgctcctgcggagacactgactaatgcagctggcctgccggatggatacatgttttctgtgagatttagtgattcaattgagcacagtattggatcctctgcgagcccaattaatgtcccctttgaatgcaaggttgacccttcttttgttgggtttgttgagccatggactgagcatgccacaaagaaatcctactgcctgtttcatccatattcacctgcacaactgttgcccgtgaagttggaccctaatgaaggaactttacacattttagttcgtgcaaatctaaaggaagacccaaaggtgaccggatctgcacatgctctttttgtcaaagggttttacataaaagaacctgggaaattaaatctgactccaagttgcaatcatagtgtcattactatcgatggaaatactgatattgagttgttctggaatgctaaagatttactcagagtcagtcgtgttgacacaaatgagaacaatggtgttcttagtcgagttgtttaccgggttgaagcgctaaaaaggctatcgttctctgacaaggttactatcgttcttcctgccactggtcaaactgaagaagttgaagtcagctacgatacaggagaggaggcagagtcaccatcatcatggggcctaaccacaactgctgttatgctcacatgcatcattgtgacaatagtcactgttgcacttttcattaagttgctgcagagacctatcagacaggcaccatcagggagcatgacagcatccacaccagcacgagcaccagcagccgatcccgcagccatggctgatcctgcatccccggctaatggtcagttctctcctcgtacaccccagcctttcatggagtacgtgaggaggaccattgatgacacaccgtactataagcgtgatgccaggaggcgattcaacccgcagaacacctactgagcatgcgtggcagcgtgtagtgtggactggttggtctgttgtaacgttcctgatttaggtccgcagttggtttagaaccacagttgtagttcttgcacgagtatgcccttgctgtgagaatgctgtaaaatttgtggttctagcagcacgtgcggtgaggggtggacatctattttggtagaagcctgttgtttgccattttgccaacaggtataggacatctgttttgttagaagcatgttgtttgacatttcgccatagatataggacatcaattttgttagaaccctgtcgttaattcttggcatgtaattttaggtctgtacattggagtacgggacaaccaaacccttggtttagacaactgttttagctcaattgctgcagatacttgagttttgttggcctgatttagtttatttattctacaagcagtagtgagtggtcacagtcctagttgtggt

SEQ ID NO: 21506 - DNA, 5731 bp, Zea Mays
cttcgctttccctttcccgttctcgcgcaaagccacctttcacttttccttgctccgcctctcctgggtccctccctgcccccctttccaactagggtttatcactggccgggctcgtcactgcatagagttccacaagcttcgcggggcgatggtgtcgccgccggcctttgcggcggcggtcgcggtggtggccgtgctgctatgcgcctcggctgccgccaaccccgcaggcgggccccacatggcggacctgagcgtgctgttgcccccgcggatgacaaagcctgtcgagtaccgtctcatcggcggggatggatgcttctcctggtcatgggatcatcatgaccttatttcagttaaaccagagtataatgatagcagcagatgctcgactagtgctcgtttggcatcaattgccccatactctggccggagggagacttctgtctatgcgactgatatcatcagtggaatcacgatacactgcaaagtattcgtagacaagatctcccggatcagtattttccaccatgctgttaaaattgatctagatgaaattgctacattacgtatacatgccttcgatgatgaagaaaatgtgttctcgacattggtgggcttgcagtttttgtggcaccttaccccgaggttggttgataacagtagccatcatcttattcgtattccactgaaagaaacacatttgagtgactgtggtggcttctgcggtgatatgaatattcggtttgagctagaagacaagaatcttggttcagatttctctgtggtgaagggtattgagattggccaagaggttgttaaagctcagttgtttgagcctcagtttgaacatgtgattgacacaatcacattaactgttgctgaatccatgtcactagagccatcatcaccagttctcgtgactgttggtgttttggtgaagtttaaactcaaggtattccgacagaaagttgctcaagtggttaaattaccatcacaatatcatcgctggtatgcgacaaactcttctgtggcccaagtggattccttgggtatcttgcatgcattgagtctagggtttactaaggtggttgttgaagacacaagagtttctggtcatgaacaagtatcatctctacatgttgttattccacggacacttttcctttatctggtccctattatggatgattctgcccatcttcatgggattacaaacattccatcctcaaaagtatggtatgtttatcctggaagaaaatacatggtccttgccaaagcttttgcagagggatttgatgctagggaaatatatattacagaggaaaatgagcttaaactggagagtagtaccatggaattctggaacttatcgcaggtgccagacagttctacaagttcctatgaagtgcaaacttctagattgttaagtcctattttccaggggcaagggcatttagatgcttccttaacttacctaacgggggcatctggaccaacaaaggtgctcaagcttgtgcaagaagttaatgtttgtagtaaggtgaaggcattctgggatgaaggattggagaactccaacgttatttacctgccctgggttcctggagttcaccaggaagttgaaatgatggcaattggagggtgtggtaagacgctggatgactacaagttattttcctctgatgaggatgttgcttctgtgtctgattcccgtatcgtgcgtgcaaaaaagcctggtcaagctgtcatccgagtagtttctgctttcgatttcttgaattttgatgaggtaattgttgaagtttccattccttcagtactgtctatcttgccaatctttcctgtggaggtgcctgttggaacacgacttcattctgctgcagtgttaaaaacatctgctggacacccattctcacaatgtacccattttaatgcttttataaggtggagtctactatccgaggatgaggcctttcacattcttaacaccgctgaggcctcaagcatcgacgacataaaacataattctggttattggggacaaaatggcaatccttgtgcctgggtctctctgagtgcatttgctgctggcagatcaacaatagttgcaacatttgctgttgattcagattcagatattgagacatttggtggacccatttctctggaggcaacttcaaaaatttctgcatattatcctcttgtagttctccaaggggggaatggaaatcattttggtgggtactggtttgacttatctggaattcatagtaggattaagaacatggataacaactctcccaaggagctgtacttagttcctggatcaacaatggatgtccttatcttcggaggacctgagcgttgggaccaagttattgattttgttgaaacagttgatgttattgatccatccaaaaatcatattattagttctaccgctgtgaagaaactatctagtggactatatcgagtatcttgcctaagcaaagtgagctataaattgctgttttcacgtgggaacatggttggtaaagatcatcctgtgcctgcaatttccaaatcagagttcactgttatttgtgacttcccatcagaaataacattgatagcaaatgaaaatgaaaaccgacttgatatattggaagctgctaggaaagctgaccgtggtccagatagattgcaagcatcacccattgtaatctccaacggaagaaatatacgtctagctgctgcgagtatacatgtaaatggaagatttttcgctaattcatcttctcttcgcttgaaatgggaagccactggatgtgaagggcttgcttactttgaagaaaccaaatctgttgaaatgcttgatgagtcagcttgggagagatctcttgtcctacagaattctacaggagtgtgcactgtacgtgctacagttgatgacttttctaccaaatatgctggccaaactcatgaggaagaatacacattccatagtctcacagatgctattcagttgcagattgtttcttctttaagagtcacccctgaatatgtcttattagttttccatcctgaagcacaggttagagttgcaaatgttgactggattaagataacagcagaagagcaaatcagtcttatggaaggaagcacaaaagatttccaaatattagctggcacccaagatggacaaatatttggtgattctcagttcaaatatatggacattgagttgcatcttgacgatgagattctggagcttattggtccaagcgaatcaatggatggacccgaattttcaattaaagctgcaaaaatcggcattacatctctatatgtcagtactaaacaaagctctggacacagagttttaagtcaggttgtcaaggtggaagtgtatggaccattgcaaatacatcctgagtatatttacctcactccaggcgcctcttttgtgctttctgttaaaggtggtccaaaaactggagtttccattgaatactcaagtctgaacatgggaattgtagaagttcaaaataccactgggaaactatctgcaaaatctgtggggaactctactgtacgtgctgctgttttagcaaatggaggtatcttagtctgtgaagcttttggaagagttgaagtggatatcccagtggctatgacattgaatactcaaagtgaacgtctttgtattggctgtagcatgccagtttatccatctctgcctaagggagatctattttccttctatgaaacttgccaaagttacagttggatgatagcagatgagaaggttgtgacattccaatcagctaaatcctggcgatacagacttgaccaaggactatattcagatggaaaaaagagtccatggttttccaatggcagcagcaaattttttatcagtcatatgcttggaaggtctgctggcaaaaccaaaatttccatttcagttgtttgtgatttcttgctacctggcacctctggatctgttgtatcatacaatgcctccaagatcattcttgtggttccagatcctccccttgcacttgcgctaccgatgacttggttattcccacccttctataccactatgagccttttgcctagatcagcaaattcccttggggaaccaaactcacttgacctggagagctccgttgggtattctctgctaaggggcaatggtaggataattgatggaagtaaaattcagactggagaaagcaatacagttgattgtattcaagcaaaagatcactcagctgggagaacggaaatagcagcatgtctacgagttgctcaggttgcacaagtgcgggtagctgctgcagaatcatcaatccagattgtctatctatctgtaaacgataaagttgaattggatataaaatatgctgatgaattaggttatattttcaacgaagctcatggagtagtccctgtaaagattgagacaaattatccagatgttgtttcggttctcatgccaagagattttaatggtacatatgacacacgtgaacgttttgttcttcaggcgagaagtcatggaacagctcttgtaaggctccacacaaacaatgtccctaacaaagtggatttcataatggtatccgtaggagcacaaatatatcctagggatgtgatccttcattctggccagcacctgaacttcactgttatcggagacagtatggacatgtgtggacatggtcactggttaagtagcaatgggaagatcgtccacatcaatcgggtaactggtgaagcacaagcacgtagtgaaggtgtagcggaagtaatcttcaaaggttcaaattttaagctgcaaacaactatcactgttctcaaggtgaaccagatagttgttgatgctcctgcggagacactgactaatgcagctggcctgccggatggatacatgttttctgtgagatttagtgattcaattgagcacagtattggatcctctgcgagcccaattaatgtcccctttgaatgcaaggttgacccttcttttgttgggtttgttgagccatggactgagcatgccacaaagaaatcctactgcctgtttcatccatattcacctgcacaactgttgcccgtgaagttggaccctaatgaaggaactttacacattttagttcgtgcaaatctaaaggaagacccaaaggtgaccggatctgcacatgctctttttgtcaaagggttttacataaaagaacctgggaaattaaatctgactccaagttgcaatcatagtgtcattactatcgatggaaatactgatattgagttgttctggaatgctaaagatttactcagagtcagtcgtgttgacacaaatgagaacaatggtgttcttagtcgagttgtttaccgggttgaagcgctaaaaaggctatcgttctctgacaaggttactatcgttcttcctgccactggtcaaactgaagaagttgaagtcagctacgatacaggagaggaggcagagtcaccatcatcatggggcctaaccacaactgctgttatgctcacatgcatcattgtgacaatagtcactgttgcacttttcattaagttgctgcagagacctatcagacaggcaccatcagggagcatgacagcatccacaccagcacgagcaccagcagccgatcccgcagccatggctgatcctgcatccccggctaatgccattgaacacccggtttggaacgatgtg

SEQ ID NO: 21507 - DNA, 5068 bp, Zea Mays
cgcaaagccacctttcacttttccttgctccgcctctcctgggtccctccctgcccccctttccaactagggtttatcactggccgggctcgtcactgcatagagttccacaagcttcgcggggcgatggtgtcgccgccggcctttgcggcggcggtcgcggtggtggccgtgctgctatgcgcctcggctgccgccaaccccgcaggcgggccccacatggcggacctgagcgtgctgttgcccccgcggatgacaaagcctgtcgagtaccgtctcatcggcggggatggatgcttctcctggtcatgggatcatcatgaccttatttcagttaaaccagagtataatgatagcagcagatgctcgactagtgctcgtttggcatcaattgccccatactctggccggagggagacttctgtctatgcgactgatatcatcagtggaatcacgatacactgcaaagtattcgtagacaagatctcccggatcagtattttccaccatgctgttaaaattgatctagatgaaattgctacattacgtatacatgccttcgatgatgaagaaaatgtgttctcgacattggtgggcttgcagtttttgtggcaccttaccccgaggttggttgataacagtagccatcatcttattcgtattccactgaaagaaacacatttgagtgactgtggtggcttctgcggtgatatgaatattcggtttgagctagaagacaagaatcttggttcagatttctctgtggtgaagggtattgagattggccaagaggttgttaaagctcagttgtttgagcctcagtttgaacatgtgattgacacaatcacattaactgttgctgaatccatgtcactagagccatcatcaccagttctcgtgactgttggtgttttggtgaagtttaaactcaaggtattccgacagaaagttgctcaagtggttaaattaccatcacaatatcatcgctggtatgcgacaaactcttctgtggcccaagtggattccttgggtatcttgcatgcattgagtctagggtttactaaggtggttgttgaagacacaagagtttctggtcatgaacaagtatcatctctacatgttgttattccacggacacttttcctttatctggtccctattatggatgattctgcccatcttcatgggattacaaacattccatcctcaaaagtatggtatgtttatcctggaagaaaatacatggtccttgccaaagcttttgcagagggatttgatgctagggaaatatatattacagaggaaaatgagcttaaactggagagtagtaccatggaattctggaacttatcgcaggtgccagacagttctacaagttcctatgaagtgcaaacttctagattgttaagtcctattttccaggggcaagggcatttagatgcttccttaacttacctaacgggggcatctggaccaacaaaggtgctcaagcttgtgcaagaagttaatgtttgtagtaaggtgaaggcattctgggatgaaggattggagaactccaacgttatttacctgccctgggttcctggagttcaccaggaagttgaaatgatggcaattggagggtgtggtaagacgctggatgactacaagttattttcctctgatgaggatgttgcttctgtgtctgattcccgtatcgtgcgtgcaaaaaagcctggtcaagctgtcatccgagtagtttctgctttcgatttcttgaattttgatgaggtaattgttgaagtttccattccttcagtactgtctatcttgccaatctttcctgtggaggtgcctgttggaacacgacttcattctgctgcagtgttaaaaacatctgctggacacccattctcacaatgtacccattttaatgcttttataaggtggagtctactatccgaggatgaggcctttcacattcttaacaccgctgaggcctcaagcatcgacgacataaaacataattctggttattggggacaaaatggcaatccttgtgcctgggtctctctgagtgcatttgctgctggcagatcaacaatagttgcaacatttgctgttgattcagattcagatattgagacatttggtggacccatttctctggaggcaacttcaaaaatttctgcatattatcctcttgtagttctccaaggggggaatggaaatcattttggtgggtactggtttgacttatctggaattcatagtaggattaagaacatggataacaactctcccaaggagctgtacttagttcctggatcaacaatggatgtccttatcttcggaggacctgagcgttgggaccaagttattgattttgttgaaacagttgatgttattgatccatccaaaaatcatattattagttctaccgctgtgaagaaactatctagtggactatatcgagtatcttgcctaagcaaagtgagctataaattgctgttttcacgtgggaacatggttggtaaagatcatcctgtgcctgcaatttccaaatcagagttcactgttatttgtgacttcccatcagaaataacattgatagcaaatgaaaatgaaaaccgacttgatatattggaagctgctaggaaagctgaccgtggtccagatagattgcaagcatcacccattgtaatctccaacggaagaaatatacgtctagctgctgcgagtatacatgtaaatggaagatttttcgctaattcatcttctcttcgcttgaaatgggaagccactggatgtgaagggcttgcttactttgaagaaaccaaatctgttgaaatgcttgatgagtcagcttgggagagatctcttgtcctacagaattctacaggagtgtgcactgtacgtgctacagttgatgacttttctaccaaatatgctggccaaactcatgaggaagaatacacattccatagtctcacagatgctattcagttgcagattgtttcttctttaagagtcacccctgaatatgtcttattagttttccatcctgaagcacaggaaaacctgattgtaagtggtggaacatgctccctagatgcttctaccaatgacacacatgtggtgcaaatagttacacatccaggaaaagccttatgttctcaattgattcttgcggctaaaggtttaggcgaagctataatcataatccaggatgttggcctttctccaagagcaactactcattctttggttagagttgcaaatgttgactggattaagataacagcagaagagcaaatcagtcttatggaaggaagcacaaaagatttccaaatattagctggcacccaagatggacaaatatttggtgattctcagttcaaatatatggacattgagttgcatcttgacgatgagattctggagcttattggtccaagcgaatcaatggatggacccgaattttcaattaaagctgcaaaaatcggcattacatctctatatgtcagtactaaacaaagctctggacacagagttttaagtcaggttgtcaaggtggaagtgtatggaccattgcaaatacatcctgagtatatttacctcactccaggcgcctcttttgtgctttctgttaaaggtggtccaaaaactggagtttccattgaatactcaagtctgaacatgggaattgtagaagttcaaaataccactgggaaactatctgcaaaatctgtggggaactctactgtacgtgctgctgttttagcaaatggaggtatcttagtctgtgaagcttttggaagagttgaagtggatatcccagtggctatgacattgaatactcaaagtgaacgtctttgtattggctgtagcatgccagtttatccatctctgcctaagggagatctattttccttctatgaaacttgccaaagttacagttggatgatagcagatgagaaggttgtgacattccaatcagctaaatcctggcgatacagacttgaccaaggactatattcagatggaaaaaagagtccatggttttccaatggcagcagcaaattttttatcagtcatatgcttggaaggtctgctggcaaaaccaaaatttccatttcagttgtttgtgatttcttgctacctggcacctctggatctgttgtatcatacaatgcctccaagatcattcttgtggttccagatcctccccttgcacttgcgctaccgatgacttggttattcccacccttctataccactatgagccttttgcctagatcagcaaattcccttggggaaccaaactcacttgacctggagagctccgttgggtattctctgctaaggggcaatggtaggataattgatggaagtaaaattcagactggagaaagcaatacagttgattgtattcaagcaaaagatcactcagctgggagaacggaaatagcagcatgtctacgagttgctcaggttgcacaagtgcgggtagctgctgcagaatcatcaatccagattgtctatctatctgtaaacgataaagttgaattggatataaaatatgctgatgaattaggttatattttcaacgaagctcatggagtagtccctgtaaagattgagacaaattatccagatgttgtttcggttctcatgccaagagattttaatggtacatatgacacacgtgaacgttttgttcttcaggcgagaagtcatggaacagctcttgtaaggctccacacaaacaatgtccctaacaaagtggatttcataatggtatccgtaggagcacaaatatatcctagggatgtgatccttcattctggccagcacctgaacttcactgttatcggagacagtatggacatgtgtggacatggtcactggttaagtagcaatgggaagatcgtccacatcaatcgggtaactggtgaagcacaagcacgtagtgaaggtgtagcggaagatagttgttgatgctcctgcggagacactgactaatgcagctggcctgccggatggatacatgttttctgtgagatttaggagcagacataaatttgtg

SEQ ID NO: 21508 - DNA, 6399 bp, Zea Mays
cgcaaagccacctttcacttttccttgctccgcctctcctgggtccctccctgcccccctttccaactagggtttatcactggccgggctcgtcactgcatagagttccacaagcttcgcggggcgatggtgtcgccgccggcctttgcggcggcggtcgcggtggtggccgtgctgctatgcgcctcggctgccgccaaccccgcaggcgggccccacatggcggacctgagcgtgctgttgcccccgcggatgacaaagcctgtcgagtaccgtctcatcggcggggatggatgcttctcctggtcatgggatcatcatgaccttatttcagttaaaccagagtataatgatagcagcagatgctcgactagtgctcgtttggcatcaattgccccatactctggccggagggagacttctgtctatgcgactgatatcatcagtggaatcacgatacactgcaaagtattcgtagacaagatctcccggatcagtattttccaccatgctgttaaaattgatctagatgaaattgctacattacgtatacatgccttcgatgatgaagaaaatgtgttctcgacattggtgggcttgcagtttttgtggcaccttaccccgaggttggttgataacagtagccatcatcttattcgtattccactgaaagaaacacatttgagtgactgtggtggcttctgcggtgatatgaatattcggtttgagctagaagacaagaatcttggttcagatttctctgtggtgaagggtattgagattggccaagaggttgttaaagctcagttgtttgagcctcagtttgaacatgtgattgacacaatcacattaactgttgctgaatccatgtcactagagccatcatcaccagttctcgtgactgttggtgttttggtgaagtttaaactcaaggtattccgacagaaagttgctcaagtggttaaattaccatcacaatatcatcgctggtatgcgacaaactcttctgtggcccaagtggattccttgggtatcttgcatgcattgagtctagggtttactaaggtggttgttgaagacacaagagtttctggtcatgaacaagtatcatctctacatgttgttattccacggacacttttcctttatctggtccctattatggatgattctgcccatcttcatgggattacaaacattccatcctcaaaagtatggtatgtttatcctggaagaaaatacatggtccttgccaaagcttttgcagagggatttgatgctagggaaatatatattacagaggaaaatgagcttaaactggagagtagtaccatggaattctggaacttatcgcaggtgccagacagttctacaagttcctatgaagtgcaaacttctagattgttaagtcctattttccaggggcaagggcatttagatgcttccttaacttacctaacgggggcatctggaccaacaaaggtgctcaagcttgtgcaagaagttaatgtttgtagtaaggtgaaggcattctgggatgaaggattggagaactccaacgttatttacctgccctgggttcctggagttcaccaggaagttgaaatgatggcaattggagggtgtggtaagacgctggatgactacaagttattttcctctgatgaggatgttgcttctgtgtctgattcccgtatcgtgcgtgcaaaaaagcctggtcaagctgtcatccgagtagtttctgctttcgatttcttgaattttgatgaggtaattgttgaagtttccattccttcagtactgtctatcttgccaatctttcctgtggaggtgcctgttggaacacgacttcattctgctgcagtgttaaaaacatctgctggacacccattctcacaatgtacccattttaatgcttttataaggtggagtctactatccgaggatgaggcctttcacattcttaacaccgctgaggcctcaagcatcgacgacataaaacataattctggttattggggacaaaatggcaatccttgtgcctgggtctctctgagtgcatttgctgctggcagatcaacaatagttgcaacatttgctgttgattcagattcagatattgagacatttggtggacccatttctctggaggcaacttcaaaaatttctgcatattatcctcttgtagttctccaaggggggaatggaaatcattttggtgggtactggtttgacttatctggaattcatagtaggattaagaacatggataacaactctcccaaggagctgtacttagttcctggatcaacaatggatgtccttatcttcggaggacctgagcgttgggaccaagttattgattttgttgaaacagttgatgttattgatccatccaaaaatcatattattagttctaccgctgtgaagaaactatctagtggactatatcgagtatcttgcctaagcaaagtgagctataaattgctgttttcacgtgggaacatggttggtaaagatcatcctgtgcctgcaatttccaaatcagagttcactgttatttgtgacttcccatcagaaataacattgatagcaaatgaaaatgaaaaccgacttgatatattggaagctgctaggaaagctgaccgtggtccagatagattgcaagcatcacccattgtaatctccaacggaagaaatatacgtctagctgctgcgagtatacatgtaaatggaagatttttcgctaattcatcttctcttcgcttgaaatgggaagccactggatgtgaagggcttgcttactttgaagaaaccaaatctgttgaaatgcttgatgagtcagcttgggagagatctcttgtcctacagaattctacaggagtgtgcactgtacgtgctacagttgatgacttttctaccaaatatgctggccaaactcatgaggaagaatacacattccatagtctcacagatgctattcagttgcagattgtttcttctttaagagtcacccctgaatatgtcttattagttttccatcctgaagcacaggaaaacctgattgtaagtggtggaacatgctccctagatgcttctaccaatgacacacatgtggtgcaaatagttacacatccaggaaaagccttatgttctcaattgattcttgcggctaaaggtttaggcgaagctataatcataatccaggatgttggcctttctccaagagcaactactcattctttggttagagttgcaaatgttgactggattaagataacagcagaagagcaaatcagtcttatggaaggaagcacaaaagatttccaaatattagctggcacccaagatggacaaatatttggtgattctcagttcaaatatatggacattgagttgcatcttgacgatgagattctggagcttattggtccaagcgaatcaatggatggacccgaattttcaattaaagctgcaaaaatcggcattacatctctatatgtcagtactaaacaaagctctggacacagagttttaagtcaggttgtcaaggtggaagtgtatggaccattgcaaatacatcctgagtatatttacctcactccaggcgcctcttttgtgctttctgttaaaggtggtccaaaaactggagtttccattgaatactcaagtctgaacatgggaattgtagaagttcaaaataccactgggaaactatctgcaaaatctgtggggaactctactgtacgtgctgctgttttagcaaatggaggtatcttagtctgtgaagcttttggaagagttgaagtggatatcccagtggctatgacattgaatactcaaagtgaacgtctttgtattggctgtagcatgccagtttatccatctctgcctaagggagatctattttccttctatgaaacttgccaaagttacagttggatgatagcagatgagaaggttgtgacattccaatcagctaaatcctggcgatacagacttgaccaaggactatattcagatggaaaaaagagtccatggttttccaatggcagcagcaaattttttatcagtcatatgcttggaaggtctgctggcaaaaccaaaatttccatttcagttgtttgtgatttcttgctacctggcacctctggatctgttgtatcatacaatgcctccaagatcattcttgtggttccagatcctccccttgcacttgcgctaccgatgacttggttattcccacccttctataccactatgagccttttgcctagatcagcaaattcccttggggaaccaaactcacttgacctggagagctccgttgggtattctctgctaaggggcaatggtaggataattgatggaagtaaaattcagactggagaaagcaatacagttgattgtattcaagcaaaagatcactcagctgggagaacggaaatagcagcatgtctacgagttgctcaggttgcacaagtgcgggtagctgctgcagaatcatcaatccagattgtctatctatctgtaaacgataaagttgaattggatataaaatatgctgatgaattaggttatattttcaacgaagctcatggagtagtccctgtaaagattgagacaaattatccagatgttgtttcggttctcatgccaagagattttaatggtacatatgacacacgtgaacgttttgttcttcaggcgagaagtcatggaacagctcttgtaaggctccacacaaacaatgtccctaacaaagtggatttcataatggtatccgtaggagcacaaatatatcctagggatgtgatccttcattctggccagcacctgaacttcactgttatcggagacagtatggacatgtgtggacatggtcactggttaagtagcaatgggaagatcgtccacatcaatcgggtaactggtgaagcacaagcacgtagtgaaggtgtagcggaaggtgaaccagatagttgttgatgctcctgcggagacactgactaatgcagctggcctgccggatggatacatgttttctgtgagatttagtgattcaattgagcacagtattggatcctctgcgagcccaattaatgtcccctttgaatgcaaggttgacccttcttttgttgggtttgttgagccatggactgagcatgccacaaagaaatcctactgcctgtttcatccatattcacctgcacaactgttgcccgtgaagttggaccctaatgaaggaactttacacattttagttcgtgcaaatctaaaggaagacccaaaggtgaccggatctgcacatgctctttttgtcaaagggttttacataaaagaacctgggaaattaaatctgactccaagttgcaatcatagtgtcattactatcgatggaaatactgatattgagttgttctggaatgctaaagatttactcagagtcagtcgtgttgacacaaatgagaacaatggtgttcttagtcgagttgtttaccgggttgaagcgctaaaaaggctatcgttctctgacaaggttactatcgttcttcctgccactggtcaaactgaagaagttgaagtcagctacgatacaggagaggaggcagagtcaccatcatcatggggcctaaccacaactgctgttatgctcacatgcatcattgtgacaatagtcactgttgcacttttcattaagttgctgcagagacctatcagacaggcaccatcagggagcatgacagcatccacaccagcacgagcaccagcagccgatcccgcagccatggctgatcctgcatccccggctaatggtcagttctctcctcgtacaccccagcctttcatggagtacgtgaggaggaccattgatgacacaccgtactataagcgtgatgccaggaggcgattcaacccgcagaacacctactgagcatgcgtggcagcgtgtagtgtggactggttggtctgttgtaacgttcctgatttaggtccgcagttggtttagaaccacagttgtagttcttgcacgagtatgcccttgctgtgagaatgctgtaaaatttgtggttctagcagcacgtgcggtgaggggtggacatctattttggtagaagcctgttgtttgccattttgccaacaggtataggacatctgttttgttagaagcatgttgtttgacatttcgccatagatataggacatcaattttgttagaaccctgtcgttaattcttggcatgtaattttaggtctgtacattggagtacgggacaaccaaacccttggtttagacaactgttttagctcaattgctgcagatacttgagttttgttggcctgatttagtttatttattctacaagcagtagtgagtggtcacagtcctagttgtggt

SEQ ID NO: 21509 - DNA, 5372 bp, Zea Mays
atgcggcggtgctatgcagtgcgtgcttgcaaggaatctcataccttctcgctggatggctgctggtctgtgccacactgggaagtccgtgaagctgaggtacctcagaggacagaacttgtgccttggagggcgggacaagtgccccgagggccggaagagttgcctgagggtctatgtaggagttgccccgagggtcgacggaagaggtgccttgaggggcggaacaagtgcctcggggggcgaaacgcgaaacaagtgctctggaggtctgaagagttgcctcgagggctgagagagttgtcacgagaggcggcacacgagggaaagccttggggtatggcgcctgctgatgaggatgcttggtggctccccacgtatggaactagaggtggaggcacgatggtggcagaggaaaatgagcttaaactggagagtagtaccatggaattctggaacttatcgcaggtgccagacagttctacaagttcctatgaagtgcaaacttctagattgttaagtcctattttccaggggcaagggcatttagatgcttccttaacttacctaacgggggcatctggaccaacaaaggtgctcaagcttgtgcaagaagttaatgtttgtagtaaggtgaaggcattctgggatgaaggattggagaactccaacgttatttacctgccctgggttcctggagttcaccaggaagttgaaatgatggcaattggagggtgtggtaagacgctggatgactacaagttattttcctctgatgaggatgttgcttctgtgtctgattcccgtatcgtgcgtgcaaaaaagcctggtcaagctgtcatccgagtagtttctgctttcgatttcttgaattttgatgaggtaattgttgaagtttccattccttcagtactgtctatcttgccaatctttcctgtggaggtgcctgttggaacacgacttcattctgctgcagtgttaaaaacatctgctggacacccattctcacaatgtacccattttaatgcttttataaggtggagtctactatccgaggatgaggcctttcacattcttaacaccgctgaggcctcaagcatcgacgacataaaacataattctggttattggggacaaaatggcaatccttgtgcctgggtctctctgagtgcatttgctgctggcagatcaacaatagttgcaacatttgctgttgattcagattcagatattgagacatttggtggacccatttctctggaggcaacttcaaaaatttctgcatattatcctcttgtagttctccaaggggggaatggaaatcattttggtgggtactggtttgacttatctggaattcatagtaggattaagaacatggataacaactctcccaaggagctgtacttagttcctggatcaacaatggatgtccttatcttcggaggacctgagcgttgggaccaagttattgattttgttgaaacagttgatgttattgatccatccaaaaatcatattattagttctaccgctgtgaagaaactatctagtggactatatcgagtatcttgcctaagcaaagtgagctataaattgctgttttcacgtgggaacatggttggtaaagatcatcctgtgcctgcaatttccaaatcagagttcactgttatttgtgacttcccatcagaaataacattgatagcaaatgaaaatgaaaaccgacttgatatattggaagctgctaggaaagctgaccgtggtccagatagattgcaagcatcacccattgtaatctccaacggaagaaatatacgtctagctgctgcgagtatacatgtaaatggaagatttttcgctaattcatcttctcttcgcttgaaatgggaagccactggatgtgaagggcttgcttactttgaagaaaccaaatctgttgaaatgcttgatgagtcagcttgggagagatctcttgtcctacagaattctacaggagtgtgcactgtacgtgctacagttgatgacttttctaccaaatatgctggccaaactcatgaggaagaatacacattccatagtctcacagatgctattcagttgcagattgtttcttctttaagagtcacccctgaatatgtcttattagttttccatcctgaagcacaggttagagttgcaaatgttgactggattaagataacagcagaagagcaaatcagtcttatggaaggaagcacaaaagatttccaaatattagctggcacccaagatggacaaatatttggtgattctcagttcaaatatatggacattgagttgcatcttgacgatgagattctggagcttattggtccaagcgaatcaatggatggacccgaattttcaattaaagctgcaaaaatcggcattacatctctatatgtcagtactaaacaaagctctggacacagagttttaagtcaggttgtcaaggtggaagtgtatggaccattgcaaatacatcctgagtatatttacctcactccaggcgcctcttttgtgctttctgttaaaggtggtccaaaaactggagtttccattgaatactcaagtctgaacatgggaattgtagaagttcaaaataccactgggaaactatctgcaaaatctgtggggaactctactgtacgtgctgctgttttagcaaatggaggtatcttagtctgtgaagcttttggaagagttgaagtggatatcccagtggctatgacattgaatactcaaagtgaacgtctttgtattggctgtagcatgccagtttatccatctctgcctaagggagatctattttccttctatgaaacttgccaaagttacagttggatgatagcagatgagaaggttgtgacattccaatcagctaaatcctggcgatacagacttgaccaaggactatattcagatggaaaaaagagtccatggttttccaatggcagcagcaaattttttatcagtcatatgcttggaaggtctgctggcaaaaccaaaatttccatttcagttgtttgtgatttcttgctacctggcacctctggatctgttgtatcatacaatgcctccaagatcattcttgtggttccagatcctccccttgcacttgcgctaccgatgacttggttattcccacccttctataccactatgagccttttgcctagatcagcaaattcccttggggaaccaaactcacttgacctggagagctccgttgggtattctctgctaaggggcaatggtaggataattgatggaagtaaaattcagactggagaaagcaatacagttgattgtattcaagcaaaagatcactcagctgggagaacggaaatagcagcatgtctacgagttgctcaggttgcacaagtgcgggtagctgctgcagaatcatcaatccagattgtctatctatctgtaaacgataaagttgaattggatataaaatatgctgatgaattaggttatattttcaacgaagctcatggagtagtccctgtaaagattgagacaaattatccagatgttgtttcggttctcatgccaagagattttaatggtacatatgacacacgtgaacgttttgttcttcaggcgagaagtcatggaacagctcttgtaaggctccacacaaacaatgtccctaacaaagtggatttcataatggtatccgtaggagcacaaatatatcctagggatgtgatccttcattctggccagcacctgaacttcactgttatcggagacagtatggacatgtgtggacatggtcactggttaagtagcaatgggaagatcgtccacatcaatcgggtaactggtgaagcacaagcacgtagtgaaggtgtagcggaagtaatcttcaaaggttcaaattttaagctgcaaacaactatcactgttctcaaggtgaaccagatagttgttgatgctcctgcggagacactgactaatgcagctggcctgccggatggatacatgttttctgtgagatttagtgattcaattgagcacagtattggatcctctgcgagcccaattaatgtcccctttgaatgcaaggttgacccttcttttgttgggtttgttgagccatggactgagcatgccacaaagaaatcctactgcctgtttcatccatattcacctgcacaactgttgcccgtgaagttggaccctaatgaaggaactttacacattttagttcgtgcaaatctaaaggaagacccaaaggtgaccggatctgcacatgctctttttgtcaaagggttttacataaaagaacctgggaaattaaatctgactccaagttgcaatcatagtgtcattactatcgatggaaatactgatattgagttgttctggaatgctaaagatttactcagagtcagtcgtgttgacacaaatgagaacaatggtgttcttagtcgagttgtttaccgggttgaagcgctaaaaaggctatcgttctctgacaaggttactatcgttcttcctgccactggtcaaactgaagaagttgaagtcagctacgatacaggagaggaggcagagtcaccatcatcatggggcctaaccacaactgctgttatgctcacatgcatcattgtgacaatagtcactgttgcacttttcattaagttgctgcagagacctatcagacaggcaccatcagggagcatgacagcatccacaccagcacgagcaccagcagccgatcccgcagccatggctgatcctgcatccccggctaatggtcagttctctcctcgtacaccccagcctttcatggagtacgtgaggaggaccattgatgacacaccgtactataagcgtgatgccaggaggcgattcaacccgcagaacacctactgagcatgcgtggcagcgtgtagtgtggactggttggtctgttgtaacgttcctgatttaggtccgcagttggtttagaaccacagttgtagttcttgcacgagtatgcccttgctgtgagaatgctgtaaaatttgtggttctagcagcacgtgcggtgaggggtggacatctattttggtagaagcctgttgtttgccattttgccaacaggtataggacatctgttttgttagaagcatgttgtttgacatttcgccatagatataggacatcaattttgttagaaccctgtcgttaattcttggcatgtaattttaggtctgtacattggagtacgggacaaccaaacccttggtttagacaactgttttagctcaattgctgcagatacttgagttttgttggcctgatttagtttatttattctacaagcagtagtgagtggtcacagtcctagttgtggt

SEQ ID NO: 21510 - DNA, 5318 bp, Zea Mays
atgcggcggtgctatgcagtgcgtgcttgcaaggaatctcataccttctcgctggatggctgctggtctgtgccacactgggaagtccgtgaagctgaggtacctcagaggacagaacttgtgccttggagggcgggacaagtgccccgagggccggaagagttgcctgagggtctatgtaggagttgccccgagggtcgacggaagaggtgccttgaggggcggaacaagtgcctcggggggcgaaacgcgaaacaagtgctctggaggtctgaagagttgcctcgagggctgagagagttgtcacgagaggcggcacacgagggaaagccttggggtatggcgcctgctgatgaggatgcttggtggctccccacgtatggaactagaggtggaggcacgatggtggcagaggaaaatgagcttaaactggagagtagtaccatggaattctggaacttatcgcaggtgccagacagttctacaagttcctatgaagtgcaaacttctagattgttaagtcctattttccaggggcaagggcatttagatgcttccttaacttacctaacgggggcatctggaccaacaaaggtgctcaagcttgtgcaagaagttaatgtttgtagtaaggtgaaggcattctgggatgaaggattggagaactccaacgttatttacctgccctgggttcctggagttcaccaggaagttgaaatgatggcaattggagggtgtggtaagacgctggatgactacaagttattttcctctgatgaggatgttgcttctgtgtctgattcccgtatcgtgcgtgcaaaaaagcctggtcaagctgtcatccgagtagtttctgctttcgatttcttgaattttgatgaggtaattgttgaagtttccattccttcagtactgtctatcttgccaatctttcctgtggaggtgcctgttggaacacgacttcattctgctgcagtgttaaaaacatctgctggacacccattctcacaatgtacccattttaatgcttttataaggtggagtctactatccgaggatgaggcctttcacattcttaacaccgctgaggcctcaagcatcgacgacataaaacataattctggttattggggacaaaatggcaatccttgtgcctgggtctctctgagtgcatttgctgctggcagatcaacaatagttgcaacatttgctgttgattcagattcagatattgagacatttggtggacccatttctctggaggcaacttcaaaaatttctgcatattatcctcttgtagttctccaaggggggaatggaaatcattttggtgggtactggtttgacttatctggaattcatagtaggattaagaacatggataacaactctcccaaggagctgtacttagttcctggatcaacaatggatgtccttatcttcggaggacctgagcgttgggaccaagttattgattttgttgaaacagttgatgttattgatccatccaaaaatcatattattagttctaccgctgtgaagaaactatctagtggactatatcgagtatcttgcctaagcaaagtgagctataaattgctgttttcacgtgggaacatggttggtaaagatcatcctgtgcctgcaatttccaaatcagagttcactgttatttgtgacttcccatcagaaataacattgatagcaaatgaaaatgaaaaccgacttgatatattggaagctgctaggaaagctgaccgtggtccagatagattgcaagcatcacccattgtaatctccaacggaagaaatatacgtctagctgctgcgagtatacatgtaaatggaagatttttcgctaattcatcttctcttcgcttgaaatgggaagccactggatgtgaagggcttgcttactttgaagaaaccaaatctgttgaaatgcttgatgagtcagcttgggagagatctcttgtcctacagaattctacaggagtgtgcactgtacgtgctacagttgatgacttttctaccaaatatgctggccaaactcatgaggaagaatacacattccatagtctcacagatgctattcagttgcagattgtttcttctttaagagtcacccctgaatatgtcttattagttttccatcctgaagcacaggtttaggcgaagctataatcataatccaggatgttggcctttctccaagagcaactactcattctttggttagagttgcaaatgttgactggattaagataacagcagaagagcaaatcagtcttatggaaggaagcacaaaagatttccaaatattagctggcacccaagatggacaaatatttggtgattctcagttcaaatatatggacattgagttgcatcttgacgatgagattctggagcttattggtccaagcgaatcaatggatggacccgaattttcaattaaagctgcaaaaatcggcattacatctctatatgtcagtactaaacaaagctctggacacagagttttaagtcaggttgtcaaggtggaagtgtatggaccattgcaaatacatcctgagtatatttacctcactccaggcgcctcttttgtgctttctgttaaaggtggtccaaaaactggagtttccattgaatactcaagtctgaacatgggaattgtagaagttcaaaataccactgggaaactatctgcaaaatctgtggggaactctactgtacgtgctgctgttttagcaaatggaggtatcttagtctgtgaagcttttggaagagttgaagtggatatcccagtggctatgacattgaatactcaaagtgaacgtctttgtattggctgtagcatgccagtttatccatctctgcctaagggagatctattttccttctatgaaacttgccaaagttacagttggatgatagcagatgagaaggttgtgacattccaatcagctaaatcctggcgatacagacttgaccaaggactatattcagatggaaaaaagagtccatggttttccaatggcagcagcaaattttttatcagtcatatgcttggaaggtctgctggcaaaaccaaaatttccatttcagttgtttgtgatttcttgctacctggcacctctggatctgttgtatcatacaatgcctccaagatcattcttgtggttccagatcctccccttgcacttgcgctaccgatgacttggttattcccacccttctataccactatgagccttttgcctagatcagcaaattcccttggggaaccaaactcacttgacctggagagctccgttgggtattctctgctaaggggcaatggtaggataattgatggaagtaaaattcagactggagaaagcaatacagttgattgtattcaagcaaaagatcactcagctgggagaacggaaatagcagcatgtctacgagttgctcaggttgcacaagtgcgggtagctgctgcagaatcatcaatccagattgtctatctatctgtaaacgataaagttgaattggatataaaatatgctgatgaattaggttatattttcaacgaagctcatggagtagtccctgtaaagattgagacaaattatccagatgttgtttcggttctcatgccaagagattttaatggtacatatgacacacgtgaacgttttgttcttcaggcgagaagtcatggaacagctcttgtaaggctccacacaaacaatgtccctaacaaagtggatttcataatggtatccgtaggagcacaaatatatcctagggatgtgatccttcattctggccagcacctgaacttcactgttatcggagacagtatggacatgtgtggacatggtcactggttaagtagcaatgggaagatcgtccacatcaatcgggtaactggtgaagcacaagcacgtagtgaaggtgtagcggaagtaatcttcaaaggttcaaattttaagctgcaaacaactatcactgttctcaaggtgaaccagatagttgttgatgctcctgcggagacactgactaatgcagctggcctgccggatggatacatgttttctgtgagatttagtgattcaattgagcacagtattggatcctctgcgagcccaattaatgtcccctttgaatgcaaggttgacccttcttttgttggttcgtgcaaatctaaaggaagacccaaaggtgaccggatctgcacatgctctttttgtcaaagggttttacataaaagaacctgggaaattaaatctgactccaagttgcaatcatagtgtcattactatcgatggaaatactgatattgagttgttctggaatgctaaagatttactcagagtcagtcgtgttgacacaaatgagaacaatggtgttcttagtcgagttgtttaccgggttgaagcgctaaaaaggctatcgttctctgacaaggttactatcgttcttcctgccactggtcaaactgaagaagttgaagtcagctacgatacaggagaggaggcagagtcaccatcatcatggggcctaaccacaactgctgttatgctcacatgcatcattgtgacaatagtcactgttgcacttttcattaagttgctgcagagacctatcagacaggcaccatcagggagcatgacagcatccacaccagcacgagcaccagcagccgatcccgcagccatggctgatcctgcatccccggctaatggtcagttctctcctcgtacaccccagcctttcatggagtacgtgaggaggaccattgatgacacaccgtactataagcgtgatgccaggaggcgattcaacccgcagaacacctactgagcatgcgtggcagcgtgtagtgtggactggttggtctgttgtaacgttcctgatttaggtccgcagttggtttagaaccacagttgtagttcttgcacgagtatgcccttgctgtgagaatgctgtaaaatttgtggttctagcagcacgtgcggtgaggggtggacatctattttggtagaagcctgttgtttgccattttgccaacaggtataggacatctgttttgttagaagcatgttgtttgacatttcgccatagatataggacatcaattttgttagaaccctgtcgttaattcttggcatgtaattttaggtctgtacattggagtacgggacaaccaaacccttggtttagacaactgttttagctcaattgctgcagatacttgagttttgttggcctgatttagtttatttattctacaagcagtagtgagtggtcacagtcctagttgtggt

SEQ ID NO: 21511 - DNA, 2224 bp, Zea Mays
atgaccaagtttcagtttaatcttctcctccagcgggtcggcctgtccgcactctcccccgggatggaagatatcaactttgaagcttggtggagtagatcggctgaggttactcctaaggaccttagagatggccttaactctttggtggttcttggggcttggactatctggaggcaccgtaatgactgtgttttcaatggtgctcagccttctatagctagattgcttacctcagccagtgatgagttcaatatgtggtgttttgcgggggccaaaggaaattatgttatgcctaatgtttcctttgatgctgtgatcattattgttcaggttgcacaagtgcgggtagctgctgcagaatcatcaatccagattgtctatctatctgtaaacgataaagttgaattggatataaaatatgctgatgaattaggttatattttcaacgaagctcatggagtagtccctgtaaagattgagacaaattatccagatgttgtttcggttctcatgccaagagattttaatggtacatatgacacacgtgaacgttttgttcttcaggcgagaagtcatggaacagctcttgtaaggctccacacaaacaatgtccctaacaaagtggatttcataatggtatccgtaggagcacaaatatatcctagggatgtgatccttcattctggccagcacctgaacttcactgttatcggagacagtatggacatgtgtggacatggtcactggttaagtagcaatgggaagatcgtccacatcaatcgggtaactggtgaagcacaagcacgtagtgaaggtgtagcggaagtaatcttcaaaggttcaaattttaagctgcaaacaactatcactgttctcaaggtgaaccagatagttgttgatgctcctgcggagacactgactaatgcagctggcctgccggatggatacatgttttctgtgagatttagtgattcaattgagcacagtattggatcctctgcgagcccaattaatgtcccctttgaatgcaaggttgacccttcttttgttgggtttgttgagccatggactgagcatgccacaaagaaatcctactgcctgtttcatccatattcacctgcacaactgttgcccgtgaagttggaccctaatgaaggaactttacacattttagttcgtgcaaatctaaaggaagacccaaaggtgaccggatctgcacatgctctttttgtcaaagggttttacataaaagaacctgggaaattaaatctgactccaagttgcaatcatagtgtcattactatcgatggaaatactgatattgagttgttctggaatgctaaagatttactcagagtcagtcgtgttgacacaaatgagaacaatggtgttcttagtcgagttgtttaccgggttgaagcgctaaaaaggctatcgttctctgacaaggttactatcgttcttcctgccactggtcaaactgaagaagttgaagtcagctacgatacaggagaggaggcagagtcaccatcatcatggggcctaaccacaactgctgttatgctcacatgcatcattgtgacaatagtcactgttgcacttttcattaagttgctgcagagacctatcagacaggcaccatcagggagcatgacagcatccacaccagcacgagcaccagcagccgatcccgcagccatggctgatcctgcatccccggctaatggaggcgattcaacccgcagaacacctactgagcatgcgtggcagcgtgtagtgtggactggttggtctgttgtaacgttcctgatttaggtccgcagttggtttagaaccacagttgtagttcttgcacgagtatgcccttgctgtgagaatgctgtaaaatttgtggttctagcagcacgtgcggtgaggggtggacatctattttggtagaagcctgttgtttgccattttgccaacaggtataggacatctgttttgttagaagcatgttgtttgacatttcgccatagatataggacatcaattttgttagaaccctgtcgttaattcttggcatgtaattttaggtctgtacattggagtacgggacaaccaaacccttggtttagacaactgttttagctcaattgctgcagatacttgagttttgttggcctgatttagtttatttattctacaagcagtagtgagtggtcacagtcctagttgtggt

SEQ ID NO: 21512 - DNA, 1938 bp, Zea Mays
atgaccaagtttcagtttaatcttctcctccagcgggtcggcctgtccgcactctcccccgggatggaagatatcaactttgaagcttggtggagtagatcggctgaggttactcctaaggaccttagagatggccttaactctttggtggttcttggggcttggactatctggaggcaccgtaatgactgtgttttcaatggtgctcagccttctatagctagattgcttacctcagccagtgatgagttcaatatgtggtgttttgcgggggccaaaggaaattatgttatgcctaatgtttcctttgatgctgtgatcattattgttcaggttgcacaagtgcgggtagctgctgcagaatcatcaatccagattgtctatctatctgtaaacgataaagttgaattggatataaaatatgctgatgaattaggttatattttcaacgaagctcatggagtagtccctgtaaagattgagacaaattatccagatgttgtttcggttctcatgccaagagattttaatggtacatatgacacacgtgaacgttttgttcttcaggcgagaagtcatggaacagctcttgtaaggctccacacaaacaatgtccctaacaaagtggatttcataatggtatccgtaggagcacaaatatatcctagggatgtgatccttcattctggccagcacctgaacttcactgttatcggagacagtatggacatgtgtggacatggtcactggttaagtagcaatgggaagatcgtccacatcaatcgggtaactggtgaagcacaagcacgtagtgaaggtgtagcggaagtaatcttcaaaggttcaaattttaagctgcaaacaactatcactgttctcaaggtgaaccagatagttgttgatgctcctgcggagacactgactaatgcagctggcctgccggatggatacatgttttctgtgagatttagtgattcaattgagcacagtattggatcctctgcgagcccaattaatgtcccctttgaatgcaaggttgacccttcttttgttgggtttgttgagccatggactgagcatgccacaaagaaatcctactgcctgtttcatccatattcacctgcacaactgttgcccgtgaagttggaccctaatgaaggaactttacacattttagttcgtgcaaatctaaaggaagacccaaaggtgaccggatctgcacatgctctttttgtcaaagggttttacataaaagaacctgggaaattaaatctgactccaagttgcaatcatagtgtcattactatcgatggaaatactgatattgagttgttctggaatgctaaagatttactcagagtcagtcgtgttgacacaaatgagaacaatggtgttcttagtcgagttgtttaccgggttgaagcgctaaaaaggctatcgttctctgacaaggttactatcgttcttcctgccactggtatgctatttaatctgctttgtttaatacttgtagtaagctgatcacctacagttaatatctcttgtttggttcatcaaaatccaaatcattcatcatatgcagtatataattcgtttaatatcccagaggtaattgcaatactgtggaagttactatttgcgtattacccatgcacaggtcaaactgaagaagttgaagtcagctacgatacaggagaggaggcagagtcaccatcatcatggggcctaaccacaactgctgttatgctcacatgcatcattgtgacaatagtcactgttgcacttttcattaagttgctgcagagacctatcagacaggcaccatcagggagcatgacagcatccacaccagcacgagcaccagcagccgatcccgcagccatggctgatcctgcatccccggctaatgccattgaacacccggtttggaacgatgtg

SEQ ID NO: 21513 - DNA, 2453 bp, Zea Mays
ttgcttcccagttcccaccccgtggtgccaagctcgcggagccggcgacgcagcaagggatacggtaccctcccgtccacgcgacgacaggacagacacccaccccatcaccggaagcaccgccaaagcccaaagccggccaattccgacgccatggccgacgtcgacgacgacgctgtcctctccgacgtcgacgaggacccactcccgcccccctccacctcttccgcctcttcccacaaatcccttccacaagctcaaccccaatcacagtccgatgcccaggcgcagcagcagcggctgctggacctggccgcggagctcgaggaggagcgccgcctccgccgcgcagccgaggcctccctcgcagaggccgagccccgcgtcgcccgcttcaaggccttcgcgcaggaagcgctccgcaagcgcgacgacctcaccgcccaagccgcggcctccgcgcggtccctcgccgcgctccaggccgaggccgccaccgcctcctccatgctctcctctggcttcgagaggatctccgccaaggcctccccttcctcgccccccgcaccgctcccgacctcccagaagtactcctccggcctcccggccctcgcgtacggcgttctcaagcgcgccaacgatatcgtcgacgaactcctcgcccagatcgacgccgctaaccgcgaccgcgatcgcgcgcgggagcagatggaacaccgcaactaccagatcgccatcgaggtctctgagcttgaggcatcgctcgcatccaggtctgccgagggcgaatccctctccaagtccctctcccagcgtgaagccgagatctccgagctccgtgataaaatcacctctctcgaggggaagctcgccgcgcagaggcccgtgctcgcggaacagatcgggtgcacctcgaagctgtatcacgagatgcgggaggtggtcaagctggtcgatgccgaagctgtcagtgccctatcggactcggtttttgtctggaaggagactgacgtcgaggagagcctcaaggtgtctctggaagggacgaaattggcctatgagcttgcggcaatagctctggagaaggttggggcttgtatcgatgacaaggagagcaagcttagacgtttggagaacatggtggatggactgattaaagagaaggagcacattagtgtactgctccggaacgcactgcaggccaccacaagtgaggtgttaaaggttgcagaggatggtctgagagaagctggcattgagattggacttaacgagcgaaaggagcacatgctagggagtgtggagaaggacgaggtttataccctggcaggggctcttgagaataccatgaaggagtctcaggtcaaaattattgagctccaacatcttgtcgaagcactaaggacatttgtattgagcttctttgcagcaaaagaaaaacatttggaattgggcggagtctggtttacttagaacaaggctagaagggcaagagaaggagattggtcagctaagaaagcaaataaaaaatcttgaagagaaggagaaggtggcaaatgaaagcgttgagggtctgatgatggacgtgacagctgctgaagaggagattaaacggtggaagatggcagcagaggaggaagctgaagctggtagatcaattgaacaagagttccaaattcagatatcatcccttcgcaaggagttggacgaagcaaaccgagctatggtggagctagaaaacaagctgaagttcaaggaagagacagctgctgctgcaatggcggcacgcgatgctgcagagaagtctctaaagctagcagatacgcgatcgtccaggctacgtgagaggctggaggagctcaacaagcagctcgaagaatcagatacgagaaccgagtcggtgaatcgcaatggccataggtacatgtgctggccatggcagtggctgggactgaactacgtgcagttacctctagcggagacagaccagacgtccaacgagatggagctatctgagcccctaataatataggtgctccgacctccatacttgtacagattacagatatatacagatcctgctctttcactagataagggggaacagtagttttttttttgggaggggggttgggttgatgggttcttgtgtagatgttttcgcaatttcttgatgcatgctttgcggaaaacgggcgggtgctggaaggcgccgtgtaattgtaaaaggtaccacttagtgaagatgctgagaagttcattctttgacaagattgttcttgaaacaagtctcgcttgatcttcattgtgataacaatgtgctacactgctactctacttagacggaggaacttgtttgtttaccctttagattatataataatccagtttaaataagtcgacagacaaacaacataggattcttgtttggctttttacctattaataattta

SEQ ID NO: 21514 - DNA, 1563 bp, Zea Mays
ctagaagaaaggactgttcaggctctcatacatgccagcgattcccctctgtcgattgtgctcgtcggagtaggcaacggaccatgggatgatctgttcatggatttcaccgagatcatgtcgagggaaacgtcacagggcgacaaggagggcaagttcacgttggaagcgctgatgaagataccggcccagcacgatgccataatcagccagaacatcagtgagctgatgacaagggcgccggctacaagagcagcttttcgtccaccgtgctgagccaacgctggcagcacggattagcatataatatttgctcgtagggttgttcataaacaccattctggaactaagaggaattcctgagaaaatgcggatgtggtctgtggtagcttggctgttcaatcccttcacattcaccattggtacaagaggaaactgtgaaccaatagtctgcgcagtcatactctggattctcatatgtttgatgaagggtagagtgttgcaggcagctttctggtatgggtttattgtgcacttcagaatatacccaatcatatatgcaattccttttgtaatagttcttggcaagggctatgctggtcctgttggtaggcctactcttacgatgtggaggtccaaacaacagttgcaagatgataaagtcagtcaaatagaagaaccaacatcatttctggccactgtatggggttttctttcaaacttcataagcagaaatgggatcctgtttggattactctctggatccatgttctttgcctggaccggtgttttcttctatctgtatgggtgggacttcctaaatgaagcattactttatcaccttactcgtaccgacccaaggcacaatttctcgatatatttctaccacatatatctacaccatcagcaagggttctcaagtattcagaggctcgcttcgtttcttcctcaactgatcgtgcaactggcactcattctacgcttctctagggatcttccattctgcatgtttctccagacggttgcatttgttgcttttaacaaggtgatgacagcacagtacttcgtgtggttcttctgcttgttgcccctcattctcccttggagcagcatgaaacttaagtggaagggtctggcctgcgcggtagtgtggatggggtcccaactgcattggctcatgtgggcttacctgctggaattcgagggccgaaacgtttttgtgcagctctgggttgcaggcctcatgtttctggctgcgaacacctttgttatgctcatggtgatgaagcaccacaagtacactctgctcttctcaacgccgctgaagtctggcaacaaggttgctaccaagaaggaagaatagcagcgtttgggctctttccattttgccgactgatgtatgattaggacatggatcatgtttgtttctctttttttttgtgtttctgtcagatcacatgtgacttgaatcattgtagtttttcccgtacataatgtggtgacattgcatgagaatattttttggttaccagaatttgcaattggttcagattttattacctg

SEQ ID NO: 21515 - DNA, 1748 bp, Zea Mays
aaagtgcgcctctttgaccaccaaagttctagcagaaattactcaactgcccagcgcatctcacgacccggcctcgcagctccggcgacgatccctccaatggcctacgccgccgccgttactctccggcgcgtggtgcttgtgtccgctgcgctgcggctcgcactagtggtgttcggggagtggcaggatgcccaccttgaggtgcgctataccgatgtcgactacctcgtcttctccgacgccgctgcctctctggccacaggcggttccccgttcgcccgcgcaacctaccgctactctccaatcctggccttcctgcttgtcccgaactcactcctccatgctgcctggggcaagctcctcttctctgccgcagatttgctcgtagggttgttcataaacaccattctggaactaagaggaattcctgagaaaatgcggatgtggtctgtggtagcttggctgttcaatcccttcacattcaccattggtacaagaggaaactgtgaaccaatagtctgcgcagtcatactctggattctcatatgtttgatgaagggtacccaatgccagaggctgcaaaacaagtcgggtctggggaagggataagctgatgcaagcctttccccgcaaatgcggagaagccgcttcgaacccgcaacctggtgactcagtagagtgttgcaggcagctttctggtatgggtttattgtgcacttcagaatatacccaatcatatatgcaattccttttgtaatagttcttggcaagggctatgctggtcctgttggtaggcctactcttacgatgtggaggtccaaacaacagttgcaagatgataaagtcagtcaaatagaagaaccaacatcatttctggccactgtatggggttttctttcaaacttcataagcagaaatgggatcctgtttggattactctctggatccatgttctttgcctggaccggtgttttcttctatctgtatgggtgggacttcctaaatgaagcattactttatcaccttactcgtaccgacccaaggcacaatttctcgatatatttctaccacatatatctacaccatcagcaagggttctcaagtattcagaggctcgcttcgtttcttcctcaactgatcgtgcaactggcactcattctacgcttctctagggatcttccattctgcatgtttctccagacggttgcatttgttgcttttaacaaggtgatgacagcacagtacttcgtgtggttcttctgcttgttgcccctcattctcccttggagcagcatgaaacttaagtggaagggtctggcctgcgcggtagtgtggatggggtcccaactgcattggctcatgtgggcttacctgctggaattcgagggccgaaacgtttttgtgcagctctgggttgcaggcctcatgtttctggctgcgaacacctttgttatgctcatggtgatgaagcaccacaagtacactctgctcttctcaacgccgctgaagtctggcaacaaggttgctaccaagaaggaagaatagcagcgtttgggctctttccattttgccgactgatgtatgattaggacatggatcatgtttgtttctctttttttttgtgtttctgtcagatcacatgtgacttgaatcattgtagtttttcccgtacataatgtggtgacattgcatgagaatattttttggttaccagaatttgcaattggttcagattttattacctg

SEQ ID NO: 21516 - DNA, 1817 bp, Zea Mays
aaagtgcgcctctttgaccaccaaagttctagcagaaattactcaactgcccagcgcatctcacgacccggcctcgcagctccggcgacgatccctccaatggcctacgccgccgccgttactctccggcgcgtggtgcttgtgtccgctgcgctgcggctcgcactagtggtgttcggggagtggcaggatgcccaccttgaggtgcgctataccgatgtcgactacctcgtcttctccgacgccgctgcctctctggccacaggcggttccccgttcgcccgcgcaacctaccgctactctccaatcctggccttcctgcttgtcccgaactcactcctccatgctgcctggggcaagctcctcttctctgccgcagatttgctcgtagggttgttcataaacaccattctggaactaagaggaattcctgagaaaatgcggatgtggtctgtggtagcttggctgttcaatcccttcacattcaccattggtacaagaggaaactgtgaaccaatagtctgcgcagtcatactctggattctcatatgtttgatgaagggtacccaatgccagaggctgcaaaacaagtcgggtctggggaagggataagctgatgcaagcctttccccgcaaatgcggagaagccgcttcgaacccgcaacctggtgactcagtgagacagttctcgacgttgcactaggcctgtccttcttgtttctccctgaagacgttactaattcatgtagagtgttgcaggcagctttctggtatgggtttattgtgcacttcagaatatacccaatcatatatgcaattccttttgtaatagttcttggcaagggctatgctggtcctgttggtaggcctactcttacgatgtggaggtccaaacaacagttgcaagatgataaagtcagtcaaatagaagaaccaacatcatttctggccactgtatggggttttctttcaaacttcataagcagaaatgggatcctgtttggattactctctggatccatgttctttgcctggaccggtgttttcttctatctgtatgggtgggacttcctaaatgaagcattactttatcaccttactcgtaccgacccaaggcacaatttctcgatatatttctaccacatatatctacaccatcagcaagggttctcaagtattcagaggctcgcttcgtttcttcctcaactgatcgtgcaactggcactcattctacgcttctctagggatcttccattctgcatgtttctccagacggttgcatttgttgcttttaacaaggtgatgacagcacagtacttcgtgtggttcttctgcttgttgcccctcattctcccttggagcagcatgaaacttaagtggaagggtctggcctgcgcggtagtgtggatggggtcccaactgcattggctcatgtgggcttacctgctggaattcgagggccgaaacgtttttgtgcagctctgggttgcaggcctcatgtttctggctgcgaacacctttgttatgctcatggtgatgaagcaccacaagtacactctgctcttctcaacgccgctgaagtctggcaacaaggttgctaccaagaaggaagaatagcagcgtttgggctctttccattttgccgactgatgtatgattaggacatggatcatgtttgtttctctttttttttgtgtttctgtcagatcacatgtgacttgaatcattgtagtttttcccgtacataatgtggtgacattgcatgagaatattttttggttaccagaatttgcaattggttcagattttattacctg

SEQ ID NO: 21517 - DNA, 1780 bp, Zea Mays
aaagtgcgcctctttgaccaccaaagttctagcagaaattactcaactgcccagcgcatctcacgacccggcctcgcagctccggcgacgatccctccaatggcctacgccgccgccgttactctccggcgcgtggtgcttgtgtccgctgcgctgcggctcgcactagtggtgttcggggagtggcaggatgcccaccttgaggtgcgctataccgatgtcgactacctcgtcttctccgacgccgctgcctctctggccacaggcggttccccgttcgcccgcgcaacctaccgctactctccaatcctggccttcctgcttgtcccgaactcactcctccatgctgcctggggcaagctcctcttctctgccgcagatttgctcgtagggttgttcataaacaccattctggaactaagaggaattcctgagaaaatgcggatgtggtctgtggtagcttggctgttcaatcccttcacattcaccattggtacaagaggaaactgtgaaccaatagtctgcgcagtcatactctggattctcatatgtttgatgaagggtggcagacccaatgccagaggctgcaaaacaagtcgggtctggggaagggataagctgatgcaagcctttccccgcaaatgcggagaagccgcttcgaacccgcaacctggtgactcagtgagacagttctcgacgttgcactaggtagagtgttgcaggcagctttctggtatgggtttattgtgcacttcagaatatacccaatcatatatgcaattccttttgtaatagttcttggcaagggctatgctggtcctgttggtaggcctactcttacgatgtggaggtccaaacaacagttgcaagatgataaagtcagtcaaatagaagaaccaacatcatttctggccactgtatggggttttctttcaaacttcataagcagaaatgggatcctgtttggattactctctggatccatgttctttgcctggaccggtgttttcttctatctgtatgggtgggacttcctaaatgaagcattactttatcaccttactcgtaccgacccaaggcacaatttctcgatatatttctaccacatatatctacaccatcagcaagggttctcaagtattcagaggctcgcttcgtttcttcctcaactgatcgtgcaactggcactcattctacgcttctctagggatcttccattctgcatgtttctccagacggttgcatttgttgcttttaacaaggtgatgacagcacagtacttcgtgtggttcttctgcttgttgcccctcattctcccttggagcagcatgaaacttaagtggaagggtctggcctgcgcggtagtgtggatggggtcccaactgcattggctcatgtgggcttacctgctggaattcgagggccgaaacgtttttgtgcagctctgggttgcaggcctcatgtttctggctgcgaacacctttgttatgctcatggtgatgaagcaccacaagtacactctgctcttctcaacgccgctgaagtctggcaacaaggttgctaccaagaaggaagaatagcagcgtttgggctctttccattttgccgactgatgtatgattaggacatggatcatgtttgtttctctttttttttgtgtttctgtcagatcacatgtgacttgaatcattgtagtttttcccgtacataatgtggtgacattgcatgagaatattttttggttaccagaatttgcaattggttcagattttattacctg

SEQ ID NO: 21518 - DNA, 2793 bp, Zea Mays
aaagtgcgcctctttgaccaccaaagttctagcagaaattactcaactgcccagcgcatctcacgacccggcctcgcagctccggcgacgatccctccaatggcctacgccgccgccgttactctccggcgcgtggtgcttgtgtccgctgcgctgcggctcgcactagtggtgttcggggagtggcaggatgcccaccttgaggtgcgctataccgatgtcgactacctcgtcttctccgacgccgctgcctctctggccacaggcggttccccgttcgcccgcgcaacctaccgctactctccaatcctggccttcctgcttgtcccgaactcactcctccatgctgcctggggcaagctcctcttctctgccgcagatttgctcgtagggttgttcataaacaccattctggaactaagaggaattcctgagaaaatgcggatgtggtctgtggtagcttggctgttcaatcccttcacattcaccattggtacaagaggaaactgtgaaccaatagtctgcgcagtcatactctggattctcatatgtttgatgaagggtgtaagctctgaatctcttatgctgtttgttcagttattgctacctttgttaagttgctatggtggaatgtgataggaccattaaacatgttccaacttgtgctctcatgtactaatgtatgcttttgtaactgtgtgtttgtttttaattttttttttatttcaacatggggtatgcatattattgttctatacacagtatataattttttcatatccgtgattttttatgcaatgtctcagatatcttctgtttggttttgatagccaatattttatactacattgttagatcaacctcaccatatatgtagctgaattacaagccctcagtttgtcctgtgctaatagatctcttcacactcatgcatttgccaagttcagttttgctcatacaatgaaatacagtacacacttatgtactcatattcagtgaaatttgtagttagtgatttcttttggccttgaagtgtataaagtactagttatgccacttgttcaaacagatagtttatcagggcttgaccgctgaattttggaatatccatcttcttatatgcattgagtgtagttgtttctcattgaagggcagacccaatgccagaggctgcaaaacaagtcgggtctggggaagggataagctgatgcaagcctttccccgcaaatgcggagaagccgcttcgaacccgcaacctggtgactcagtgagacagttctcgacgttgcactaggcctgtccttcttgtttctccctgaagacgttactaattcatgttcggctttttttgctgtgttcattaaggtctttttttgaatggatgaaatccctggcccatccatgtggatggccccagtttaggccgtgccaaactcatccaaaggtgtctgttgctatttagttcatgaagtcaaatgttaacattatttgaaccatatggtttgatttgtactacttgcttgttctgcaacctccccaccccaccccccatccccacccccacacccaccccgacccaccccccaaaaaagcttatgtcatttactttgcagttgcatgaggacattgttattcatcttatgtctaggaagaaagattgcttttaaaaatttgctggatagattaacattggtatgttacagtttaagtgtcttttgcaggtagagtgttgcaggcagctttctggtatgggtttattgtgcacttcagaatatacccaatcatatatgcaattccttttgtaatagttcttggcaagggctatgctggtcctgttggtaggcctactcttacgatgtggaggtccaaacaacagttgcaagatgataaagtcagtcaaatagaagaaccaacatcatttctggccactgtatggggttttctttcaaacttcataagcagaaatgggatcctgtttggattactctctggatccatgttctttgcctggaccggtgttttcttctatctgtatgggtgggacttcctaaatgaagcattactttatcaccttactcgtaccgacccaaggcacaatttctcgatatatttctaccacatatatctacaccatcagcaagggttctcaagtattcagaggctcgcttcgtttcttcctcaactgatcgtgcaactggcactcattctacgcttctctagggatcttccattctgcatgtttctccagacggttgcatttgttgcttttaacaaggtgatgacagcacagtacttcgtgtggttcttctgcttgttgcccctcattctcccttggagcagcatgaaacttaagtggaagggtctggcctgcgcggtagtgtggatggggtcccaactgcattggctcatgtgggcttacctgctggaattcgagggccgaaacgtttttgtgcagctctgggttgcaggcctcatgtttctggctgcgaacacctttgttatgctcatggtgatgaagcaccacaagtacactctgctcttctcaacgccgctgaagtctggcaacaaggttgctaccaagaaggaagaatagcagcgtttgggctctttccattttgccgactgatgtatgattaggacatggatcatgtttgtttctctttttttttgtgtttctgtcagatcacatgtgacttgaatcattgtagtttttcccgtacataatgtggtgacattgcatgagaatattttttggttaccagaatttgcaattggttcagattttattacctg

SEQ ID NO: 21519 - DNA, 2202 bp, Zea Mays
aaagtgcgcctctttgaccaccaaagttctagcagaaattactcaactgcccagcgcatctcacgacccggcctcgcagctccggcgacgatccctccaatggcctacgccgccgccgttactctccggcgcgtggtgcttgtgtccgctgcgctgcggctcgcactagtggtgttcggggagtggcaggatgcccaccttgaggtgcgctataccgatgtcgactacctcgtcttctccgacgccgctgcctctctggccacaggcggttccccgttcgcccgcgcaacctaccgctactctccaatcctggccttcctgcttgtcccgaactcactcctccatgctgcctggggcaagctcctcttctctgccgcagatttgctcgtagggttgttcataaacaccattctggaactaagaggaattcctgagaaaatgcggatgtggtctgtggtagcttggctgttcaatcccttcacattcaccattggtacaagaggaaactgtgaaccaatagtctgcgcagtcatactctggattctcatatgtttgatgaagggtacccaatgccagaggctgcaaaacaagtcgggtctggggaagggataagctgatgcaagcctttccccgcaaatgcggagaagccgcttcgaacccgcaacctggtgactcagtgagacagttctcgacgttgcactaggcctgtccttcttgtttctccctgaagacgttactaattcatgttcggctttttttgctgtgttcattaaggtctttttttgaatggatgaaatccctggcccatccatgtggatggccccagtttaggccgtgccaaactcatccaaaggtgtctgttgctatttagttcatgaagtcaaatgttaacattatttgaaccatatggtttgatttgtactacttgcttgttctgcaacctccccaccccaccccccatccccacccccacacccaccccgacccaccccccaaaaaagcttatgtcatttactttgcagttgcatgaggacattgttattcatcttatgtctaggaagaaagattgcttttaaaaatttgctggatagattaacattggtatgttacagtttaagtgtcttttgcaggtagagtgttgcaggcagctttctggtatgggtttattgtgcacttcagaatatacccaatcatatatgcaattccttttgtaatagttcttggcaagggctatgctggtcctgttggtaggcctactcttacgatgtggaggtccaaacaacagttgcaagatgataaagtcagtcaaatagaagaaccaacatcatttctggccactgtatggggttttctttcaaacttcataagcagaaatgggatcctgtttggattactctctggatccatgttctttgcctggaccggtgttttcttctatctgtatgggtgggacttcctaaatgaagcattactttatcaccttactcgtaccgacccaaggcacaatttctcgatatatttctaccacatatatctacaccatcagcaagggttctcaagtattcagaggctcgcttcgtttcttcctcaactgatcgtgcaactggcactcattctacgcttctctagggatcttccattctgcatgtttctccagacggttgcatttgttgcttttaacaaggtgatgacagcacagtacttcgtgtggttcttctgcttgttgcccctcattctcccttggagcagcatgaaacttaagtggaagggtctggcctgcgcggtagtgtggatggggtcccaactgcattggctcatgtgggcttacctgctggaattcgagggccgaaacgtttttgtgcagctctgggttgcaggcctcatgtttctggctgcgaacacctttgttatgctcatggtgatgaagcaccacaagtacactctgctcttctcaacgccgctgaagtctggcaacaaggttgctaccaagaaggaagaatagcagcgtttgggctctttccattttgccgactgatgtatgattaggacatggatcatgtttgtttctctttttttttgtgtttctgtcagatcacatgtgacttgaatcattgtagtttttcccgtacataatgtggtgacattgcatgagaatattttttggttaccagaatttgcaattggttcagattttattacctg

SEQ ID NO: 21520 - DNA, 3631 bp, Zea Mays
ctaaccatttcactgctccacgctccagcgaaggcacacaaccgctgccgtttcttcatctcccaatcttcatcttcctcgcagcgtcccttgctcgcgttcggcacataggcgacggcggcggcgctcaggatcgggctctcggcgacggcgctcagggtcgggctcttagcgacggcgtcagcggcttcccctcccgcctcccgagcatgaatcactgacttgtgaaccattacctttatgggaaaagaaaaactccataagcagccctctggccgtctgattgaatctctcaaaatggagaggatgaggaacatcctgactcatagatatccatatccgcatgaacactcaagacattttatcattgctgtgtttgcttgttggcttttcttcatttcctcggataatttgcaaaaccttataatgaagttggacaagaattttaaatggtggtccatgtatgcttgtttgattggcttcttctatttcttctcatcgccttttatcaggaagaccatcaaaccaaactattcgaacttcaatcgatggtatattgcatggatattcttggcagcactataccatctgcccagttttcagtcaatgggcttggatttgcggatgaatctttccctcttcctcaccatttatatttcttctctaattttcttgatggtcttccatatcatatttcttggcctttggtatttgggttttgtttctcgtatggcagagaaaaaaccagagatgcttactataatacaaaactgtgcagttataagcatagcttgctgtgtgttttacagccactgtggtaacaggactgtttcaagagacaaatctattgatcgtagaactgctagctggattgtattctcactttggacaaagcatgatgacaacacactgatttcaaggctattgcgtatgcataaatttaaagaacagatttgctcctcctggtttgctccagttggttctgctagtgattaccctcttctctctaaatgggccatttatggagaattgtcttcaaatggatcaggttcctccaatgaaatttcaccagtctactctttgtgggctacattcatgggtctttacattgccaattatgtcatagagcgttcaacgggatgggttttaactcatcctttgacaatttcggagtatgagaaattgaagaaacagttgaaaccagattttgaggacatggttccctggtactctgggacatcaactgatttatttaaaactgtctttgacctcatgatatctgtgactctgtttgttggtcgatttgacatgcgtatgatgcaggctgctatgaataaaactcctgatgaagctaacagccatgaccttttgtatgatcatcttgatggaaaagatgagctttggtttgacttcattgcagatactggtgatggtggcaactctacatatgctgtagcacgattacttgctcaacccttgttagttataaactctgatgactcgaggctaacatttcctcgtgggcaactgcttctcgttggtggtgaccttgcgtatcccaatccatcctcattttcgtatgaacgacgttttttctgtccttttgagtacgctctccagcctcctgcttggtataagcctgaacatatagcactggagaagcctgaacttccccttggggtttctgagcttaggcggtacagaggaccacagtgtttcatgatacccggaaaccatgattggttcgatggattaaacacattcataaggtatatctgtcataagagttgggtgggtgggtggttcctacctcagaagaagagttattttgcattgaagcttcccaatggatggtgggtttttggtcttgaccaagctcttcatggtgacattgatgtttaccagttcaagttttttgctgagttgtgtcaacagaaggtcggagaaagtgattccgtaattattataactcatgaaccaaactggctccttgattggtattggggtgatagcactggcacaaatgttgcatatttgatacgggagtaccttaggggaagatgcaaactgcggatggctggggacctgcaccattatatgcgacattcttgcattgagtcaaaagaaccagttcatgtacaacacttactcgtaaatggctgtggtggggcctttttgcatccaacacatgtcttcgaaaacttcagggtattttatgggaacaagtatgaaacaaaatctacatatccttcttaccacgattctagcaagattgcacttggtaatattttgaagttccgaaggaaaaattggcaatttgatgtaattggtggttttgtgtactttgtcttggttttctcaatgtttccacagtgtgactcatttcacatcttacatgaagactcctgggctggtcgtatcaatggtttcttcactgcaatgtggaatgctgtttttgagattctagagagatcttatgtgtccctaggtggtgttgttactctattgatgtgctactgatgctacttatggaattagctattgaaatctgcattcggaaccatctattagcaacatcaggttaccataccctttatgaatggtaccgaaaagtggaaagcgaacattttcctgatcccacaggacttcgcgctcgtctcgagcattggacctttggactttaccctgcatgtattaagtacctcatgtctgcattcgacatcccagaggttatggcagtaactagaagtacaatctgcaaaaaaggaatagagtcccttcccaggggaggtgccatcatctattatgtctgtgttttcctgtacttctgggtcttgtcaacacctgtcgtatcgctggtgtttgggagctacttatatttatgcataaactggttccatatccatttcgatgaggccttctcctcgctgcgcatagcaaactataaggcattcacacggctccacatcaagaaaaacggagaccttgaggtcttcaccctggctgtggacaaggtgccaaaggattggatgctggatccagactgggacatggaacccaagcagccattccagatgagctacaccaggaaattcccaagcaaatggagggctgcgtcgggccttgacccaatcaatgctgtgcgcattgttgaccggtttgtcatcccgcgaacgccctcaagtcctacaacaccaggaggctctgtttcaagtcctacaacaccaggaggctccgtttcaagtcctacaacaccaggaggctttatgagatgatgttcatgctgctgtgaaatataatgtaatgtacacaaggatatcttcgacttctcgggagaaattgtacagtacacaaggtcctctaacataccacgggagaaatagttgggaaaaaaaatagagggcaaatctccacaagatccaaatgttgtacatctggtgttatatcagttgtcctgatcaggtgtaatgataagtttttcaaacttagggtgtgattggtaggctgaatccggccctgcctggttgcatggatgcagcctgaacatgtttggttggttggctctgtgttgggccaagtactggagatacatttcctggccttgggcctgggaatttgtctccaccattgc

SEQ ID NO: 21521 - DNA, 3719 bp, Zea Mays
cactgctccacgctccagcgaaggcacacaaccgctgccgtttcttcatctcccaatcttcatcttcctcgcagcgtcccttgctcgcgttcggcacataggcgacggcggcggcgctcaggatcgggctctcggcgacggcgctcagggtcgggctcttagcgacggcgtcagcggcttcccctcccgcctcccgagcatgaatcactgacttgtgaaccattacctttatgggaaaagaaaaactccataagcagccctctggccgtctgattgaatctctcaaaatggagaggatgaggaacatcctgactcatagatatccatatccgcatgaacactcaagacattttatcattgctgtgtttgcttgttggcttttcttcatttcctcggataatttgcaaaaccttataatgaagttggacaagaattttaaatggtggtccatgtatgcttgtttgattggcttcttctatttcttctcatcgccttttatcaggaagaccatcaaaccaaactattcgaacttcaatcgatggtatattgcatggatattcttggcagcactataccatctgcccagttttcagtcaatgggcttggatttgcggatgaatctttccctcttcctcaccatttatatttcttctctaattttcttgatggtcttccatatcatatttcttggcctttggtatttgggttttgtttctcgtatggcagagaaaaaaccagagatgcttactataatacaaaactgtgcagttataagcatagcttgctgtgtgttttacagccactgtggtaacaggactgtttcaagagacaaatctattgatcgtagaactgctagctggattgtattctcactttggacaaagcatgatgacaacacactgatttcaaggctattgcgtatgcataaatttaaagaacagatttgctcctcctggtttgctccagttggttctgctagtgattaccctcttctctctaaatgggccatttatggagaattgtcttcaaatggatcaggttcctccaatgaaatttcaccagtctactctttgtgggctacattcatgggtctttacattgccaattatgtcatagagcgttcaacgggatgggttttaactcatcctttgacaatttcggagtatgagaaattgaagaaacagttgaaaccagattttgaggacatggttccctggtactctgggacatcaactgatttatttaaaactgtctttgacctcatgatatctgtgactctgtttgttggtcgatttgacatgcgtatgatgcaggctgctatgaataaaactcctgatgaagctaacagccatgaccttttgtatgatcatcttgatggaaaagatgagctttggtttgacttcattgcagatactggtgatggtggcaactctacatatgctgtagcacgattacttgctcaacccttgttagttataaactctgatgactcgaggctaacatttcctcgtgggcaactgcttctcgttggtggtgaccttgcgtatcccaatccatcctcattttcgtatgaacgacgttttttctgtccttttgagtacgctctccagcctcctgcttggtataagcctgaacatatagcactggagaagcctgaacttccccttggggtttctgagcttaggcggtacagaggaccacagtgtttcatgatacccggaaaccatgattggttcgatggattaaacacattcataaggtatatctgtcataagagttgggtgggtgggtggttcctacctcagaagaagagttattttgcattgaagcttcccaatggatggtgggtttttggtcttgaccaagctcttcatggtgacattgatgtttaccagttcaagttttttgctgagttgtgtcaacagaagtatgcaggtcggagaaagtgattccgtaattattataactcatgaaccaaactggctccttgattggtattggggtgatagcactggcacaaatgttgcatatttgatacgggagtaccttaggggaagatgcaaactgcggatggctggggacctgcaccattatatgcgacattcttgcattgagtcaaaagaaccagttcatgtacaacacttactcgtaaatggctgtggtggggcctttttgcatccaacacatgtcttcgaaaacttcagggtattttatgggaacaagtatgaaacaaaatctacatatccttcttaccacgattctagcaagattgcacttggtaatattttgaagttccgaaggaaaaattggcaatttgatgtaattggtggttttgtgtactttgtcttggttttctcaatgtttccacagtgtgactcatttcacatcttacatgaagactcctgggctggtcgtatcaatggtttcttcactgcaatgtggaatgctgtttttgagattctagagagatcttatgtgtccctaggtggtgttgttactctattgatggtatcgtttttctttgtacccacgaaactgtcccgtaggagacgtgttttgcttggttttcttcatgccgctgctcatcttacttcggcagtgctactgatgctacttatggaattagctattgaaatctgcattcggaaccatctattagcaacatcaggttaccataccctttatgaatggtaccgaaaagtggaaagcgaacattttcctgatcccacaggacttcgcgctcgtctcgagcattggacctttggactttaccctgcatgtattaagtacctcatgtctgcattcgacatcccagaggttatggcagtaactagaagtacaatctgcaaaaaaggaatagagtcccttcccaggggaggtgccatcatctattatgtctgtgttttcctgtacttctgggtcttgtcaacacctgtcgtatcgctggtgtttgggagctacttatatttatgcataaactggttccatatccatttcgatgaggccttctcctcgctgcgcatagcaaactataaggcattcacacggctccacatcaagaaaaacggagaccttgaggtcttcaccctggctgtggacaaggtgccaaaggattggatgctggatccagactgggacatggaacccaagcagccattccagatgagctacaccaggaaattcccaagcaaatggagggctgcgtcgggccttgacccaatcaatgctgtgcgcattgttgaccggtttgtcatcccgcgaacgccctcaagtcctacaacaccaggaggctctgtttcaagtcctacaacaccaggaggctccgtttcaagtcctacaacaccaggaggctttatgagatgatgttcatgctgctgtgaaatataatgtaatgtacacaaggatatcttcgacttctcgggagaaattgtacagtacacaaggtcctctaacataccacgggagaaatagttgggaaaaaaaatagagggcaaatctccacaagatccaaatgttgtacatctggtgttatatcagttgtcctgatcaggtgtaatgataagtttttcaaacttagggtgtgattggtaggctgaatccggccctgcctggttgcatggatgcagcctgaacatgtttggttggttggctctgtgttgggccaagtactggagatacatttcctggccttgggcctgggaatttgtctccaccattgc

SEQ ID NO: 21522 - DNA, 3543 bp, Zea Mays
cactgctccacgctccagcgaaggcacacaaccgctgccgtttcttcatctcccaatcttcatcttcctcgcagcgtcccttgctcgcgttcggcacataggcgacggcggcggcgctcaggatcgggctctcggcgacggcgctcagggtcgggctcttagcgacggcgtcagcggcttcccctcccgcctcccgagcatgaatcactgacttgtgaaccattacctttatgggaaaagaaaaactccataagcagccctctggccgtctgattgaatctctcaaaatggagaggatgaggaacatcctgactcatagatatccatatccgcatgaacactcaagacattttatcattgctgtgtttgcttgttggcttttcttcatttcctcggataatttgcaaaaccttataatgaagttggacaagaattttaaatggtggtccatgtatgcttgtttgattggcttcttctatttcttctcatcgccttttatcaggaagaccatcaaaccaaactattcgaacttcaatcgatggtatattgcatggatattcttggcagcactataccatctgcccagttttcagtcaatgggcttggatttgcggatgaatctttccctcttcctcaccatttatatttcttctctaattttcttgatggtcttccatatcatatttcttggcctttggtatttgggttttgtttctcgtatggcagagaaaaaaccagagatgcttactataatacaaaactgtgcagttataagcatagcttgctgtgtgttttacagccactgtggtaacaggactgtttcaagagacaaatctattgatcgtagaactgctagctggattgtattctcactttggacaaagcatgatgacaacacactgatttcaaggctattgcgtatgcataaatttaaagaacagatttgctcctcctggtttgctccagttggttctgctagtgattaccctcttctctctaaatgggccatttatggagaattgtcttcaaatggatcaggttcctccaatgaaatttcaccagtctactctttgtgggctacattcatgggtctttacattgccaattatgtcatagagcgttcaacgggatgggttttaactcatcctttgacaatttcggagtatgagaaattgaagaaacagttgaaaccagattttgaggacatggttccctggtactctgggacatcaactgatttatttaaaactgtctttgacctcatgatatctgtgactctgtttgttggtcgatttgacatgcgtatgatgcaggctgctatgaataaaactcctgatgaagctaacagccatgaccttttgtatgatcatcttgatggaaaagatgagctttggtttgacttcattgcagatactggtgatggtggcaactctacatatgctgtagcacgattacttgctcaacccttgttagttataaactctgatgactcgaggctaacatttcctcgtgggcaactgcttctcgttggtggtgaccttgcgtatcccaatccatcctcattttcgtatgaacgacgttttttctgtccttttgagtacgctctccagcctcctgcttggtataagcctgaacatatagcactggagaagcctgaacttccccttggggtttctgagcttaggcggtacagaggaccacagtgtttcatgatacccggaaaccatgattggttcgatggattaaacacattcataaggtatatctgtcataagagttgggtgggtgggtggttcctacctcagaagaagagttattttgcattgaagcttcccaatggatggtgggtttttggtcttgaccaagctcttcatggtgacattgatgtttaccagttcaagttttttgctgagttgtgtcaacagaagtatgcaggtcggagaaagtgattccgtaattattataactcatgaaccaaactggctccttgattggtattggggtgatagcactggcacaaatgttgcatatttgatacgggagtaccttaggggaagatgcaaactgcggatggctggggacctgcaccattatatgcgacattcttgcattgagtcaaaagaaccagttcatgtacaacacttactcgtaaatggctgtggtggggcctttttgcatccaacacatgtcttcgaaaacttcagggtattttatgggaacaagtatgaaacaaaatctacatatccttcttaccacgattctagcaagattgcacttggtaatattttgaagttccgaaggaaaaattggcaatttgatgtaattggtggttttgtgtactttgtcttggttttctcaatgtttccacaggagacgtgttttgcttggttttcttcatgccgctgctcatcttacttcggcagtgctactgatgctacttatggaattagctattgaaatctgcattcggaaccatctattagcaacatcaggttaccataccctttatgaatggtaccgaaaagtggaaagcgaacattttcctgatcccacaggacttcgcgctcgtctcgagcattggacctttggactttaccctgcatgtattaagtacctcatgtctgcattcgacatcccagaggttatggcagtaactagaagtacaatctgcaaaaaaggaatagagtcccttcccaggggaggtgccatcatctattatgtctgtgttttcctgtacttctgggtcttgtcaacacctgtcgtatcgctggtgtttgggagctacttatatttatgcataaactggttccatatccatttcgatgaggccttctcctcgctgcgcatagcaaactataaggcattcacacggctccacatcaagaaaaacggagaccttgaggtcttcaccctggctgtggacaaggtgccaaaggattggatgctggatccagactgggacatggaacccaagcagccattccagatgagctacaccaggaaattcccaagcaaatggagggctgcgtcgggccttgacccaatcaatgctgtgcgcattgttgaccggtttgtcatcccgcgaacgccctcaagtcctacaacaccaggaggctctgtttcaagtcctacaacaccaggaggctccgtttcaagtcctacaacaccaggaggctttatgagatgatgttcatgctgctgtgaaatataatgtaatgtacacaaggatatcttcgacttctcgggagaaattgtacagtacacaaggtcctctaacataccacgggagaaatagttgggaaaaaaaatagagggcaaatctccacaagatccaaatgttgtacatctggtgttatatcagttgtcctgatcaggtgtaatgataagtttttcaaacttagggtgtgattggtaggctgaatccggccctgcctggttgcatggatgcagcctgaacatgtttggttggttggctctgtgttgggccaagtactggagatacatttcctggccttgggcctgggaatttgtctccaccattgc

SEQ ID NO: 21523 - DNA, 3567 bp, Zea Mays
cactgctccacgctccagcgaaggcacacaaccgctgccgtttcttcatctcccaatcttcatcttcctcgcagcgtcccttgctcgcgttcggcacataggcgacggcggcggcgctcaggatcgggctctcggcgacggcgctcagggtcgggctcttagcgacggcgtcagcggcttcccctcccgcctcccgagcatgaatcactgacttgtgaaccattacctttatgggaaaagaaaaactccataagcagccctctggccgtctgattgaatctctcaaaatggagaggatgaggaacatcctgactcatagatatccatatccgcatgaacactcaagacattttatcattgctgtgtttgcttgttggcttttcttcatttcctcggataatttgcaaaaccttataatgaagttggacaagaattttaaatggtggtccatgtatgcttgtttgattggcttcttctatttcttctcatcgccttttatcaggaagaccatcaaaccaaactattcgaacttcaatcgatggtatattgcatggatattcttggcagcactataccatctgcccagttttcagtcaatgggcttggatttgcggatgaatctttccctcttcctcaccatttatatttcttctctaattttcttgatggtcttccatatcatatttcttggcctttggtatttgggttttgtttctcgtatggcagagaaaaaaccagagatgcttactataatacaaaactgtgcagttataagcatagcttgctgtgtgttttacagccactgtggtaacaggactgtttcaagagacaaatctattgatcgtagaactgctagctggattgtattctcactttggacaaagcatgatgacaacacactgatttcaaggctattgcgtatgcataaatttaaagaacagatttgctcctcctggtttgctccagttggttctgctagtgattaccctcttctctctaaatgggccatttatggagaagttagtatactgcaccttttgtttgtatttagatgattatctttgcttttccttgtaagtttattcttacatttgtctggttcagttgtcttcaaatggatcaggttcctccaatgaaatttcaccagtctactctttgtgggctacattcatgggtctttacattgccaattatgtcatagagcgttcaacgggatgggttttaactcatcctttgacaatttcggagtatgagaaattgaagaaacagttgaaaccagattttgaggacatggttccctggtactctgggacatcaactgatttatttaaaactgtctttgacctcatgatatctgtgactctgtttgttggtcgatttgacatgcgtatgatgcaggtatcccaatccatcctcattttcgtatgaacgacgttttttctgtccttttgagtacgctctccagcctcctgcttggtataagcctgaacatatagcactggagaagcctgaacttccccttggggtttctgagcttaggcggtacagaggaccacagtgtttcatgatacccggaaaccatgattggttcgatggattaaacacattcataaggtatatctgtcataagagttgggtgggtgggtggttcctacctcagaagaagagttattttgcattgaagcttcccaatggatggtgggtttttggtcttgaccaagctcttcatggtgacattgatgtttaccagttcaagttttttgctgagttgtgtcaacagaaggtcggagaaagtgattccgtaattattataactcatgaaccaaactggctccttgattggtattggggtgatagcactggcacaaatgttgcatatttgatacgggagtaccttaggggaagatgcaaactgcggatggctggggacctgcaccattatatgcgacattcttgcattgagtcaaaagaaccagttcatgtacaacacttactcgtaaatggctgtggtggggcctttttgcatccaacacatgtcttcgaaaacttcagggtattttatgggaacaagtatgaaacaaaatctacatatccttcttaccacgattctagcaagattgcacttggtaatattttgaagttccgaaggaaaaattggcaatttgatgtaattggtggttttgtgtactttgtcttggttttctcaatgtttccacagtgtgactcatttcacatcttacatgaagactcctgggctggtcgtatcaatggtttcttcactgcaatgtggaatgctgtttttgagattctagagagatcttatgtgtccctaggtggtgttgttactctattgatggtatcgtttttctttgtacccacgaaactgtcccgtaggagacgtgttttgcttggttttcttcatgccgctgctcatcttacttcggcagtgctactgatgctacttatggaattagctattgaaatctgcattcggaaccatctattagcaacatcaggttaccataccctttatgaatggtaccgaaaagtggaaagcgaacattttcctgatcccacaggacttcgcgctcgtctcgagcattggacctttggactttaccctgcatgtattaagtacctcatgtctgcattcgacatcccagaggttatggcagtaactagaagtacaatctgcaaaaaaggaatagagtcccttcccaggggaggtgccatcatctattatgtctgtgttttcctgtacttctgggtcttgtcaacacctgtcgtatcgctggtgtttgggagctacttatatttatgcataaactggttccatatccatttcgatgaggccttctcctcgctgcgcatagcaaactataaggcattcacacggctccacatcaagaaaaacggagaccttgaggtcttcaccctggctgtggacaaggtgccaaaggattggatgctggatccagactgggacatggaacccaagcagccattccagatgagctacaccaggaaattcccaagcaaatggagggctgcgtcgggccttgacccaatcaatgctgtgcgcattgttgaccggtttgtcatcccgcgaacgccctcaagtcctacaacaccaggaggctctgtttcaagtcctacaacaccaggaggctccgtttcaagtcctacaacaccaggaggctttatgagatgatgttcatgctgctgtgaaatataatgtaatgtacacaaggatatcttcgacttctcgggagaaattgtacagtacacaaggtcctctaacataccacgggagaaatagttgggaaaaaaaatagagggcaaatctccacaagatccaaatgttgtacatctggtgttatatcagttgtcctgatcaggtgtaatgataagtttttcaaacttagggtgtgattggtaggctgaatccggccctgcctggttgcatggatgcagcctgaacatgtttggttggttggctctgtgttgggccaagtactggagatacatttcctggccttgggcctgggaatttgtctccaccattgc

SEQ ID NO: 21524 - DNA, 3420 bp, Zea Mays
cactgctccacgctccagcgaaggcacacaaccgctgccgtttcttcatctcccaatcttcatcttcctcgcagcgtcccttgctcgcgttcggcacataggcgacggcggcggcgctcaggatcgggctctcggcgacggcgctcagggtcgggctcttagcgacggcgtcagcggcttcccctcccgcctcccgagcatgaatcactgacttgtgaaccattacctttatgggaaaagaaaaactccataagcagccctctggccgtctgattgaatctctcaaaatggagaggatgaggaacatcctgactcatagatatccatatccgcatgaacactcaagacattttatcattgctgtgtttgcttgttggcttttcttcatttcctcggataatttgcaaaaccttataatgaagttggacaagaattttaaatggtggtccatgtatgcttgtttgattggcttcttctatttcttctcatcgccttttatcaggaagaccatcaaaccaaactattcgaacttcaatcgatggtatattgcatggatattcttggcagcactataccatctgcccagttttcagtcaatgggcttggatttgcggatgaatctttccctcttcctcaccatttatatttcttctctaattttcttgatggtcttccatatcatatttcttggcctttggtatttgggttttgtttctcgtatggcagagaaaaaaccagagatgcttactataatacaaaactgtgcagttataagcatagcttgctgtgtgttttacagccactgtggtaacaggactgtttcaagagacaaatctattgatcgtagaactgctagctggattgtattctcactttggacaaagcatgatgacaacacactgatttcaaggctattgcgtatgcataaatttaaagaacagatttgctcctcctggtttgctccagttggttctgctagtgattaccctcttctctctaaatgggccatttatggagaattgtcttcaaatggatcaggttcctccaatgaaatttcaccagtctactctttgtgggctacattcatgggtctttacattgccaattatgtcatagagcgttcaacgggatgggttttaactcatcctttgacaatttcggagtatgagaaattgaagaaacagttgaaaccagattttgaggacatggttccctggtactctgggacatcaactgatttatttaaaactgtctttgacctcatgatatctgtgactctgtttgttggtcgatttgacatgcgtatgatgcaggctgctatgaataaaactcctgatgaagctaacagccatgaccttttgtatgatcatcttgatggaaaagatgagctttggtttgacttcattgcagatactggtgatggtggcaactctacatatgctgtagcacgattacttgctcaacccttgttagttataaactctgatgactcgaggctaacatttcctcgtgggcaactgcttctcgttggtggtgaccttgcgtatcccaatccatcctcattttcgtatgaacgacgttttttctgtccttttgagtacgctctccagcctcctgcttggtataagcctgaacatatagcactggagaagcctgaacttccccttggggtttctgagcttaggcggtacagaggaccacagtgtttcatgatacccggaaaccatgattggttcgatggattaaacacattcataaggtatatctgtcataagagttgggtgggtgggtggttcctacctcagaagaagagttattttgcattgaagcttcccaatggatggtgggtttttggtcttgaccaagctcttcatggtgacattgatgtttaccagttcaagttttttgctgagttgtgtcaacagaaggggaagatgcaaactgcggatggctggggacctgcaccattatatgcgacattcttgcattgagtcaaaagaaccagttcatgtacaacacttactcgtaaatggctgtggtggggcctttttgcatccaacacatgtcttcgaaaacttcagggtattttatgggaacaagtatgaaacaaaatctacatatccttcttaccacgattctagcaagattgcacttggtaatattttgaagttccgaaggaaaaattggcaatttgatgtaattggtggttttgtgtactttgtcttggttttctcaatgtttccacaggagacgtgttttgcttggttttcttcatgccgctgctcatcttacttcggcagtgctactgatgctacttatggaattagctattgaaatctgcattcggaaccatctattagcaacatcaggttaccataccctttatgaatggtaccgaaaagtggaaagcgaacattttcctgatcccacaggacttcgcgctcgtctcgagcattggacctttggactttaccctgcatgtattaagtacctcatgtctgcattcgacatcccagaggttatggcagtaactagaagtacaatctgcaaaaaaggaatagagtcccttcccaggggaggtgccatcatctattatgtctgtgttttcctgtacttctgggtcttgtcaacacctgtcgtatcgctggtgtttgggagctacttatatttatgcataaactggttccatatccatttcgatgaggccttctcctcgctgcgcatagcaaactataaggcattcacacggctccacatcaagaaaaacggagaccttgaggtcttcaccctggctgtggacaaggtgccaaaggattggatgctggatccagactgggacatggaacccaagcagccattccagatgagctacaccaggaaattcccaagcaaatggagggctgcgtcgggccttgacccaatcaatgctgtgcgcattgttgaccggtttgtcatcccgcgaacgccctcaagtcctacaacaccaggaggctctgtttcaagtcctacaacaccaggaggctccgtttcaagtcctacaacaccaggaggctttatgagatgatgttcatgctgctgtgaaatataatgtaatgtacacaaggatatcttcgacttctcgggagaaattgtacagtacacaaggtcctctaacataccacgggagaaatagttgggaaaaaaaatagagggcaaatctccacaagatccaaatgttgtacatctggtgttatatcagttgtcctgatcaggtgtaatgataagtttttcaaacttagggtgtgattggtaggctgaatccggccctgcctggttgcatggatgcagcctgaacatgtttggttggttggctctgtgttgggccaagtactggagatacatttcctggccttgggcctgggaatttgtctccaccattgc

SEQ ID NO: 21525 - DNA, 3659 bp, Zea Mays
cgaaggcacacaaccgctgccgtttcttcatctcccaatcttcatcttcctcgcagcgtcccttgctcgcgttcggcacataggcgacggcggcggcgctcaggatcgggctctcggcgacggcgctcagggtcgggctcttagcgacggcgtcagcggcttcccctcccgcctcccgttagtcgcctcgcgccctcgcctccggtcctccgcccacccgctggtgaccctgcgagcatgaatcactgacttgtgaaccattacctttatgggaaaagaaaaactccataagcagccctctggccgtctgattgaatctctcaaaatggagaggatgaggaacatcctgactcatagatatccatatccgcatgaacactcaagacattttatcattgctgtgtttgcttgttggcttttcttcatttcctcggataatttgcaaaaccttataatgaagttggacaagaattttaaatggtggtccatgtatgcttgtttgattggcttcttctatttcttctcatcgccttttatcaggaagaccatcaaaccaaactattcgaacttcaatcgatggtatattgcatggatattcttggcagcactataccatctgcccagttttcagtcaatgggcttggatttgcggatgaatctttccctcttcctcaccatttatatttcttctctaattttcttgatggtcttccatatcatatttcttggcctttggtatttgggttttgtttctcgtatggcagagaaaaaaccagagatgcttactataatacaaaactgtgcagttataagcatagcttgctgtgtgttttacagccactgtggtaacaggactgtttcaagagacaaatctattgatcgtagaactgctagctggattgtattctcactttggacaaagcatgatgacaacacactgatttcaaggctattgcgtatgcataaatttaaagaacagatttgctcctcctggtttgctccagttggttctgctagtgattaccctcttctctctaaatgggccatttatggagaattgtcttcaaatggatcaggttcctccaatgaaatttcaccagtctactctttgtgggctacattcatgggtctttacattgccaattatgtcatagagcgttcaacgggatgggttttaactcatcctttgacaatttcggagtatgagaaattgaagaaacagttgaaaccagattttgaggacatggttccctggtactctgggacatcaactgatttatttaaaactgtctttgacctcatgatatctgtgactctgtttgttggtcgatttgacatgcgtatgatgcaggctgctatgaataaaactcctgatgaagctaacagccatgaccttttgtatgatcatcttgatggaaaagatgagctttggtttgacttcattgcagatactggtgatggtggcaactctacatatgctgtagcacgattacttgctcaacccttgttagttataaactctgatgactcgaggctaacatttcctcgtgggcaactgcttctcgttggtggtgaccttgcgtatcccaatccatcctcattttcgtatgaacgacgttttttctgtccttttgagtacgctctccagcctcctgcttggtataagcctgaacatatagcactggagaagcctgaacttccccttggggtttctgagcttaggcggtacagaggaccacagtgtttcatgatacccggaaaccatgattggttcgatggattaaacacattcataaggtatatctgtcataagagttgggtgggtgggtggttcctacctcagaagaagagttattttgcattgaagcttcccaatggatggtgggtttttggtcttgaccaagctcttcatggtgacattgatgtttaccagttcaagttttttgctgagttgtgtcaacagaaggtcggagaaagtgattccgtaattattataactcatgaaccaaactggctccttgattggtattggggtgatagcactggcacaaatgttgcatatttgatacgggagtaccttaggggaagatgcaaactgcggatggctggggacctgcaccattatatgcgacattcttgcattgagtcaaaagaaccagttcatgtacaacacttactcgtaaatggctgtggtggggcctttttgcatccaacacatgtcttcgaaaacttcagggtattttatgggaacaagtatgaaacaaaatctacatatccttcttaccacgattctagcaagattgcacttggtaatattttgaagttccgaaggaaaaattggcaatttgatgtaattggtggttttgtgtactttgtcttggttttctcaatgtttccacagtgtgactcatttcacatcttacatgaagactcctgggctggtcgtatcaatggtttcttcactgcaatgtggaatgctgtttttgagattctagagagatcttatgtgtccctaggtggtgttgttactctattgatgtgctactgatgctacttatggaattagctattgaaatctgcattcggaaccatctattagcaacatcaggttaccataccctttatgaatggtaccgaaaagtggaaagcgaacattttcctgatcccacaggacttcgcgctcgtctcgagcattggacctttggactttaccctgcatgtattaagtacctcatgtctgcattcgacatcccagaggttatggcagtaactagaagtacaatctgcaaaaaaggaatagagtcccttcccaggggaggtgccatcatctattatgtctgtgttttcctgtacttctgggtcttgtcaacacctgtcgtatcgctggtgtttgggagctacttatatttatgcataaactggttccatatccatttcgatgaggccttctcctcgctgcgcatagcaaactataaggcattcacacggctccacatcaagaaaaacggagaccttgaggtcttcaccctggctgtggacaaggtgccaaaggattggatgctggatccagactgggacatggaacccaagcagccattccagatgagctacaccaggaaattcccaagcaaatggagggctgcgtcgggccttgacccaatcaatgctgtgcgcattgttgaccggtttgtcatcccgcgaacgccctcaagtcctacaacaccaggaggctctgtttcaagtcctacaacaccaggaggctccgtttcaagtcctacaacaccaggaggctttatgagatgatgttcatgctgctgtgaaatataatgtaatgtacacaaggatatcttcgacttctcgggagaaattgtacagtacacaaggtcctctaacataccacgggagaaatagttgggaaaaaaaatagagggcaaatctccacaagatccaaatgttgtacatctggtgttatatcagttgtcctgatcaggtgtaatgataagtttttcaaacttagggtgtgattggtaggctgaatccggccctgcctggttgcatggatgcagcctgaacatgtttggttggttggctctgtgttgggccaagtactggagatacatttcctggccttgggcctgggaatttgtctccaccattgc

SEQ ID NO: 21526 - DNA, 3632 bp, Zea Mays
cgtttcttcatctcccaatcttcatcttcctcgcagcgtcccttgctcgcgttcggcacataggcgacggcggcggcgctcaggatcgggctctcggcgacggcgctcagggtcgggctcttagcgacggcgtcagcggcttcccctcccgcctcccgagcatgaatcactgacttgtgaaccattacctttatgggaaaagaaaaactccataagcagccctctggccgtctgattgaatctctcaaaatggagaggatgaggaacatcctgactcatagatatccatatccgcatgaacactcaagacattttatcattgctgtgtttgcttgttggcttttcttcatttcctcggataatttgcaaaaccttataatgaagttggacaagaattttaaatggtggtccatgtatgcttgtttgattggcttcttctatttcttctcatcgccttttatcaggaagaccatcaaaccaaactattcgaacttcaatcgatggtatattgcatggatattcttggcagcactataccatctgcccagttttcagtcaatgggcttggatttgcggatgaatctttccctcttcctcaccatttatatttcttctctaattttcttgatggtcttccatatcatatttcttggcctttggtatttgggttttgtttctcgtatggcagagaaaaaaccagagatgcttactataatacaaaactgtgcagttataagcatagcttgctgtgtgttttacagccactgtggtaacaggactgtttcaagagacaaatctattgatcgtagaactgctagctggattgtattctcactttggacaaagcatgatgacaacacactgatttcaaggctattgcgtatgcataaatttaaagaacagatttgctcctcctggtttgctccagttggttctgctagtgattaccctcttctctctaaatgggccatttatggagaagttagtatactgcaccttttgtttgtatttagatgattatctttgcttttccttgtaagtttattcttacatttgtctggttcagttgtcttcaaatggatcaggttcctccaatgaaatttcaccagtctactctttgtgggctacattcatgggtctttacattgccaattatgtcatagagcgttcaacgggatgggttttaactcatcctttgacaatttcggagtatgagaaattgaagaaacagttgaaaccagattttgaggacatggttccctggtactctgggacatcaactgatttatttaaaactgtctttgacctcatgatatctgtgactctgtttgttggtcgatttgacatgcgtatgatgcaggctgctatgaataaaactcctgatgaagctaacagccatgaccttttgtatgatcatcttgatggaaaagatgagctttggtttgacttcattgcagatactggtatcccaatccatcctcattttcgtatgaacgacgttttttctgtccttttgagtacgctctccagcctcctgcttggtataagcctgaacatatagcactggagaagcctgaacttccccttggggtttctgagcttaggcggtacagaggaccacagtgtttcatgatacccggaaaccatgattggttcgatggattaaacacattcataaggtatatctgtcataagagttgggtgggtgggtggttcctacctcagaagaagagttattttgcattgaagcttcccaatggatggtgggtttttggtcttgaccaagctcttcatggtgacattgatgtttaccagttcaagttttttgctgagttgtgtcaacagaaggtcggagaaagtgattccgtaattattataactcatgaaccaaactggctccttgattggtattggggtgatagcactggcacaaatgttgcatatttgatacgggagtaccttaggggaagatgcaaactgcggatggctggggacctgcaccattatatgcgacattcttgcattgagtcaaaagaaccagttcatgtacaacacttactcgtaaatggctgtggtggggcctttttgcatccaacacatgtcttcgaaaacttcagggtattttatgggaacaagtatgaaacaaaatctacatatccttcttaccacgattctagcaagattgcacttggtaatattttgaagttccgaaggaaaaattggcaatttgatgtaattggtggttttgtgtactttgtcttggttttctcaatgtttccacagtgtgactcatttcacatcttacatgaagactcctgggctggtcgtatcaatggtttcttcactgcaatgtggaatgctgtttttgagattctagagagatcttatgtgtccctaggtggtgttgttactctattgatggtatcgtttttctttgtacccacgaaactgtcccgtaggagacgtgttttgcttggttttcttcatgccgctgctcatcttacttcggcagtgctactgatgctacttatggaattagctattgaaatctgcattcggaaccatctattagcaacatcaggttaccataccctttatgaatggtaccgaaaagtggaaagcgaacattttcctgatcccacaggacttcgcgctcgtctcgagcattggacctttggactttaccctgcatgtattaagtacctcatgtctgcattcgacatcccagaggttatggcagtaactagaagtacaatctgcaaaaaaggaatagagtcccttcccaggggaggtgccatcatctattatgtctgtgttttcctgtacttctgggtcttgtcaacacctgtcgtatcgctggtgtttgggagctacttatatttatgcataaactggttccatatccatttcgatgaggccttctcctcgctgcgcatagcaaactataaggcattcacacggctccacatcaagaaaaacggagaccttgaggtcttcaccctggctgtggacaaggtgccaaaggattggatgctggatccagactgggacatggaacccaagcagccattccagatgagctacaccaggaaattcccaagcaaatggagggctgcgtcgggccttgacccaatcaatgctgtgcgcattgttgaccggtttgtcatcccgcgaacgccctcaagtcctacaacaccaggaggctctgtttcaagtcctacaacaccaggaggctccgtttcaagtcctacaacaccaggaggctttatgagatgatgttcatgctgctgtgaaatataatgtaatgtacacaaggatatcttcgacttctcgggagaaattgtacagtacacaaggtcctctaacataccacgggagaaatagttgggaaaaaaaatagagggcaaatctccacaagatccaaatgttgtacatctggtgttatatcagttgtcctgatcaggtgtaatgataagtttttcaaacttagggtgtgattggtaggctgaatccggccctgcctggttgcatggatgcagcctgaacatgtttggttggttggctctgtgttgggccaagtactggagatacatttcctggccttgggcctgggaatttgtctccaccattgc

SEQ ID NO: 21527 - DNA, 3736 bp, Zea Mays
gtttcttcatctcccaatcttcatcttcctcgcagcgtcccttgctcgcgttcggcacataggcgacggcggcggcgctcaggatcgggctctcggcgacggcgctcagggtcgggctcttagcgacggcgtcagcggcttcccctcccgcctcccgttagtcgcctcgcgccctcgcctccggtcctccgcccacccgctggtgaccctgcgagcatgaatcactgacttgtgaaccattacctttatgggaaaagaaaaactccataagcagccctctggccgtctgattgaatctctcaaaatggagaggatgaggaacatcctgactcatagatatccatatccgcatgaacactcaagacattttatcattgctgtgtttgcttgttggcttttcttcatttcctcggataatttgcaaaaccttataatgaagttggacaagaattttaaatggtggtccatgtatgcttgtttgattggcttcttctatttcttctcatcgccttttatcaggaagaccatcaaaccaaactattcgaacttcaatcgatggtatattgcatggatattcttggcagcactataccatctgcccagttttcagtcaatgggcttggatttgcggatgaatctttccctcttcctcaccatttatatttcttctctaattttcttgatggtcttccatatcatatttcttggcctttggtatttgggttttgtttctcgtatggcagagaaaaaaccagagatgcttactataatacaaaactgtgcagttataagcatagcttgctgtgtgttttacagccactgtggtaacaggactgtttcaagagacaaatctattgatcgtagaactgctagctggattgtattctcactttggacaaagcatgatgacaacacactgatttcaaggctattgcgtatgcataaatttaaagaacagatttgctcctcctggtttgctccagttggttctgctagtgattaccctcttctctctaaatgggccatttatggagaattgtcttcaaatggatcaggttcctccaatgaaatttcaccagtctactctttgtgggctacattcatgggtctttacattgccaattatgtcatagagcgttcaacgggatgggttttaactcatcctttgacaatttcggagtatgagaaattgaagaaacagttgaaaccagattttgaggacatggttccctggtactctgggacatcaactgatttatttaaaactgtctttgacctcatgatatctgtgactctgtttgttggtcgatttgacatgcgtatgatgcaggctgctatgaataaaactcctgatgaagctaacagccatgaccttttgtatgatcatcttgatggaaaagatgagctttggtttgacttcattgcagatactggtgatggtggcaactctacatatgctgtagcacgattacttgctcaacccttgttagttataaactctgatgactcgaggctaacatttcctcgtgggcaactgcttctcgttggtggtgaccttgcgtatcccaatccatcctcattttcgtatgaacgacgttttttctgtccttttgagtacgctctccagcctcctgcttggtataagcctgaacatatagcactggagaagcctgaacttccccttggggtttctgagcttaggcggtacagaggaccacagtgtttcatgatacccggaaaccatgattggttcgatggattaaacacattcataaggtatatctgtcataagagttgggtgggtgggtggttcctacctcagaagaagagttattttgcattgaagcttcccaatggatggtgggtttttggtcttgaccaagctcttcatggtgacattgatgtttaccagttcaagttttttgctgagttgtgtcaacagaagtatgcaggtcggagaaagtgattccgtaattattataactcatgaaccaaactggctccttgattggtattggggtgatagcactggcacaaatgttgcatatttgatacgggagtaccttaggggaagatgcaaactgcggatggctggggacctgcaccattatatgcgacattcttgcattgagtcaaaagaaccagttcatgtacaacacttactcgtaaatggctgtggtggggcctttttgcatccaacacatgtcttcgaaaacttcagggtattttatgggaacaagtatgaaacaaaatctacatatccttcttaccacgattctagcaagattgcacttggtaatattttgaagttccgaaggaaaaattggcaatttgatgtaattggtggttttgtgtactttgtcttggttttctcaatgtttccacagtgtgactcatttcacatcttacatgaagactcctgggctggtcgtatcaatggtttcttcactgcaatgtggaatgctgtttttgagattctagagagatcttatgtgtccctaggtggtgttgttactctattgatggtatcgtttttctttgtacccacgaaactgtcccgtaggagacgtgttttgcttggttttcttcatgccgctgctcatcttacttcggcagtgctactgatgctacttatggaattagctattgaaatctgcattcggaaccatctattagcaacatcaggttaccataccctttatgaatggtaccgaaaagtggaaagcgaacattttcctgatcccacaggacttcgcgctcgtctcgagcattggacctttggactttaccctgcatgtattaagtacctcatgtctgcattcgacatcccagaggttatggcagtaactagaagtacaatctgcaaaaaaggaatagagtcccttcccaggggaggtgccatcatctattatgtctgtgttttcctgtacttctgggtcttgtcaacacctgtcgtatcgctggtgtttgggagctacttatatttatgcataaactggttccatatccatttcgatgaggccttctcctcgctgcgcatagcaaactataaggcattcacacggctccacatcaagaaaaacggagaccttgaggtcttcaccctggctgtggacaaggtgccaaaggattggatgctggatccagactgggacatggaacccaagcagccattccagatgagctacaccaggaaattcccaagcaaatggagggctgcgtcgggccttgacccaatcaatgctgtgcgcattgttgaccggtttgtcatcccgcgaacgccctcaagtcctacaacaccaggaggctctgtttcaagtcctacaacaccaggaggctccgtttcaagtcctacaacaccaggaggctttatgagatgatgttcatgctgctgtgaaatataatgtaatgtacacaaggatatcttcgacttctcgggagaaattgtacagtacacaaggtcctctaacataccacgggagaaatagttgggaaaaaaaatagagggcaaatctccacaagatccaaatgttgtacatctggtgttatatcagttgtcctgatcaggtgtaatgataagtttttcaaacttagggtgtgattggtaggctgaatccggccctgcctggttgcatggatgcagcctgaacatgtttggttggttggctctgtgttgggccaagtactggagatacatttcctggccttgggcctgggaatttgtctccaccattgc

SEQ ID NO: 21528 - DNA, 3553 bp, Zea Mays
gtttcttcatctcccaatcttcatcttcctcgcagcgtcccttgctcgcgttcggcacataggcgacggcggcggcgctcaggatcgggctctcggcgacggcgctcagggtcgggctcttagcgacggcgtcagcggcttcccctcccgcctcccgttagtcgcctcgcgccctcgcctccggtcctccgcccacccgctggtgaccctgcgagcatgaatcactgacttgtgaaccattacctttatgggaaaagaaaaactccataagcagccctctggccgtctgattgaatctctcaaaatggagaggatgaggaacatcctgactcatagatatccatatccgcatgaacactcaagacattttatcattgctgtgtttgcttgttggcttttcttcatttcctcggataatttgcaaaaccttataatgaagttggacaagaattttaaatggtggtccatgtatgcttgtttgattggcttcttctatttcttctcatcgccttttatcaggaagaccatcaaaccaaactattcgaacttcaatcgatggtatattgcatggatattcttggcagcactataccatctgcccagttttcagtcaatgggcttggatttgcggatgaatctttccctcttcctcaccatttatatttcttctctaattttcttgatggtcttccatatcatatttcttggcctttggtatttgggttttgtttctcgtatggcagagaaaaaaccagagatgcttactataatacaaaactgtgcagttataagcatagcttgctgtgtgttttacagccactgtggtaacaggactgtttcaagagacaaatctattgatcgtagaactgctagctggattgtattctcactttggacaaagcatgatgacaacacactgatttcaaggctattgcgtatgcataaatttaaagaacagatttgctcctcctggtttgctccagttggttctgctagtgattaccctcttctctctaaatgggccatttatggagaattgtcttcaaatggatcaggttcctccaatgaaatttcaccagtctactctttgtgggctacattcatgggtctttacattgccaattatgtcatagagcgttcaacgggatgggttttaactcatcctttgacaatttcggagtatgagaaattgaagaaacagttgaaaccagattttgaggacatggttccctggtactctgggacatcaactgatttatttaaaactgtctttgacctcatgatatctgtgactctgtttgttggtcgatttgacatgcgtatgatgcaggctgctatgaataaaactcctgatgaagctaacagccatgaccttttgtatgatcatcttgatggaaaagatgagctttggtttgacttcattgcagatactggtgatggtggcaactctacatatgctgtagcacgattacttgctcaacccttgttagttataaactctgatgactcgaggctaacatttcctcgtgggcaactgcttctcgttggtggtgaccttgcgtatcccaatccatcctcattttcgtatgaacgacgttttttctgtccttttgagtacgctctccagcctcctgcttggtataagcctgaacatatagcactggagaagcctgaacttccccttggggtttctgagcttaggcggtacagaggaccacagtgtttcatgatacccggaaaccatgattggttcgatggattaaacacattcataaggtatatctgtcataagagttgggtgggtgggtggttcctacctcagaagaagagttattttgcattgaagcttcccaatggatggtgggtttttggtcttgaccaagctcttcatggtgacattgatgtttaccagttcaagttttttgctgagttgtgtcaacagaaggtcggagaaagtgattccgtaattattataactcatgaaccaaactggctccttgattggtattggggtgatagcactggcacaaatgttgcatatttgatacgggagtaccttaggggaagatgcaaactgcggatggctggggacctgcaccattatatgcgacattcttgcattgagtcaaaagaaccagttcatgtacaacacttactcgtaaatggctgtggtggggcctttttgcatccaacacatgtcttcgaaaacttcagggtattttatgggaacaagtatgaaacaaaatctacatatccttcttaccacgattctagcaagattgcacttggtaatattttgaagttccgaaggaaaaattggcaatttgatgtaattggtggttttgtgtactttgtcttggttttctcaatgtttccacaggagacgtgttttgcttggttttcttcatgccgctgctcatcttacttcggcagtgctactgatgctacttatggaattagctattgaaatctgcattcggaaccatctattagcaacatcaggttaccataccctttatgaatggtaccgaaaagtggaaagcgaacattttcctgatcccacaggacttcgcgctcgtctcgagcattggacctttggactttaccctgcatgtattaagtacctcatgtctgcattcgacatcccagaggttatggcagtaactagaagtacaatctgcaaaaaaggaatagagtcccttcccaggggaggtgccatcatctattatgtctgtgttttcctgtacttctgggtcttgtcaacacctgtcgtatcgctggtgtttgggagctacttatatttatgcataaactggttccatatccatttcgatgaggccttctcctcgctgcgcatagcaaactataaggcattcacacggctccacatcaagaaaaacggagaccttgaggtcttcaccctggctgtggacaaggtgccaaaggattggatgctggatccagactgggacatggaacccaagcagccattccagatgagctacaccaggaaattcccaagcaaatggagggctgcgtcgggccttgacccaatcaatgctgtgcgcattgttgaccggtttgtcatcccgcgaacgccctcaagtcctacaacaccaggaggctctgtttcaagtcctacaacaccaggaggctccgtttcaagtcctacaacaccaggaggctttatgagatgatgttcatgctgctgtgaaatataatgtaatgtacacaaggatatcttcgacttctcgggagaaattgtacagtacacaaggtcctctaacataccacgggagaaatagttgggaaaaaaaatagagggcaaatctccacaagatccaaatgttgtacatctggtgttatatcagttgtcctgatcaggtgtaatgataagtttttcaaacttagggtgtgattggtaggctgaatccggccctgcctggttgcatggatgcagcctgaacatgtttggttggttggctctgtgttgggccaagtactggagatacatttcctggccttgggcctgggaatttgtctccaccattgc

SEQ ID NO: 21529 - DNA, 3447 bp, Zea Mays
gtgataaattacactaaatggttgcaggagcatgaatcactgacttgtgaaccattacctttatgggaaaagaaaaactccataagcagccctctggccgtctgattgaatctctcaaaatggagaggatgaggaacatcctgactcatagatatccatatccgcatgaacactcaagacattttatcattgctgtgtttgcttgttggcttttcttcatttcctcggataatttgcaaaaccttataatgaagttggacaagaattttaaatggtggtccatgtatgcttgtttgattggcttcttctatttcttctcatcgccttttatcaggaagaccatcaaaccaaactattcgaacttcaatcgatggtatattgcatggatattcttggcagcactataccatctgcccagttttcagtcaatgggcttggatttgcggatgaatctttccctcttcctcaccatttatatttcttctctaattttcttgatggtcttccatatcatatttcttggcctttggtatttgggttttgtttctcgtatggcagagaaaaaaccagagatgcttactataatacaaaactgtgcagttataagcatagcttgctgtgtgttttacagccactgtggtaacaggactgtttcaagagacaaatctattgatcgtagaactgctagctggattgtattctcactttggacaaagcatgatgacaacacactgatttcaaggctattgcgtatgcataaatttaaagaacagatttgctcctcctggtttgctccagttggttctgctagtgattaccctcttctctctaaatgggccatttatggagaattgtcttcaaatggatcaggttcctccaatgaaatttcaccagtctactctttgtgggctacattcatgggtctttacattgccaattatgtcatagagcgttcaacgggatgggttttaactcatcctttgacaatttcggagtatgagaaattgaagaaacagttgaaaccagattttgaggacatggttccctggtactctgggacatcaactgatttatttaaaactgtctttgacctcatgatatctgtgactctgtttgttggtcgatttgacatgcgtatgatgcagatactggtgatggtggcaactctacatatgctgtagcacgattacttgctcaacccttgttagttataaactctgatgactcgaggctaacatttcctcgtgggcaactgcttctcgttggtggtgaccttgcgtatcccaatccatcctcattttcgtatgaacgacgttttttctgtccttttgagtacgctctccagcctcctgcttggtataagcctgaacatatagcactggagaagcctgaacttccccttggggtttctgagcttaggcggtacagaggaccacagtgtttcatgatacccggaaaccatgattggttcgatggattaaacacattcataaggtatatctgtcataagagttgggtgggtgggtggttcctacctcagaagaagagttattttgcattgaagcttcccaatggatggtgggtttttggtcttgaccaagctcttcatggtgacattgatgtttaccagttcaagttttttgctgagttgtgtcaacagaaggtcggagaaagtgattccgtaattattataactcatgaaccaaactggctccttgattggtattggggtgatagcactggcacaaatgttgcatatttgatacgggagtaccttaggggaagatgcaaactgcggatggctggggacctgcaccattatatgcgacattcttgcattgagtcaaaagaaccagttcatgtacaacacttactcgtaaatggctgtggtggggcctttttgcatccaacacatgtcttcgaaaacttcagggtattttatgggaacaagtatgaaacaaaatctacatatccttcttaccacgattctagcaagattgcacttggtaatattttgaagttccgaaggaaaaattggcaatttgatgtaattggtggttttgtgtactttgtcttggttttctcaatgtttccacagtgtgactcatttcacatcttacatgaagactcctgggctggtcgtatcaatggtttcttcactgcaatgtggaatgctgtttttgagattctagagagatcttatgtgtccctaggtggtgttgttactctattgatggtatcgtttttctttgtacccacgaaactgtcccgtaggagacgtgttttgcttggttttcttcatgccgctgctcatcttacttcggcagtgctactgatgctacttatggaattagctattgaaatctgcattcggaaccatctattagcaacatcaggttaccataccctttatgaatggtaccgaaaagtggaaagcgaacattttcctgatcccacaggacttcgcgctcgtctcgagcattggacctttggactttaccctgcatgtattaagtacctcatgtctgcattcgacatcccagaggttatggcagtaactagaagtacaatctgcaaaaaaggaatagagtcccttcccaggggaggtgccatcatctattatgtctgtgttttcctgtacttctgggtcttgtcaacacctgtcgtatcgctggtgtttgggagctacttatatttatgcataaactggttccatatccatttcgatgaggccttctcctcgctgcgcatagcaaactataaggcattcacacggctccacatcaagaaaaacggagaccttgaggtcttcaccctggctgtggacaaggtgccaaaggattggatgctggatccagactgggacatggaacccaagcagccattccagatgagctacaccaggaaattcccaagcaaatggagggctgcgtcgggccttgacccaatcaatgctgtgcgcattgttgaccggtttgtcatcccgcgaacgccctcaagtcctacaacaccaggaggctctgtttcaagtcctacaacaccaggaggctccgtttcaagtcctacaacaccaggaggctttatgagatgatgttcatgctgctgtgaaatataatgtaatgtacacaaggatatcttcgacttctcgggagaaattgtacagtacacaaggtcctctaacataccacgggagaaatagttgggaaaaaaaatagagggcaaatctccacaagatccaaatgttgtacatctggtgttatatcagttgtcctgatcaggtgtaatgataagtttttcaaacttagggtgtgattggtaggctgaatccggccctgcctggttgcatggatgcagcctgaacatgtttggttggttggctctgtgttgggccaagtactggagatacatttcctggccttgggcctgggaatttgtctccaccattgc

SEQ ID NO: 21530 - DNA, 2794 bp, Zea Mays
atcaccttagttgatatgagcaactaactgcaaaattactctacggtgtaactatataatcgtagatgggttttaactcatcctttgacaatttcggagtatgagaaattgaagaaacagttgaaaccagattttgaggacatggttccctggtactctgggacatcaactgatttatttaaaactgtctttgacctcatgatatctgtgactctgtttgttggtcgatttgacatgcgtatgatgcaggtacatcactttttccctccgccatagtgcctttattgcatggtttctgcttgattccttatgcatttctttccgttataggcacataacagtactgatttatgtattgcactacaaagttattaacagtttttttactaaccttgaccaggctgctatgaataaaactcctgatgaagctaacagccatgaccttttgtatgatcatcttgatggaaaagatgagctttggtttgacttcattgcagatactggtgatggtggcaactctacatatgctgtagcacgattacttgctcaacccttgttagttataaactctgatgactcgaggctaacatttcctcgtgggcaactgcttctcgttggtggtgaccttgcgtatgtttcctgttgacgctgactactaaataaccaataaaaaatcatctagttcttggcaactcgtcatcccagctacagaagataccatgtattgctattgcccgtttcatcgttaatttgtttgcctatataatgggagttttccttgcttatattcacaggtatcccaatccatcctcattttcgtatgaacgacgttttttctgtccttttgagtacgctctccagcctcctgcttggtataagcctgaacatatagcactggagaagcctgaacttccccttggggtttctgagcttaggcggtacagaggaccacagtgtttcatgatacccggaaaccatgattggttcgatggattaaacacattcataaggtatatctgtcataagagttgggtgggtgggtggttcctacctcagaagaagagttattttgcattgaagcttcccaatggatggtgggtttttggtcttgaccaagctcttcatggtgacattgatgtttaccagttcaagttttttgctgagttgtgtcaacagaagtatgcaggtcggagaaagtgattccgtaattattataactcatgaaccaaactggctccttgattggtattggggtgatagcactggcacaaatgttgcatatttgatacgggagtaccttaggggaagatgcaaactgcggatggctggggacctgcaccattatatgcgacattcttgcattgagtcaaaagaaccagttcatgtacaacacttactcgtaaatggctgtggtggggcctttttgcatccaacacatgtcttcgaaaacttcagggtattttatgggaacaagtatgaaacaaaatctacatatccttcttaccacgattctagcaagattgcacttggtaatattttgaagttccgaaggaaaaattggcaatttgatgtaattggtggttttgtgtactttgtcttggttttctcaatgtttccacaggagacgtgttttgcttggttttcttcatgccgctgctcatcttacttcggcagtgctactgatgctacttatggaattagctattgaaatctgcattcggaaccatctattagcaacatcaggttaccataccctttatgaatggtaccgaaaagtggaaagcgaacattttcctgatcccacaggacttcgcgctcgtctcgagcattggacctttggactttaccctgcatgtattaagtacctcatgtctgcattcgacatcccagaggttatggcagtaactagaagtacaatctgcaaaaaaggaatagagtcccttcccaggggaggtgccatcatctattatgtctgtgttttcctgtacttctgggtcttgtcaacacctgtcgtatcgctggtgtttgggagctacttatatttatgcataaactggttccatatccatttcgatgaggccttctcctcgctgcgcatagcaaactataaggcattcacacggctccacatcaagaaaaacggagaccttgaggtcttcaccctggctgtggacaaggtgccaaaggattggatgctggatccagactgggacatggaacccaagcagccattccagatgagctacaccaggaaattcccaagcaaatggagggctgcgtcgggccttgacccaatcaatgctgtgcgcattgttgaccggtttgtcatcccgcgaacgccctcaagtcctacaacaccaggaggctctgtttcaagtcctacaacaccaggaggctccgtttcaagtcctacaacaccaggaggctttatgagatgatgttcatgctgctgtgaaatataatgtaatgtacacaaggatatcttcgacttctcgggagaaattgtacagtacacaaggtcctctaacataccacgggagaaatagttgggaaaaaaaatagagggcaaatctccacaagatccaaatgttgtacatctggtgttatatcagttgtcctgatcaggtgtaatgataagtttttcaaacttagggtgtgattggtaggctgaatccggccctgcctggttgcatggatgcagcctgaacatgtttggttggttggctctgtgttgggccaagtactggagatacatttcctggccttgggcctgggaatttgtctccaccattgc

SEQ ID NO: 21531 - DNA, 1124 bp, Zea Mays
agaagagcaatatgattcatgagtatcatgacccatcctatattctctggatagtgtaatacttgcaacagctgttaccataccctttatgaatggtaccgaaaagtggaaagcgaacattttcctgatcccacaggacttcgcgctcgtctcgagcattggacctttggactttaccctgcatgtattaagtacctcatgtctgcattcgacatcccagaggttatggcagtaactagaagtacaatctgcaaaaaaggaatagagtcccttcccaggggaggtgccatcatctattatgtctgtgttttcctgtacttctgggtcttgtcaacacctgtcgtatcgctggtgtttgggagctacttatatttatgcataaactggttccatatccatttcgatgaggccttctcctcgctgcgcatagcaaactataaggcattcacacggctccacatcaagaaaaacggagaccttgaggtcttcaccctggctgtggacaaggtgccaaaggattggatgctggatccagactgggacatggaacccaagcagccattccagatgagctacaccaggaaattcccaagcaaatggagggctgcgtcgggccttgacccaatcaatgctgtgcgcattgttgaccggtttgtcatcccgcgaacgccctcaagtcctacaacaccaggaggctctgtttcaagtcctacaacaccaggaggctccgtttcaagtcctacaacaccaggaggctttatgagatgatgttcatgctgctgtgaaatataatgtaatgtacacaaggatatcttcgacttctcgggagaaattgtacagtacacaaggtcctctaacataccacgggagaaatagttgggaaaaaaaatagagggcaaatctccacaagatccaaatgttgtacatctggtgttatatcagttgtcctgatcaggtgtaatgataagtttttcaaacttagggtgtgattggtaggctgaatccggccctgcctggttgcatggatgcagcctgaacatgtttggttggttggctctgtgttgggccaagtactggagatacatttcctggccttgggcctgggaatttgtctccaccattgc

SEQ ID NO: 21532 - DNA, 1902 bp, Zea Mays
cgcatcgcacgtcccaggggcgtcgggcttgggtgccacctccgacggacgccgacgcttttgcagctactcattgctactacacaggacagtactggggcgtataggaggatagggatgaactgcgtggcgtgatgaactgctcgtgctccagaagaagacgtgcctcgcgtgcccctggaatagccgtgaacagtgacgtttccaagtgcattccatctgcccaactcgcagcaagccgccgccaggtcgtcaagaagctgctggtcgtcggggtcccagaatgctccataattccaattgagggtgccagatcgagtgagaagttgcgcgtgtgaagccatcacaccaattaaagatcgagatcatccatggctagttctctacttcagcagctgctgtctctgctgctgctcctgctgccctctcctcttcgtctccgggagcatctatcaggaaaccatgctgtcagcgccaacaacttccaccccatctttctggggtggttcggtctgtggaagaacagttcggagctgctgtctcgtgactacgtgcagtgcttcgaggagcagatgagcctcgtctacgaccctgccatcaacgagtaccggaacctcgccggcgtcgagacgcgagtgcccaacttcggctccacaagagccttcagccacaagaaccccctcaagtcagactggtgcctcggaaagctgagagccgcactggaagacatgggataccgagacggagacaccatgttcggagccccctacgacttccgctacgcgccgccgtcccccggccagacgtccgaggtgtactcccgctacttcaaggagctgatggagctggtcgaggccgcgagcgagaggacccggaagaaggccgtcatcctcggccacagcttcggcggcatggtcgcgctcgagttcgtccggaacactccgccggcgtggcggcgcgagcacatcgagcgcctcgtcctggtcgcgccgacgctccccggcgggttcctggagccggtgcgcaacttcgcgtccgggacggacatcctctacgtgccagcgacgacgccgctggccacgcgagccatgtggaggagcttcgagagcgccatcgtgaacttcccgtcgccggccgtgttcgggcgcctgcaggcgccgctcgtggtcaccagggagcggaactactccgcgtccgcgcacgacatggagcgcttcctcgccgccgtcggctccggcgaggccgcggagcccttcaggagacgggccgtccccaagatgggcagcttcgcggcgccgatggtgcccatgacgtacatcagcggggtcggcaacaggacgccgctgcggctggtgttctggggcgaagacttcgacgcggccccggaggtggcggcgtacggggacggagatggcaagatcaatttgatcagcgtcttggcgtttgagaaggagatgcgtcggcagccggagcagaagaagcagttcaaatccatcaagatcaataaggcccagcattctacgatcgtcacggatgattttgccctgcacagggtcattcaagaaattgttgaggccaataatcagaagattccatcctaaattattcatgtcatgtatgcattaccgagctgtgggggccaatagtgggttgggaagtgatggtttagacatcggtcgtggtgtggtcgcaattcaatcgattagttatttgttaacgtcaattgcttgcctcatgaacttgctgtgataaggaaagaccacaattattttccgcttgtcgtgtgcgttgtaccgtataatgttaataaaaacaagagtaaaatatagtagcagtcatcaaacttatcacactgtgtcgcttcccaaacttagaaaatctagaaaaacaagtcatataact

SEQ ID NO: 21533 - DNA, 5266 bp, Zea Mays
atcgagcagaacgagaatgtacagcccctgcagcaaactgttacaaggaatattcacgagaaccgacattgcaaccacctgcgcatcaccagtgacttttatgacttgactacaagacagattgctcttgacgatgttgaacttgcacaatgggcatgtagcatttatgtgaagccacttgtctatacagctgcagtgaaaatggtggttgcaagggagctcacgcagttccacgccatcttcgtacgggcataggcagatacagcactcctgcgttaaaaatgagatgatcaaattgagtctggtagagtagcactctgactagtaataagagtgtaaaaatgcagggtaactcaagtgtatgtgactacagtactccgtattgactcaagtagcaaaaaacaggagctcaacataataactcttccccagaagataacaaaggtttaagccagcccaaaacattcagaattgaacatcacctccataaggactggtacctacacaaaaggtgaatggcacagtccaagatgcagtaattccaagttgccaactgaccagttgaatgctcacacatgagcaaatcggaaacattgatcttgcagacactgagaacactactgagcctatcattgattgagttcagctgcttgtcacatgtctacaagatttatgacaccgaacttgattgcttaaagaaaagcatgggttttgcccattgtgtacaattttggcatatttgttccgaaaaaatcatatagtagaggttgcatgccagcgagctggcacgagaatattacaattttattaattatttccatatcaccatattctatcatataaattgaccgttgccgtggaattcaaatgagactccctactctagaagtatgttgcaaacgtgcctggaaaaataaagcagtgtggttttggatctactgccatttttcttcatttgtacatactagtgataatggacattatattatatcctaaactaaatcatcactgtcaaaatttggaaagatctcactgttttgaaaggtcatagaaaggtaaaacgtttttataggaaaaggaatgatgaaagagaaatcactcaattacttccaaatatgcaatcttacatctgaaatcatatgcaggttactttttacttaatccaaaattggtaaaaatatcagaggtggtgtaagctcatttctcatagatgtagtttcccctttaaacttaaagttgaattttaaatctaaaagtaaaccatttggaatcaatgtatcaactttgtttaccattaatttggattcaagttgcagatatggaacttttcagacaagacagaacggatcgagttcagaacttctcagatatgcggaaacgtgtatgttgagttagatttgtggccatataagaaaggataagagaccaggatgatgctatacatgataagctagggataacaccaattgaaaaaaaaacttgttcaacatcgttaagatggcttagaaatgtccaacggagacctccaaaggcaccagtgcatagtgggatcataaggcacgatagcaataggaagagagacatgggaaggccgaaagttgacatagggcaaggtagtaaaaggagatttgagaggataaaatatatccaaagttttagctttgaatagtgttgaagtgtataaatgaattgcctatcttcttccaacatcttaaacttctgggttgaactggttaatgtgtccgctcttacatggtatcagagccataagtcttaagtttaaatcctggcagaggcttcatttgtgcctccaccccatttgcgcctttctctctggctgcacgtgagtgggggcgttgaagtatataagtggattgccctcttctaacaagttaagattttaaggcgaactggttagtgcgtccattctaacaaataggagtgcacaaaaaacagttatccatgttacttgtgatttctgttggatttcaactctagcatcccctaacttgttgagagttgttgtattttctctaaactctaaatcttaagtgacaaaaggcattcaacctgtagattcaaattttaaaagaaaaggtaaatggattagtcatttccaaaaactaaatcagatgtttatccacaaagctccctagtttcaaagttaaatggattagtcattctgaaaactacatcagatgtttatccataaagctccctagtttcaaaggtgcatacaacaaatccaaagagaaaaggatggtgagatgctgaaacccttctacactcacagaagtccaagatatatatttcaacagacaggagagcatttatatacagacacctagaatcacaacttcagaaccatgggaaggaaatagaactgcctatggctacaagaaggcattgacatgacaagaggcagagtttgagtaaatctgaggcgaagttagagtaaatctgaggggaggggggtgtgcttgccttgtgggtgcaaatttagtctatatcgctgtcttattatttttgtgtgggtgtggccaatgaaaaaatgaacaaattattgttgtgacatggatatcaaaattcatccccacgctgcagccatgtttgcctgttcagtggtctccttggtggggatggatctcaaacctgcttctggactgatcattggcttcatgacaggcgttgtctggtatggcgcctgccctcatttctcgagtgccaaaaaaaaatcttaataccagaactgtgagagatccgctggttcagaatggttgggtgaatgatattactggatgtctggaacttagtgcaaggctttcagctacaaccaggagtcccagaccagcatcgttggacccactctgcttctagtcaatattcatcaagatctgcatatggccgcttcttcagtgggaatgtcctgtttgaaccagcacaaaggatttggaagacctgggcacctccaagatgcaaatccttcatttggctagcttctctaaatcgctgttggacagcagaccgtttggcccgccgagcagtgtttacaagtcgtccgactaatcgcgattagtcgggctggtcgcctggaagagggcgattaggaggacgacgcgattagggtttctagtcgtcctagtcgtccgactagtcgtcgacctgggcgattagtcgtctggtcgaacacttcctggtcgtttttggtcgttgcagttttggtactgggcttcactctggtttttggcccatctacagtagcccgcccctccaaaaaccctcccagccaccaggacccctcccggccgccagaaacccgccggaacccttcccagccgctagaaaccctactcctctcctctgtcctctctggtttctgccgacgtctctgctccagcctccaagtgctccagccagcaggtaatgcagtttggatgctctagcgcgattttgtttggatgctgatctgctctaggtagcagccagcaggttcctactgtactttttactgaattactgcaagtaattatgccaatattactttcagtttggactttggatggattctgttttacacttttactgaattactgctagtctgctactaattatgcctatattattgcagaaatacaatgtttatatagttaatatatagttatatacatatacatatgtccttaaatctataggacgactaacggacgaccagaggtcgaccaggaccgattaggtcgactaatcgtcgccctaatcgcgattagtcgcctggtcgcccctctcactcgaccagctggtcgcccgacttgtaaacattgccgccgaggtatggaccatcctgaaaagtgcctcctttgcgatcaagaagcggaaacaattcaccacatcttattacaatgtgtttttgctagagaagtttgacatcacatcctttctcttattgggctgcagcacctcaccctgaggaatgatgaaattcagttccaagattggtggaataattcagagatagcagtccctaagccccaaagaagagtttcaattcagttgtgaacttagtggcttggtggctttggaaacaccggaacacctgtgtttttgaaaaggctcctccacacatcaccaaggttattcaggacataaaggaggatgctagactttggtgttcagcaggggctgcaggccttagaggcatgtggccatagttcctagtgggaaggagaaggtcatgtaattgcctgttggtttttctttcttgaccgcctatttcttggcggtttgtacgggtctttctgaacattttcttcttcttaatataattattaagttgcatgcaccaaccaattcaactcaaaagcttaagctaataagaggggtgggcaattcacttatattatattccaacactctccctcacatcgagcctctcttgggtctaaggcgtggaataagagcgagcaacaattattttatttaattgcgctaaccaggattcgaaatcgagacctctggctttgataccatattcagttgcatgcaccaaccaattcaacccaaaagcttaagctgataggaggggtgggcaattcacttatattatattccaacaataatgatgtgcagttctcctgcacgttcaagaaaaaaacattctacaaaaacttaagcatactcctctgattgtttcgatattctgtaggccttgggcgaaaatattctaccatgtttgtccatttatggtatgagggtgtaattattgcaatatttctactttatacccctgattcaatgctctaatagtagagaaatggttgctatgtaagtattgtgcaaaagaaggaaacaacttccaaaataaaatctccgccaatgtccatgcaaactaaccgtttgcaaatctagggaatatcctactacaatttcaaatttgtgaaatgcaaactcagtctaggaaatggttaactattctacaaataatagatcttaggtctcaagcaatgtaaaattaacatgatgtaaacagtttgctgcaattaccctaatatcacacaattattcaaatgaaatggtatttctaacgcattcaacgtcaatcataaatatctagagaaggagaatgataacataatgatgtcattgaaaattctcaaaataaacttgaaaatcttactgcatcctcagccgaaagaatatgttcgacaggaggattggtaccgcactctgtcatcactccacccacaggtgctgcaatgccggcagctagctt

SEQ ID NO: 21534 - DNA, 1469 bp, Zea Mays
cgaaaaggttcacacaatgatggctactagctcacagcaaatcagcattggtgacatcaatgatcccaggcaaagcttcggttaaaattacttgcatcaatacagggcacgctaatatctttgtggcatgggtatgggtttatgaatgtagcaaagggcagcaaacagaagtgttcaaatcatccaaacagggcattaaccattgcatttgacaggaaaaaaatgaagaaactgtatttagaagaccatggtcgtcacagatcatacctgatcagttacagcatacaagataccaataatgcacggaaggcagcaacaaacagcgattccaatcacacaagccaaagcaatacagaagaccacaaagaaaacatcaaatgccagaaaaacaattgtcagcctgtaaaaagaagatagtcatttcagagaacaacattgatgaacttaaaaaaacactcagatttttccttatccacacatcaaagttacaacagacataccaataaagctgaggagcatcatgtgataaagcttgaccacctgcagacacccaatagaacccaaggatccaccaaataaaggaaaacatcgtgtttgcagactccaagtgcttcacaatactgaacatggaacaataacaacaacaggccttttagtcccaaacaagttggggtaaacagtggcgggcctagaaatcttcgagatcctaggcaaagatagtactcatactataaacatatagctttgcctagtttttacacatgtttaactatattttactgcttggtgcacgtttacaagttcattagcactaatggaggagcctgggcaagagcctaggcttgcctgcacttaggtccgccaatgggtaaactagagttgaaactcaacagaaacaaataaataataaatgtgaatacaagagcaagtaaatttaaggatttagtattggaatgtttcctagtgtgattcgggtaaaatgaaggaaagacatgtgaaggctttgtacaaaacaccaaaaagctaataatagacaagtccatcaaatcaatataaaattttcaatgcggccatttttataaaagatatggatccatattataggggacacattcaataaaagcatctttgtcatcatacagttggctacaaatactaatataaatctgtcgaaattagttatcgacggttatgggattgggagaataaggtcctgtttaggtagttggaattcagatccaaaatataaaagatttgtcagagactcagagtaatcccctcaagcacaccctaaacaatttcccaatttgactgcaagtctacaatgtatgaagacgcacatgctatttttaattgctctaaaaaattttccataagaatgcacctgtaaccgaaacaacaaaattacacttacaatcaaacttccaccatccccatatgcacattttttaagcaaaggacatcacaag

SEQ ID NO: 21535 - DNA, 1556 bp, Zea Mays
ctctgcactccacaccgacacgcgaccggcacggcctttaactacaccttcctaccacacaccacgggctactagctcaccccacacccccagcgcagcagccctgcctagccgcgcgagctagaggcccgaccagaccgaccgacggtcgctcgctcgctcgcaaatccgcaatggcgtccatcatcgtgcaggcggtggtgatcctcctggacgtgatcgccttcggcctgggcgtcgccgccgagcagcgccggagccgggccaccgtcaccccggacgccgccaaggagtacgactactgcgtctacgactccgacatcgccacggggtacggcgtcggcgcgctgctcctcctcgccgccgcgcaggtggtgctcatggtcgccagccgctgcttctgctgcggccgcgggctcaagccggggggctcccgcgcctgcgccctcatcctcttcctcttcacatggtaaacgagcaaatctccagcccctctctctctctctctctctgtctctctctctctccctgttcacagtcatgcatggaaatagccagatccacgctcgggtgggttggattctgctctttaccccccatcgctcgtctacttcttacctacgactacgagcagattgtagtgagatctgcgcgtcgttttcagctaagggtccgttttccttgggctggtcttggcctggatctttgtgctttccaactgaatctacacttcttaatttctaagaaaaagatgacggaatggtatgctttgatatttgtttacacacgaattgacttatgttgagttgttccgatggactgttaaagcacattgttattttctttatactctgtcagtgatttctttatctgtttctctcgagatcaccaggtgacagtagtaaaactgaaagttcataaattactcttattccagtacctacagattcgagatacactatatttttctggtacatgctggaactaaaactgaaagttcatttaatatcgactgcactgcaaacttcccatccaaatgtttgccaatgacacatatgtcttcatccccaatggcagggtggcattcctcatcgcggaggcgtgcctgctggcaggatcagtgcgcaacgcgtaccacacccggtacaggggcatattctacggcgactcgctctcatgtgagacggtgcggaagggcgtgttcgcggctggtgcggccttcaccttcttcacggccatcctgggcgaggtgtactacctcagctactccaagtcccgggacgccgccggtggtgccccctacggcggctccagcattggcatgggcccttacaactaactaaaggccggccccggtcgcttcatgctggaggaatgcagcagtgttctttttgacgttaccttagtagggacacggtgtaattggttattggatccgctgctttttgtttaggttcttgtatgaagttactacttggttgggctgtatactgtttggaatgttgggttggacgctggacatggatatacacgtatcgtagtatgctatgttttcg

SEQ ID NO: 21536 - DNA, 2438 bp, Zea Mays
aaaacctattgttaagctgtccttagtagatcgtgtatataatcatgtaaaacactattctataccgtagataacacaatttatatgataagagtttgaaataggatgcaagagctgcctcatgctctcattttgcctagcaatagccaaaaaaaatttcgttcgtgtgcacgccgattttcaaagaaaataaaaaagcgaggcgtaaagattctccgctccccggccgcaaatcccccactggccagtggccaccaccaccgcctcgattcgccacgtttggttctgctgaggtcgggatttggtgtgccgagctattccttgctcaattggatctcctccgcgcgattcgattcgattcgattcggttcggttcgttccaatcggggttttgctacttccgctgccaccggtgtgctccgagctgctcaagctgcgcgccggatacctggctgctcgatctgattcggtctccaacaccagccccctccgcggccgccgctccccgctgaccccggcgccatttcgacccgcgcggccgatccttggatggttccgatcaatcgggaccaagagacccaaggcttcatcagctcacccggcccccggcggcggtcgatccatggccggggagaaagcgccgcgcgcgttccccatcgaggagcttccaggccacctcatcggggaggtcctgacctcgggcgggctcgcggccgccgacctcgccaggctcgaggccacctgccgcgcgctcaggccgctcgccgaatacgccgcgtccaagctctgcgccgcgcgggcggcgttcgcggctatggggcccgccgcgcgtggggggctgctagagaggtgcgggggaagctggaagaaggtgctcaggttcctgcagtccgtcgagcagtcgtcaggcacggtcgagaccacatcgggcagcatgcaagtagccacaggaagatatcacacacttttggtccatgactcttctgtctattcttgtgggtccagcttgtgtggtgtgctaggtcatggcccagatactacacagtgtgcggcattcagtcgggtttccttcccatcactttcttgtgttataaacatctctgcttcacacaaccatgctgcttttgttttggaatctggggaggttttcacctgtggtgataactcatcattatgctgtggtcatggcgaagtgggaagaactatatttcgaccaatgcaagtagaagcgcttaaagggattccctgcaagcaggttgctactggtctaagttttactgtgattcttactagggatggacaagtatatacttgtggaagtaatacgcatggccaacttggtcatggtgacaccatagacagggccactccaaagcttattgaattgtttgaaggctccactccggtggtgcagattgcagccggtgcaagctacacgtttgctgtaacagatgatggaacagttcattcctttgggtcttgtactaatttctgccttggacatggggatcagcatgatgaacttcttccacgtgcaatccaatcatttaagtggagaaacattcatgtagtccgtgtttctgctggagatgagcatgccgtggctcttgatgcactaggatatgtttatacatggggcaaaggatactgtggagccttaggccatggtgatgagaatgataaaactagcccagaattgatcagcagcttgaagggccaagttgctgtgcaggtatgtgcaaggaagagaaagacatttgttctcacggacaagggctcagttgttgcatttggatggatgggctttgggagcttagggtttcccgaccgaggaccgttggacaaagtaatgaggccccgcgctcttgagagcctgcaggatcactacgtctcccaaataagcaccggactgtaccacactgttgcagtgacaagtaagggcattgtgttcgggtttggggacaatgagagagcccaacttgggcaggagtacattcgtgggtgcttaaaacctactgagataatgttccaaaagagcatggaagacataccgattgcggcgcctagtggttgacttgaatgccatcattttggacactgttgcctacatgtgttgtatttatatcggaattcttgtcggcaagtgtattttatacttcgtgctttgtgagtaatctgggtgaacgggggaaagacggaagtggttggaattggaggacagtgttgtgtagccaaagaagcatatagtttagtaacgtgtaatgtatcgaataattcaacccaccatttttcttctgtacaaaatttattggtgtgtttgtatttttttctctcttgtccccttcatgttttcttggttctgtgctagcaactgttgagtaaatagcgtttgctcccctggaacttgttatattagtgcctaatcttgctagtttcta

SEQ ID NO: 21537 - DNA, 2584 bp, Zea Mays
agataacacaatttatatgataagagtttgaaataggatgcaagagctgcctcatgctctcattttgcctagcaatagccaaaaaaaatttcgttcgtgtgcacgccgattttcaaagaaaataaaaaagcgagggtaaggaaactcagattaggttatatttggataatctagtattaacttcaactatcaacgcatgtgaattgaggtcatacagcgtaaagattctccgctccccggccgcaaatcccccactggccagtggccaccaccaccgcctcgattcgccacgtttggttctgctgaggtcgggatttggtgtgccgagctattccttgctcaattggatctcctccgcgcgattcgattcgattcgattcggttcggttcgttccaatcggggttttgctacttccgctgccaccggtgtgctccgagctgctcaagctgcgcgccggatacctggctgctcgatctgattcggtctccaacaccagccccctccgcggccgccgctccccgctgaccccggcgccatttcgacccgcgcggccgatccttggatggttccgatcaatcgggaccaagagacccaaggcttcatcagctcacccggcccccggcggcggtcgatccatggccggggagaaagcgccgcgcgcgttccccatcgaggagcttccaggccacctcatcggggaggtcctgacctcgggcgggctcgcggccgccgacctcgccaggctcgaggccacctgccgcgcgctcaggccgctcgccgaatacgccgcgtccaagctctgcgccgcgcgggcggcgttcgcggctatggggcccgccgcgcgtggggggctgctagagaggtgcgggggaagctggaagaaggtgctcaggttcctgcagtccgtcgagcagtcgtcaggcacggtcgagaccacatcgggcagcatgcaagtagccacaggaagatatcacacacttttggtccatgactcttctgtctattcttgtgggtccagcttgtgtggtgtgctaggtcatggcccagatactacacagtgtgcggcattcagtcgggtttccttcccatcactttcttgtgttataaacatctctgcttcacacaaccatgctgcttttgttttggaatctggggaggttttcacctgtggtgataactcatcattatgctgtggtcatggcgaagtgggaagaactatatttcgaccaatgcaagtagaagcgcttaaagggattccctgcaagcaggttgctactggtctaagttttactgtgattcttactagggatggacaagtatatacttgtggaagtaatacgcatggccaacttggtcatggtgacaccatagacagggccactccaaagcttattgaattgtttgaaggctccactccggtggtgcagattgcagccggtgcaagctacacgtttgctgtaacagatgatggaacagttcattcctttgggtcttgtactaatttctgccttggacatggggatcagcatgatgaacttcttccacgtgcaatccaatcatttaagtggagaaacattcatgtagtccgtgtttctgctggagatgagcatgccgtggctcttgatgcactaggatatgtctggtgcagtggcgagaggtatctcactgagtcaccagtcgtgggtttttcgaagcagtctctccacatttgcgggtgaaggcttgcctcagtttatccctttctcagaccacttatgtgggagcctccggtttatacatggggcaaaggatactgtggagccttaggccatggtgatgagaatgataaaactagcccagaattgatcagcagcttgaagggccaagttgctgtgcaggtatgtgcaaggaagagaaagacatttgttctcacggacaagggctcagttgttgcatttggatggatgggctttgggagcttagggtttcccgaccgaggaccgttggacaaagtaatgaggccccgcgctcttgagagcctgcaggatcactacgtctcccaaataagcaccggactgtaccacactgttgcagtgacaagtaagggcattgtgttcgggtttggggacaatgagagagcccaacttgggcaggagtacattcgtgggtgcttaaaacctactgagataatgttccaaaagagcatggaagacataccgattgcggcgcctagtggttgacttgaatgccatcattttggacactgttgcctacatgtgttgtatttatatcggaattcttgtcggcaagtgtattttatacttcgtgctttgtgagtaatctgggtgaacgggggaaagacggaagtggttggaattggaggacagtgttgtgtagccaaagaagcatatagtttagtaacgtgtaatgtatcgaataattcaacccaccatttttcttctgtacaaaatttattggtgtgtttgtatttttttctctcttgtccccttcatgttttcttggttctgtgctagcaactgttgagtaaatagcgtttgctcccctggaacttgttatattagtgcctaatcttgctagtttcta

SEQ ID NO: 21538 - DNA, 2590 bp, Zea Mays
gtttgaaataggatgcaagagctgcctcatgctctcattttgcctagcaatagccaaaaaaaatttcgttcgtgtgcacgccgattttcaaagaaaataaaaaagcgagggtaaggaaactcagattaggttatatttggataatctagtattaacttcaactatcaacgcatgtgaattgaggtcatacagcgtaaagattctccgctccccggccgcaaatcccccactggccagtggccaccaccaccgcctcgattcgccacgtttggttctgctgaggtcgggatttggtgtgccgagctattccttgctcaattggatctcctccgcgcgattcgattcgattcgattcggttcggttcgttccaatcggggttttgctacttccgctgccaccggtgtgctccgagctgctcaagctgcgcgccggatacctggctgctcgatctgattcggtctccaacaccagccccctccgcggccgccgctccccgctgaccccggcgccatttcgacccgcgcggccgatccttggatggttccgatcaatcgggaccaagagacccaaggcttcatcagctcacccggcccccggcggcggtcgatccatggccggggagaaagcgccgcgcgcgttccccatcgaggagcttccaggccacctcatcggggaggtcctgacctcgggcgggctcgcggccgccgacctcgccaggctcgaggccacctgccgcgcgctcaggccgctcgccgaatacgccgcgtccaagctctgcgccgcgcgggcggcgttcgcggctatggggcccgccgcgcgtggggggctgctagagaggtgcgggggaagctggaagaaggtgctcaggttcctgcagtccgtcgagcagtcgtcaggcacggtcgagaccacatcgggcagcatgcaagtagccacaggaagatatcacacacttttggtccatgactcttctgtctattcttgtgggtccagcttgtgtggtgtgctaggtcatggcccagatactacacagtgtgcggcattcagtcgggtttccttcccatcactttcttgtgttataaacatctctgcttcacacaaccatgctgcttttgttttggaatctggggaggttttcacctgtggtgataactcatcattatgctgtggtcatggcgaagtgggaagaactatatttcgaccaatgcaagtagaagcgcttaaagggattccctgcaagcagggatggacaagtatatacttgtggaagtaatacgcatggccaacttggtcatggtgacaccatagacagggccactccaaagcttattgaattgtttgaaggctccactccggtggtgcagattgcagccggtgcaagctacacgtttgctgtaacagatgatggaacagttcattcctttgggtcttgtactaatttctgccttggacatggggatcagcatgatgaacttcttccacgtgcaatccaatcatttaagtggagaaacattcatgtagtccgtgtttctgctggagatgagcatgccgtggctcttgatgcactaggatatgtaagtctatattgccctgtttgcattccaaatatatattgttaatgattgttctcgtgggaagggcaggtctggtgcagtggcgagaggtatctcactgagtcaccagtcgtgggtttttcgaagcagtctctccacatttgcgggtgaaggcttgcctcagtttatccctttctcagaccacttatgtgggagcctccggtttatacatggggcaaaggatactgtggagccttaggccatggtgatgagaatgataaaactagcccagaattgatcagcagcttgaagggccaagttgctgtgcaggtatgtgcaaggaagagaaagacatttgttctcacggacaagggctcagttgttgcatttggatggatgggctttgggagcttagggtttcccgaccgaggaccgttggacaaagtaatgaggccccgcgctcttgagagcctgcaggatcactacgtctcccaaataagcaccggactgtaccacactgttgcagtgacaagtaagggcattgtgttcgggtttggggacaatgagagagcccaacttgggcaggagtacattcgtgggtgcttaaaacctactgagataatgttccaaaagagcatggaagacataccgattgcggcgcctagtggttgacttgaatgccatcattttggacactgttgcctacatgtgttgtatttatatcggaattcttgtcggcaagtgtattttatacttcgtgctttgtgagtaatctgggtgaacgggggaaagacggaagtggttggaattggaggacagtgttgtgtagccaaagaagcatatagtttagtaacgtgtaatgtatcgaataattcaacccaccatttttcttctgtacaaaatttattggtgtgtttgtatttttttctctcttgtccccttcatgttttcttggttctgtgctagcaactgttgagtaaatagcgtttgctcccctggaacttgttatattagtgcctaatcttgctagtttcta

SEQ ID NO: 21539 - DNA, 2477 bp, Zea Mays
aagagctgcctcatgctctcattttgcctagcaatagccaaaaaaaatttcgttcgtgtgcacgccgattttcaaagaaaataaaaaagcgagggtaaggaaactcagattaggttatatttggataatctagtattaacttcaactatcaacgcatgtgaattgaggtcatacagcgtaaagattctccgctccccggccgcaaatcccccactggccagtggccaccaccaccgcctcgattcgccacgtttggttctgctgaggtcgggatttggtgtgccgagctattccttgctcaattggatctcctccgcgcgattcgattcgattcgattcggttcggttcgttccaatcggggttttgctacttccgctgccaccggtgtgctccgagctgctcaagctgcgcgccggatacctggctgctcgatctgattcggtctccaacaccagccccctccgcggccgccgctccccgctgaccccggcgccatttcgacccgcgcggccgatccttggatggttccgatcaatcgggaccaagagacccaaggcttcatcagctcacccggcccccggcggcggtcgatccatggccggggagaaagcgccgcgcgcgttccccatcgaggagcttccaggccacctcatcggggaggtcctgacctcgggcgggctcgcggccgccgacctcgccaggctcgaggccacctgccgcgcgctcaggccgctcgccgaatacgccgcgtccaagctctgcgccgcgcgggcggcgttcgcggctatggggcccgccgcgcgtggggggctgctagagaggtgcgggggaagctggaagaaggtgctcaggttcctgcagtccgtcgagcagtcgtcaggcacggtcgagaccacatcgggcagcatgcaagtagccacaggaagatatcacacacttttggtccatgactcttctgtctattcttgtgggtccagcttgtgtggtgtgctaggtcatggcccagatactacacagtgtgcggcattcagtcgggtttccttcccatcactttcttgtgttataaacatctctgcttcacacaaccatgctgcttttgttttggaatctggggaggttttcacctgtggtgataactcatcattatgctgtggtcatggcgaagtgggaagaactatatttcgaccaatgcaagtagaagcgcttaaagggattccctgcaagcaggttgctactggtctaagttttactgtgattcttactagggatggacaagtatatacttgtggaagtaatacgcatggccaacttggtcatggtgacaccatagacagggccactccaaagcttattgaattgtttgaaggctccactccggtggtgcagattgcagccggtgcaagctacacgtttgctgtaacagatgatggaacagttcattcctttgggtcttgtactaatttctgccttggacatggggatcagcatgatgaacttcttccacgtgcaatccaatcatttaagtggagaaacattcatgtagtccgtgtttctgctggagatgagcatgccgtggctcttgatgcactaggatattggcgagaggtatctcactgagtcaccagtcgtgggtttttcgaagcagtctctccacatttgcgggtttatacatggggcaaaggatactgtggagccttaggccatggtgatgagaatgataaaactagcccagaattgatcagcagcttgaagggccaagttgctgtgcaggtatgtgcaaggaagagaaagacatttgttctcacggacaagggctcagttgttgcatttggatggatgggctttgggagcttagggtttcccgaccgaggaccgttggacaaagtaatgaggccccgcgctcttgagagcctgcaggatcactacgtctcccaaataagcaccggactgtaccacactgttgcagtgacaagtaagggcattgtgttcgggtttggggacaatgagagagcccaacttgggcaggagtacattcgtgggtgcttaaaacctactgagataatgttccaaaagagcatggaagacataccgattgcggcgcctagtggttgacttgaatgccatcattttggacactgttgcctacatgtgttgtatttatatcggaattcttgtcggcaagtgtattttatacttcgtgctttgtgagtaatctgggtgaacgggggaaagacggaagtggttggaattggaggacagtgttgtgtagccaaagaagcatatagtttagtaacgtgtaatgtatcgaataattcaacccaccatttttcttctgtacaaaatttattggtgtgtttgtatttttttctctcttgtccccttcatgttttcttggttctgtgctagcaactgttgagtaaatagcgtttgctcccctggaacttgttatattagtgcctaatcttgctagtttcta

SEQ ID NO: 21540 - DNA, 2292 bp, Zea Mays
catgctctcattttgcctagcaatagccaaaaaaaatttcgttcgtgtgcacgccgattttcaaagaaaataaaaaagcgagggtaaggaaactcagattaggttatatttggataatctagtattaacttcaactatcaacgcatgtgaattgaggtcatacagcgtaaagattctccgctccccggccgcaaatcccccactggccagtggccaccaccaccgcctcgattcgccacgtttggttctgctgaggtcgggatttggtgtgccgagctattccttgctcaattggatctcctccgcgcgattcgattcgattcgattcggttcggttcgttccaatcggggttttgctacttccgctgccaccggtgtgctccgagctgctcaagctgcgcgccggatacctggctgctcgatctgattcggtctccaacaccagccccctccgcggccgccgctccccgctgaccccggcgccatttcgacccgcgcggccgatccttggatggttccgatcaatcgggaccaagagacccaaggcttcatcagctcacccggcccccggcggcggtcgatccatggccggggagaaagcgccgcgcgcgttccccatcgaggagcttccaggccacctcatcggggaggtcctgacctcgggcgggctcgcggccgccgacctcgccaggctcgaggccacctgccgcgcgctcaggccgctcgccgaatacgccgcgtccaagctctgcgccgcgcgggcggcgttcgcggctatggggcccgccgcgcgtggggggctgctagagaggtgcgggggaagctggaagaaggtgctcaggttcctgcagtccgtcgagcagtcgtcaggcacggtcgagaccacatcgggcagcatgcaagtagccacaggaagatatcacacacttttggtccatgactcttctgtctattcttgtgggtccagcttgtgtggtgtgctaggtcatggcccagatactacacagtgtgcggcattcagtcgggtttccttcccatcactttcttgtgttataaacatctctgcttcacacaaccatgctgcttttgttttggaatctggggaggttttcacctgtggtgataactcatcattatgctgtggtcatggcgaagtgggaagaactatatttcgaccaatgcaagtagaagcgcttaaagggattccctgcaagcaggttgctactggtctaagttttactgtgattcttactagggatggacaagtatatacttgtggaagtaatacgcatggccaacttggtcatggtgacaccatagacagggccactccaaagcttattgaattgtttgaaggctccactccggtggtgcagattgcagccggtgcaagctacacgtttgctgtaacagatgatggaacagttcattcctttgggtcttgtactaatttctgccttggacatggggatcagcatgatgaacttcttccacgtgcaatccaatcatttaagtggagaaacattcatgtagtccgtgtttctgctggagatgagcatgccgtggctcttgatgcactaggatatgtatgtgcaaggaagagaaagacatttgttctcacggacaagggctcagttgttgcatttggatggatgggctttgggagcttagggtttcccgaccgaggaccgttggacaaagtaatgaggccccgcgctcttgagagcctgcaggatcactacgtctcccaaataagcaccggactgtaccacactgttgcagtgacaagtaagggcattgtgttcgggtttggggacaatgagagagcccaacttgggcaggagtacattcgtgggtgcttaaaacctactgagataatgttccaaaagagcatggaagacataccgattgcggcgcctagtggttgacttgaatgccatcattttggacactgttgcctacatgtgttgtatttatatcggaattcttgtcggcaagtgtattttatacttcgtgctttgtgagtaatctgggtgaacgggggaaagacggaagtggttggaattggaggacagtgttgtgtagccaaagaagcatatagtttagtaacgtgtaatgtatcgaataattcaacccaccatttttcttctgtacaaaatttattggtgtgtttgtatttttttctctcttgtccccttcatgttttcttggttctgtgctagcaactgttgagtaaatagcgtttgctcccctggaacttgttatattagtgcctaatcttgctagtttcta

SEQ ID NO: 21541 - DNA, 2323 bp, Zea Mays
ctcattttgcctagcaatagccaaaaaaaatttcgttcgtgtgcacgccgattttcaaagaaaataaaaaagcgagggtaaggaaactcagattaggttatatttggataatctagtattaacttcaactatcaacgcatgtgaattgaggtcatacagcgtaaagattctccgctccccggccgcaaatcccccactggccagtggccaccaccaccgcctcgattcgccacgtttggttctgctgaggtcgggatttggtgtgccgagctattccttgctcaattggatctcctccgcgcgattcgattcgattcgattcggttcggttcgttccaatcggggttttgctacttccgctgccaccggtgtgctccgagctgctcaagctgcgcgccggatacctggctgctcgatctgattcggtctccaacaccagccccctccgcggccgccgctccccgctgaccccggcgccatttcgacccgcgcggccgatccttggatggttccgatcaatcgggaccaagagacccaaggcttcatcagctcacccggcccccggcggcggtcgatccatggccggggagaaagcgccgcgcgcgttccccatcgaggagcttccaggccacctcatcggggaggtcctgacctcgggcgggctcgcggccgccgacctcgccaggctcgaggccacctgccgcgcgctcaggccgctcgccgaatacgccgcgtccaagctctgcgccgcgcgggcggcgttcgcggctatggggcccgccgcgcgtggggggctgctagagaggtgcgggggaagctggaagaaggtgctcaggttcctgcagtccgtcgagcagtcgtcaggcacggtcgagaccacatcgggcagccttgtgtggtgtgctaggtcatggcccagatactacacagtgtgcggcattcagtcgggtttccttcccatcactttcttgtgttataaacatctctgcttcacacaaccatgctgcttttgttttggaatctggggaggttttcacctgtggtgataactcatcattatgctgtggtcatggcgaagtgggaagaactatatttcgaccaatgcaagtagaagcgcttaaagggattccctgcaagcaggttgctactggtctaagttttactgtgattcttactagggatggacaagtatatacttgtggaagtaatacgcatggccaacttggtcatggtgacaccatagacagggccactccaaagcttattgaattgtttgaaggctccactccggtggtgcagattgcagccggtgcaagctacacgtttgctgtaacagatgatggaacagttcattcctttgggtcttgtactaatttctgccttggacatggggatcagcatgatgaacttcttccacgtgcaatccaatcatttaagtggagaaacattcatgtagtccgtgtttctgctggagatgagcatgccgtggctcttgatgcactaggatatgtttatacatggggcaaaggatactgtggagccttaggccatggtgatgagaatgataaaactagcccagaattgatcagcagcttgaagggccaagttgctgtgcaggtatgtgcaaggaagagaaagacatttgttctcacggacaagggctcagttgttgcatttggatggatgggctttgggagcttagggtttcccgaccgaggaccgttggacaaagtaatgaggccccgcgctcttgagagcctgcaggatcactacgtctcccaaataagcaccggactgtaccacactgttgcagtgacaagtaagggcattgtgttcgggtttggggacaatgagagagcccaacttgggcaggagtacattcgtgggtgcttaaaacctactgagataatgttccaaaagagcatggaagacataccgattgcggcgcctagtggttgacttgaatgccatcattttggacactgttgcctacatgtgttgtatttatatcggaattcttgtcggcaagtgtattttatacttcgtgctttgtgagtaatctgggtgaacgggggaaagacggaagtggttggaattggaggacagtgttgtgtagccaaagaagcatatagtttagtaacgtgtaatgtatcgaataattcaacccaccatttttcttctgtacaaaatttattggtgtgtttgtatttttttctctcttgtccccttcatgttttcttggttctgtgctagcaactgttgagtaaatagcgtttgctcccctggaacttgttatattagtgcctaatcttgctagtttcta

SEQ ID NO: 21542 - DNA, 2146 bp, Zea Mays
tgtgaattgaggtcatacagcgtaaagattctccgctccccggccgcaaatcccccactggccagtggccaccaccaccgcctcgattcgccacgtttggttctgctgaggtcgggatttggtgtgccgagctattccttgctcaattggatctcctccgcgcgattcgattcgattcgattcggttcggttcgttccaatcggggttttgctacttccgctgccaccggtgtgctccgagctgctcaagctgcgcgccggatacctggctgctcgatctgattcggtctccaacaccagccccctccgcggccgccgctccccgctgaccccggcgccatttcgacccgcgcggccgatccttggatggttccgatcaatcgggaccaagagacccaaggcttcatcagctcacccggcccccggcggcggtcgatccatggccggggagaaagcgccgcgcgcgttccccatcgaggagcttccaggccacctcatcggggaggtcctgacctcgggcgggctcgcggccgccgacctcgccaggctcgaggccacctgccgcgcgctcaggccgctcgccgaatacgccgcgtccaagctctgcgccgcgcgggcggcgttcgcggctatggggcccgccgcgcgtggggggctgctagagaggtgcgggggaagctggaagaaggtgctcaggttcctgcagtccgtcgagcagtcgtcaggcacggtcgagaccacatcgggcagccttgtgtggtgtgctaggtcatggcccagatactacacagtgtgcggcattcagtcgggtttccttcccatcactttcttgtgttataaacatctctgcttcacacaaccatgctgcttttgttttggaatctggggaggttttcacctgtggtgataactcatcattatgctgtggtcatggcgaagtgggaagaactatatttcgaccaatgcaagtagaagcgcttaaagggattccctgcaagcagggatggacaagtatatacttgtggaagtaatacgcatggccaacttggtcatggtgacaccatagacagggccactccaaagcttattgaattgtttgaaggctccactccggtggtgcagattgcagccggtgcaagctacacgtttgctgtaacagatgatggaacagttcattcctttgggtcttgtactaatttctgccttggacatggggatcagcatgatgaacttcttccacgtgcaatccaatcatttaagtggagaaacattcatgtagtccgtgtttctgctggagatgagcatgccgtggctcttgatgcactaggatatgtttatacatggggcaaaggatactgtggagccttaggccatggtgatgagaatgataaaactagcccagaattgatcagcagcttgaagggccaagttgctgtgcaggtatgtgcaaggaagagaaagacatttgttctcacggacaagggctcagttgttgcatttggatggatgggctttgggagcttagggtttcccgaccgaggaccgttggacaaagtaatgaggccccgcgctcttgagagcctgcaggatcactacgtctcccaaataagcaccggactgtaccacactgttgcagtgacaagtaagggcattgtgttcgggtttggggacaatgagagagcccaacttgggcaggagtacattcgtgggtgcttaaaacctactgagataatgttccaaaagagcatggaagacataccgattgcggcgcctagtggttgacttgaatgccatcattttggacactgttgcctacatgtgttgtatttatatcggaattcttgtcggcaagtgtattttatacttcgtgctttgtgagtaatctgggtgaacgggggaaagacggaagtggttggaattggaggacagtgttgtgtagccaaagaagcatatagtttagtaacgtgtaatgtatcgaataattcaacccaccatttttcttctgtacaaaatttattggtgtgtttgtatttttttctctcttgtccccttcatgttttcttggttctgtgctagcaactgttgagtaaatagcgtttgctcccctggaacttgttatattagtgcctaatcttgctagtttcta

SEQ ID NO: 21543 - DNA, 2252 bp, Zea Mays
gtgaattgaggtcatacagcgtaaagattctccgctccccggccgcaaatcccccactggccagtggccaccaccaccgcctcgattcgccacgtttggttctgctgaggtcgggatttggtgtgccgagctattccttgctcaattggatctcctccgcgcgattcgattcgattcgattcggttcggttcgttccaatcggggttttgctacttccgctgccaccggtgtgctccgagctgctcaagctgcgcgccggatacctggctgctcgatctgattcggtctccaacaccagccccctccgcggccgccgctccccgctgaccccggcgccatttcgacccgcgcggccgatccttggatggttccgatcaatcgggaccaagagacccaaggcttcatcagctcacccggcccccggcggcggtcgatccatggccggggagaaagcgccgcgcgcgttccccatcgaggagcttccaggccacctcatcggggaggtcctgacctcgggcgggctcgcggccgccgacctcgccaggctcgaggccacctgccgcgcgctcaggccgctcgccgaatacgccgcgtccaagctctgcgccgcgcgggcggcgttcgcggctatggggcccgccgcgcgtggggggctgctagagaggtgcgggggaagctggaagaaggtgctcaggttcctgcagtccgtcgagcagtcgtcaggcacggtcgagaccacatcgggcagcatgcaagtagccacaggaagatatcacacacttttggtccatgactcttctgtctattcttgtgggtccagcttgtgtggtgtgctaggtcatggcccagatactacacagtgtgcggcattcagtcgggtttccttcccatcactttcttgtgttataaacatctctgcttcacacaaccatgctgcttttgttttggaatctggggaggttttcacctgtggtgataactcatcattatgctgtggtcatggcgaagtgggaagaactatatttcgaccaatgcaagtagaagcgcttaaagggattccctgcaagcaggttgctactggtctaagttttactgtgattcttactagggatggacaagtatatacttgtggaagtaatacgcatggccaacttggtcatggtgacaccatagacagggccactccaaagcttattgaattgtttgaaggctccactccggtggtgcagattgcagccggtgcaagctacacgtttgctgtaacagatgatggaacagttcattcctttgggtcttgtactaatttctgccttggacatggggatcagcatgatgaacttcttccacgtgcaatccaatcatttaagtggagaaacattcatgtagtccgtgtttctgctggagatgagcatgccgtggctcttgatgcactaggatgtttatacatggggcaaaggatactgtggagccttaggccatggtgatgagaatgataaaactagcccagaattgatcagcagcttgaagggccaagttgctgtgcaggtatgtgcaaggaagagaaagacatttgttctcacggacaagggctcagttgttgcatttggatggatgggctttgggagcttagggtttcccgaccgaggaccgttggacaaagtaatgaggccccgcgctcttgagagcctgcaggatcactacgtctcccaaataagcaccggactgtaccacactgttgcagtgacaagtaagggcattgtgttcgggtttggggacaatgagagagcccaacttgggcaggagtacattcgtgggtgcttaaaacctactgagataatgttccaaaagagcatggaagacataccgattgcggcgcctagtggttgacttgaatgccatcattttggacactgttgcctacatgtgttgtatttatatcggaattcttgtcggcaagtgtattttatacttcgtgctttgtgagtaatctgggtgaacgggggaaagacggaagtggttggaattggaggacagtgttgtgtagccaaagaagcatatagtttagtaacgtgtaatgtatcgaataattcaacccaccatttttcttctgtacaaaatttattggtgtgtttgtatttttttctctcttgtccccttcatgttttcttggttctgtgctagcaactgttgagtaaatagcgtttgctcccctggaacttgttatattagtgcctaatcttgctagtttcta

SEQ ID NO: 21544 - DNA, 2367 bp, Zea Mays
gtgaattgaggtcatacagcgtaaagattctccgctccccggccgcaaatcccccactggccagtggccaccaccaccgcctcgattcgccacgtttggttctgctgaggtcgggatttggtgtgccgagctattccttgctcaattggatctcctccgcgcgattcgattcgattcgattcggttcggttcgttccaatcggggttttgctacttccgctgccaccggtgtgctccgagctgctcaagctgcgcgccggatacctggctgctcgatctgattcggtctccaacaccagccccctccgcggccgccgctccccgctgaccccggcgccatttcgacccgcgcggccgatccttggatggttccgatcaatcgggaccaagagacccaaggcttcatcagctcacccggcccccggcggcggtcgatccatggccggggagaaagcgccgcgcgcgttccccatcgaggagcttccaggccacctcatcggggaggtcctgacctcgggcgggctcgcggccgccgacctcgccaggctcgaggccacctgccgcgcgctcaggccgctcgccgaatacgccgcgtccaagctctgcgccgcgcgggcggcgttcgcggctatggggcccgccgcgcgtggggggctgctagagaggtgcgggggaagctggaagaaggtgctcaggttcctgcagtccgtcgagcagtcgtcaggcacggtcgagaccacatcgggcagcatgcaagtagccacaggaagatatcacacacttttggtccatgactcttctgtctattcttgtgggtccagcttgtgtggtgtgctaggtcatggcccagatactacacagtgtgcggcattcagtcgggtttccttcccatcactttcttgtgttataaacatctctgcttcacacaaccatgctgcttttgttttggaatctggggaggttttcacctgtggtgataactcatcattatgctgtggtcatggcgaagtgggaagaactatatttcgaccaatgcaagtagaagcgcttaaagggattccctgcaagcaggttgctactggtctaagttttactgtgattcttactagggatggacaagtatatacttgtggaagtaatacgcatggccaacttggtcatggtgacaccatagacagggccactccaaagcttattgaattgtttgaaggctccactccggtggtgcagattgcagccggtgcaagctacacgtttgctgtaacagatgatggaacagttcattcctttgggtcttgtactaatttctgccttggacatggggatcagcatgatgaacttcttccacgtgcaatccaatcatttaagtggagaaacattcatgtagtccgtgtttctgctggagatgagcatgccgtggctcttgatgcactaggatatgtctggtgcagtggcgagaggtatctcactgagtcaccagtcgtgggtttttcgaagcagtctctccacatttgcgggtgaaggcttgcctcagtttatccctttctcagaccacttatgtgggagcctccggatactgtggagccttaggccatggtgatgagaatgataaaactagcccagaattgatcagcagcttgaagggccaagttgctgtgcaggtatgtgcaaggaagagaaagacatttgttctcacggacaagggctcagttgttgcatttggatggatgggctttgggagcttagggtttcccgaccgaggaccgttggacaaagtaatgaggccccgcgctcttgagagcctgcaggatcactacgtctcccaaataagcaccggactgtaccacactgttgcagtgacaagtaagggcattgtgttcgggtttggggacaatgagagagcccaacttgggcaggagtacattcgtgggtgcttaaaacctactgagataatgttccaaaagagcatggaagacataccgattgcggcgcctagtggttgacttgaatgccatcattttggacactgttgcctacatgtgttgtatttatatcggaattcttgtcggcaagtgtattttatacttcgtgctttgtgagtaatctgggtgaacgggggaaagacggaagtggttggaattggaggacagtgttgtgtagccaaagaagcatatagtttagtaacgtgtaatgtatcgaataattcaacccaccatttttcttctgtacaaaatttattggtgtgtttgtatttttttctctcttgtccccttcatgttttcttggttctgtgctagcaactgttgagtaaatagcgtttgctcccctggaacttgttatattagtgcctaatcttgctagtttcta

SEQ ID NO: 21545 - DNA, 2197 bp, Zea Mays
cgtaaagattctccgctccccggccgcaaatcccccactggccagtggccaccaccaccgcctcgattcgccacgtttggttctgctgaggtcgggatttggtgtgccgagctattccttgctcaattggatctcctccgcgcgattcgattcgattcgattcggttcggttcgttccaatcggggttttgctacttccgctgccaccggtgtgctccgagctgctcaagctgcgcgccggatacctggctgctcgatctgattcggtctccaacaccagccccctccgcggccgccgctccccgctgaccccggcgccatttcgacccgcgcggccgatccttggatggttccgatcaatcgggaccaagagacccaaggcttcatcagctcacccggcccccggcggcggtcgatccatggccggggagaaagcgccgcgcgcgttccccatcgaggagcttccaggccacctcatcggggaggtcctgacctcgggcgggctcgcggccgccgacctcgccaggctcgaggccacctgccgcgcgctcaggccgctcgccgaatacgccgcgtccaagctctgcgccgcgcgggcggcgttcgcggctatggggcccgccgcgcgtggggggctgctagagaggtgcgggggaagctggaagaaggtgctcaggttcctgcagtccgtcgagcagtcgtcaggcacggtcgagaccacatcgggcagcatgcaagtagccacaggaagatatcacacacttttggtccatgactcttctgtctattcttgtgggtccagcttgtgtggtgtgctaggtcatggcccagatactacacagtgtgcggcattcagtcgggtttccttcccatcactttcttgtgttataaacatctctgcttcacacaaccatgctgcttttgttttggaatctggggaggttttcacctgtggtgataactcatcattatgctgtggtcatggcgaagtgggaagaactatatttcgaccaatgcaagtagaagcgcttaaagggattccctgcaagcagggatggacaagtatatacttgtggaagtaatacgcatggccaacttggtcatggtgacaccatagacagggccactccaaagcttattgaattgtttgaaggctccactccggtggtgcagattgcagccggtgcaagctacacgtttgctgtaacagatgatggaacagttcattcctttgggtcttgtactaatttctgccttggacatggggatcagcatgatgaacttcttccacgtgcaatccaatcatttaagtggagaaacattcatgtagtccgtgtttctgctggagatgagcatgccgtggctcttgatgcactaggatatgtttatacatggggcaaaggatactgtggagccttaggccatggtgatgagaatgataaaactagcccagaattgatcagcagcttgaagggccaagttgctgtgcaggtatgtgcaaggaagagaaagacatttgttctcacggacaagggctcagttgttgcatttggatggatgggctttgggagcttagggtttcccgaccgaggaccgttggacaaagtaatgaggccccgcgctcttgagagcctgcaggatcactacgtctcccaaataagcaccggactgtaccacactgttgcagtgacaagtaagggcattgtgttcgggtttggggacaatgagagagcccaacttgggcaggagtacattcgtgggtgcttaaaacctactgagataatgttccaaaagagcatggaagacataccgattgcggcgcctagtggttgacttgaatgccatcattttggacactgttgcctacatgtgttgtatttatatcggaattcttgtcggcaagtgtattttatacttcgtgctttgtgagtaatctgggtgaacgggggaaagacggaagtggttggaattggaggacagtgttgtgtagccaaagaagcatatagtttagtaacgtgtaatgtatcgaataattcaacccaccatttttcttctgtacaaaatttattggtgtgtttgtatttttttctctcttgtccccttcatgttttcttggttctgtgctagcaactgttgagtaaatagcgtttgctcccctggaacttgttatattagtgcctaatcttgctagtttcta

SEQ ID NO: 21546 - DNA, 1208 bp, Zea Mays
gggatcaaggctgggacagccagcagttgctactggtctaagttttactgtgattcttactagggatggacaagtatatacttgtggaagtaatacgcatggccaacttggtcatggtgacaccatagacagggccactccaaagcttattgaattgtttgaaggctccactccggtggtgcagattgcagccggtgcaagctacacgtttgctgtaacagatgatggaacagttcattcctttgggtcttgtactaatttctgccttggacatggggatcagcatgatgaacttcttccacgtgcaatccaatcatttaagtggagaaacattcatgtagtccgtgtttctgctggagatgagcatgccgtggctcttgatgcactaggatatgtttatacatggggcaaaggatactgtggagccttaggccatggtgatgagaatgataaaactagcccagaattgatcagcagcttgaagggccaagttgctgtgcaggtatgtgcaaggaagagaaagacatttgttctcacggacaagggctcagttgttgcatttggatggatgggctttgggagcttagggtttcccgaccgaggaccgttggacaaagtaatgaggccccgcgctcttgagagcctgcaggatcactacgtctcccaaataagcaccggactgtaccacactgttgcagtgacaagtaagggcattgtgttcgggtttggggacaatgagagagcccaacttgggcaggagtacattcgtgggtgcttaaaacctactgagataatgttccaaaagagcatggaagacataccgattgcggcgcctagtggttgacttgaatgccatcattttggacactgttgcctacatgtgttgtatttatatcggaattcttgtcggcaagtgtattttatacttcgtgctttgtgagtaatctgggtgaacgggggaaagacggaagtggttggaattggaggacagtgttgtgtagccaaagaagcatatagtttagtaacgtgtaatgtatcgaataattcaacccaccatttttcttctgtacaaaatttattggtgtgtttgtatttttttctctcttgtccccttcatgttttcttggttctgtgctagcaactgttgagtaaatagcgtttgctcccctggaacttgttatattagtgcctaatcttgctagtttcta

SEQ ID NO: 21547 - DNA, 1070 bp, Zea Mays
cgcgtgcgtgcgggaatcgagctcgaggtgaagatggatcgccggatggctagatgacaggccaggcgggccggcgctgccgtccatgcctccatggatgtacccctatatctgcttcctggatctgcgattatcttcccagccagaagcacatgcgccgcatgcagtcctacagaccacagaatccagatccattcaaccaaatcctagtcgtgatgatgcctacatcgaccctcgcctactatccccaagcatgggagattttggcatggatgatcgtgatatagatggtgaacatgagttgtttgaatatgctgtattggttggcaatgtctcaaccccaactgctgatatgagccatgttcatggtcatggggaggtagaagatggacctgctgataacaatgtaccaataacaccaagtggtggaacttctaaagcagagtgttggaagcatatgcagaagaaaaaaaattgttgagaacggtataactcgttatgttgctatgtgtaactattgtaattctgagttgactacagctccaactggtggcactgggcatttgaatcgacactacaaagcctgcttggcaaggctaggacaaactcaaggaggaggtgtgcaaactaaactcaactttgcggccgacggcactgtaacaattgccaaacatatccttgaagtagttcctgattttaatatggaaggaaaaattctctctataactcttgataatgctttagcaaataccactgctattcaaattctcacccctaagcttcaatcattcataaatggttacattatccatcaaaggtgtgtgtgtcacattataaatctagttgttcaggatggtataatagttattaataaatatcttgacaatattcgtgctgctattcgcttcatgacaagcacccctcaaatgatttgtaagtttgctgaatattgcaaggcacaaggtgagaaaccaaagaaatttggtttggacatgaaaataagatggaattcgacatacctaatgcttaagaaattagaaggatatgaagatctcattactgtctttgtg

SEQ ID NO: 21548 - DNA, 1104 bp, Zea Mays
acagaattttttgccccttcggccccacctcgtgatcacccgttccgtgctgctccgcctgccccacagcctacagttgggagttcaaacttcgagagccgaagcgaagcggggccatggggagatcacgagcgactgccgccgccgccacctccaggcccaggcgcaaccccaagccaaagccggactcccccttcctctccccgctcgcgtcgctgtctgccacaccgcgcatccgcacccgcaagggcgccatccgccgcggcggcccctcccacgcgtcgtcgtcgccgggttcttcccccaccggtctcaacgtcagattcctttcctcgccgggctccgcctccccgtcgaagcccaagccgaagctaaggtccagtgccaagcccaagtcgcgcccctccttcgtctccccgctctcgtcgccgtcacccgcaccacgtacccgcaaacgcaccgtccgcggcgtcggctcctcacctgcgtcgtcgtcgccggggtcctctccagccgaactcaacatcagcttgccctcctcgccgggcttctccgcctccccgccgaagcccagtgccagggccaatctcgccgcgcgcgcccccttcgtcgctagcccccgcaccgccacaccttcccccgccgcgtctccccagcctgcttcggtgtcggcgaaggggttatccagcgtcggagacctcaggaccgccgtcgcctcacagatggagaacctcaagcgccgactcgacgcgctccattcccgcgctcacgacgacctcgatgcgtccttctcccgcatctccaagcgaatcaagacccaaaaccaagcctgtcagcatctggcagatgaagttgacaaggagcacaagaagatgtctgataatataaaagaaagttctgagattgccagggcaaagtacaagcagatcatcgcagaggcacaagcttccacaactcgtgtgtgcaaggtgactatccctgagatgacaaaatctgtggagaaagctattgatggtctgtgtacccgatataatatctcaatgccagtttaattaccaagtacaagttctactcactacacttctgagtgatattgccaccaac

SEQ ID NO: 21549 - DNA, 1795 bp, Zea Mays
acagaattttttgccccttcggccccacctcgtgatcacccgttccgtgctgctccgcctgccccacagcctacagttgggagttcaaacttcgagagccgaagcgaagcggggccatggggagatcacgagcgactgccgccgccgccacctccaggcccaggcgcaaccccaagccaaagccggactcccccttcctctccccgctcgcgtcgctgtctgccacaccgcgcatccgcacccgcaagggcgccatccgccgcggcggcccctcccacgcgtcgtcgtcgccgggttcttcccccaccggtctcaacgtcagattcctttcctcgccgggctccgcctccccgtcgaagcccaagccgaagctaaggtccagtgccaagcccaagtcgcgcccctccttcgtctccccgctctcgtcgccgtcacccgcaccacgtacccgcaaacgcaccgtccgcggcgtcggctcctcacctgcgtcgtcgtcgccggggtcctctccagccgaactcaacatcagcttgccctcctcgccgggcttctccgcctccccgccgaagcccagtgccagggccaatctcgccgcgcgcgcccccttcgtcgctagcccccgcaccgccacaccttcccccgccgcgtctccccagcctgcttcggtgtcggcgaaggggttatccagcgtcggagacctcaggaccgccgtcgcctcacagatggagaacctcaagcgccgactcgacgcgctccattcccgcgctcacgacgacctcgatgcgtccttctcccgcatctccaagcgaatcaagagggtaaacaaataaggcctctatcggcggagatagttgatatatgttgggacaagtcgaaattctggaaagaataacaacaagacaacatcattattttcgaaatgctccttccctccgaaggtttcaaaggaagaagacccaaaaccaagcctgtcagcatctggcagatgaagttgacaaggagcacaagaagatgtctgataatataaaagaaagttctgagattgccagggcaaagtacaagcagatcatcgcagaggcacaagcttccacaactcgtgtgtgcaaggtgactatccctgagatgacaaaatctgtggagaaagctattgatggtctgtgtacccgatataatatctcaatgccagtttaattaccaagtacaagttctactcactacacttctgagtgatattgccaccaacgtccgcgcttccctacctagatcaagatgttcagggggcttggtaaggggaaagggaagaaaaagggtgaaagctcctacaggtccattcgatctaggtcgagtagggaggctgatcctactgttgacgttgttgggggccttcgttttcctaaggtcctcaataacatgaactaaccattggccatcagtatatttgtcaagcattgcaggagcttcagaatcagactacctttagtgtagaacgatggaagagtatcgaaggtagcttcgtcataacaacaatgggaaggtggtgcaaggagaaggtgtcaccacgaacaccaaaggcagaagacaatgctatccctgtactgtttgtaaatcttgtgtgcaattcttaatggcataagtgtaatttcatatgaagctatatgatttcgtataaatagatgaacagtgccccgcataaagtactttttggcggattgggcgatcattgtgtaattctctctcgacgacaccttcattgtaattctctctgaagaaccgaaggtacaattgtaaagttaat

SEQ ID NO: 21550 - DNA, 2480 bp, Zea Mays
ggaaccctttgttttccggcgacagaccccacggcaccgcacctgctcggcacgtcccgctatataaccgcttgaagttcttccgccgccacgtgctcgctgccgtcgccgcgccgcattcgcatcaccgcatcgcgccgccgaggctgcttactagacggacgaggagtggactggagtaacttgcagcaaccctatcccggcaggccccatcgcgaaaccctagacttcgccgccggcggtcgccggagatggcctcctcgccgccgcgcgccccgcagctattccctttcgaccttaacgtcgcgcaggaggaggtagatgaggagccgattgaggttcttgaggaggatgtcgatgaggagggagccccgttggcgcagccccaggaggttgtcgtcgaggaggttgttgagaaattggtcgagcacgcggtgcctatcacggaggatgaacctgcggaagacgtgatcatggaggagccttcggaggaggtgatcatggaggacgaggagcctacgccgtcgccggcggaggaggtggttggggaggggaagaggaggaaaaagagggtggactatgaggtcttcgtgtccgggctgccgcaggacgccgctgaggaggacgtggcgcaggcgctggcggatgccggagatatcgaggaggtgcgcctcgtgcgggatccggcggaccagcggctcaacaagggattcgcttttgtccgcttcgcggctgcatggcaggcccggtgggcggccaacgacctccgcgaggctacgattaagggaaaagcttgtggaatatgcaagaacagtgaaactgaaacccttcatctccgaaatatatgctttgattggtcaaaggatgatttagctgaaaaactgaaacccttcaagttggaaaacttggatagaattaatctaattgagcacccagacagaaagggtaaaaacagaggctatgcgtttcttgacttcaggactcatgtagatgctgtggaggcttttgtgaaactacaaaaaatagatctgtatcttggtactgactctagagcaaacatatcattttcaaacactctttcacaagatgatgagatcatggaaaaggtgaaatctgttttcttggatggcgtaccacctcactgggatgaagacaaagtgagagaaattttcgggaaatttggtgaaattgatagcatacaacttgctagaaatatgttcacggcagcacgaaaagattttggtttcattggctttacagcaagacagtcagctttagactgcattaagatggtcaataaagatggtgttggtgaaggtagtggaaaggttcccataaaagctagtttacaaaggccaaggcatgctttcaagaagtattcccggcaaggctcaagttccttgctaggcgtcagaagaggatttgtagataaaagttctagtggtagaggacaccactcggacagatataggcattttagtcctgtaaggcgttcgtattcagataatcattctcgccgtcactctattgatgttgaagagaggcatacttctgtgcgaggatacagagcttactatagaagagactctccagtgcatgccccaagctataaatatggaaggacacatctggagaccagaatcagcgaagaatatactgagggaagatacactagtaaatatccaaaacacagacacacgatgcatggaaccatggagcgagatgcaaaccgcaggatcaagtatggacattcataccaggagagggcacatagaacttgcccaggttgtaagctgtgtggtcaaaattacaattaccccaatggtgaggaattttctgcaatcagcggttgtcaggaggcatactaccagacagaccatgatctgattccttcaacttctcaagtagcatctcattgcgagggttcttgctgcaagcttcttacaattgaaacctgcattcttcagaatcaagagtcaacacctagttcaagtgaccatgccagaacaagatctaatcttccagcgccgcctcatcattggcatgttaaacattctaatgagcatcggaggtatgtatcatgaaagaaaggaaagccgaagctggtatctatcttccaaagatgctccaagtactcactccaggaagcaccataggccagcaagataagctgtaactgcaagatagagaaaatctagtagcagctcgcttctgatactgatggatagcatttgttaccggggccctgcttacgtggctgacaccctgttgcggggaggaatctgttccaaggacagcagtataccgtcccaatttataaccaaatactttgccttttctcggttctttgtattcgcgttcgatttctcgaaatgtggtgctgacaaatagggatgaaaacggaaactgtaatttttgaataacgggaattgtttttaaagtttaaccgaaatttaggtctaaacggaaatggaaacgat

SEQ ID NO: 21551 - DNA, 2446 bp, Zea Mays
gacagaccccacggcaccgcacctgctcggcacgtcccgctatataaccgcttgaagttcttccgccgccacgtgctcgctgccgtcgccgcgccgcattcgcatcaccgcatcgcgccgccgaggctgcttactagacggacgaggagtggactggagtaacttgcagcaaccctatcccggcaggccccatcgcgaaaccctagacttcgccgccggcggtcgccggagatggcctcctcgccgccgcgcgccccgcagctattccctttcgaccttaacgtcgcgcaggaggaggtagatgaggagccgattgaggttcttgaggaggatgtcgatgaggagggagccccgttggcgcagccccaggaggttgtcgtcgaggaggttgttgagaaattggtcgagcacgcggtgcctatcacggaggatgaacctgcggaagacgtgatcatggaggagccttcggaggaggtgatcatggaggacgaggagcctacgccgtcgccggcggaggaggtggttggggaggggaagaggaggaaaaagagggtggactatgaggtcttcgtgtccgggctgccgcaggacgccgctgaggaggacgtggcgcaggcgctggcggatgccggagatatcgaggaggtgcgcctcgtgcgggatccggcggaccagcggctcaacaagggattcgcttttgtccgcttcgcggctgcatggcaggcccggtgggcggccaacgacctccgcgaggctacgattaagggaaaagcttgtggaatatgcaagaacagtgaaactgaaacccttcatctccgaaatatatgctttgattggtcaaaggatgatttagctgaaaaactgaaacccttcaagttggaaaacttggatagaattaatctaattgagcacccagacagaaagggtaaaaacagaggctatgcgtttcttgacttcaggactcatgtagatgctgtggaggcttttgtgaaactacaaaaaatagatctgtatcttggtactgactctagagcaaacatatcattttcaaacactctttcacaagatgatgagatcatggaaaaggtgaaatctgttttcttggatggcgtaccacctcactgggatgaagacaaagtgagagaaattttcgggaaatttggtgaaattgatagcatacaacttgctagaaatatgttcacggcagcacgaaaagattttggtttcattggctttacagcaagacagtcagctttagactgcattaagatggtcaataaagatggtgttggtgaaggtagtggaaaggttcccataaaagctagtttacaaaggccaaggcatgctttcaagaagtattcccggcaaggctcaagttccttgctaggcgtcagaagaggatttgtagataaaagttctagtggtagaggacaccactcggacagatataggcattttagtcctgtaaggcgttcgtattcagataatcattctcgccgtcactctattgatgttgaagagaggcatacttctgtgcgaggatacagagcttactatagaagagactctccagtgcatgccccaagctataaatatggaaggacacatctggagaccagaatcagcgaagaatatactgagggaagatacactagtaaatatccaaaacacagacacacgatgcatggaaccatggagcgagatgcaaaccgcaggatcaagtatggacattcataccaggagagggcacatagaacttgcccaggttgtaagctgtgtggtcaaaattacaattaccccaatggtgaggaattttctgcaatcagcggttgtcaggaggcatactaccagacagaccatgatctgattccttcaacttctcaagtagcatctcattgcgagggttcttgctgcaagcttcttacaattgaaacctgcattcttcagaatcaagagtcaacacctagttcaagtgaccatgccagaacaagatctaatcttccagcgccgcctcatcattggcatgttaaacattctaatgagcatcggaggtcagggaaagccgaagctggtatctatcttccaaagatgctccaagtactcactccaggaagcaccataggccagcaagataagctgtaactgcaagatagagaaaatctagtagcagctcgcttctgatactgatggatagcatttgttaccggggccctgcttacgtggctgacaccctgttgcggggaggaatctgttccaaggacagcagtataccgtcccaatttataaccaaatactttgccttttctcggttctttgtattcgcgttcgatttctcgaaatgtggtgctgacaaatagggatgaaaacggaaactgtaatttttgaataacgggaattgtttttaaagtttaaccgaaatttaggtctaaacggaaatggaaacgat

SEQ ID NO: 21552 - DNA, 2478 bp, Zea Mays
gacagaccccacggcaccgcacctgctcggcacgtcccgctatataaccgcttgaagttcttccgccgccacgtgctcgctgccgtcgccgcgccgcattcgcatcaccgcatcgcgccgccgaggctgcttactagacggacgaggagtggactggagtaacttgcagcaaccctatcccggcaggccccatcgcgaaaccctagacttcgccgccggcggtcgccggagatggcctcctcgccgccgcgcgccccgcagctattccctttcgaccttaacgtcgcgcaggaggaggtagatgaggagccgattgaggttcttgaggaggatgtcgatgaggagggagccccgttggcgcagccccaggaggttgtcgtcgaggaggttgttgagaaattggtcgagcacgcggtgcctatcacggaggatgaacctgcggaagacgtgatcatggaggagccttcggaggaggtgatcatggaggacgaggagcctacgccgtcgccggcggaggaggtggttggggaggggaagaggaggaaaaagagggtggactatgaggtcttcgtgtccgggctgccgcaggacgccgctgaggaggacgtggcgcaggcgctggcggatgccggagatatcgaggaggtgcgcctcgtgcgggatccggcggaccagcggctcaacaagggattcgcttttgtccgcttcgcggctgcatggcaggcccggtgggcggccaacgacctccgcgaggctacgattaagggaaaagcttgtggaatatgcaagaacagtgaaactgaaacccttcatctccgaaatatatgctttgattggtcaaaggatgatttagctgaaaaactgaaacccttcaagttggaaaacttggatagaattaatctaattgagcacccagacagaaagggtaaaaacagaggctatgcgtttcttgacttcaggactcatgtagatgctgtggaggcttttgtgaaactacaaaaaatagatctgtatcttggtactgactctagagcaaacatatcattttcaaacactctttcacaagatgatgagatcatggaaaaggtgaaatctgttttcttggatggcgtaccacctcactgggatgaagacaaagtgagagaaattttcgggaaatttggtgaaattgatagcatacaacttgctagaaatatgttcacggcagcacgaaaagattttggtttcattggctttacagcaagacagtcagctttagactgcattaagatggtcaataaagatggtgttggtgaaggtagtggaaaggttcccataaaagctagtttacaaaggccaaggcatgctttcaagaagtattcccggcaaggctcaagttccttgctaggcgtcagaagaggatttgtagataaaagttctagtggtagaggacaccactcggacagatataggcattttagtcctgtaaggcgttcgtattcagataatcattctcgccgtcactctattgatgttgaagagaggcatacttctgtgcgaggatacagagcttactatagaagagactctccagtgcatgccccaagctataaatatggaaggacacatctggagaccagaatcagcgaagaatatactgagggaagatacactagtaaatatccaaaacacagacacacgatgcatggaaccatggagcgagatgcaaaccgcaggatcaagtatggacattcataccaggagagggcacatagaacttgcccaggttgtaagctgtgtggtcaaaattacaattaccccaatggtgaggaattttctgcaatcagcggttgtcaggaggcatactaccagacagaccatgatctgattccttcaacttctcaagtagcatctcattgcgagggttcttgctgcaagcttcttacaattgaaacctgcattcttcagaatcaagagtcaacacctagttcaagtgaccatgccagaacaagatctaatcttccagcgccgcctcatcattggcatgttaaacattctaatgagcatcggagggcatgttactgatgcacattctgcttttgaggtcagggaaagccgaagctggtatctatcttccaaagatgctccaagtactcactccaggaagcaccataggccagcaagataagctgtaactgcaagatagagaaaatctagtagcagctcgcttctgatactgatggatagcatttgttaccggggccctgcttacgtggctgacaccctgttgcggggaggaatctgttccaaggacagcagtataccgtcccaatttataaccaaatactttgccttttctcggttctttgtattcgcgttcgatttctcgaaatgtggtgctgacaaatagggatgaaaacggaaactgtaatttttgaataacgggaattgtttttaaagtttaaccgaaatttaggtctaaacggaaatggaaacgat

SEQ ID NO: 21553 - DNA, 2477 bp, Zea Mays
gacagaccccacggcaccgcacctgctcggcacgtcccgctatataaccgcttgaagttcttccgccgccacgtgctcgctgccgtcgccgcgccgcattcgcatcaccgcatcgcgccgccgaggctgcttactagacggacgaggagtggactggagtaacttgcagcaaccctatcccggcaggccccatcgcgaaaccctagacttcgccgccggcggtcgccggagatggcctcctcgccgccgcgcgccccgcagctattccctttcgaccttaacgtcgcgcaggaggaggtagatgaggagccgattgaggttcttgaggaggatgtcgatgaggagggagccccgttggcgcagccccaggaggttgtcgtcgaggaggttgttgagaaattggtcgagcacgcggtgcctatcacggaggatgaacctgcggaagacgtgatcatggaggagccttcggaggaggtgatcatggaggacgaggagcctacgccgtcgccggcggaggaggtggttggggaggggaagaggaggaaaaagagggtggactatgaggtcttcgtgtccgggctgccgcaggacgccgctgaggaggacgtggcgcaggcgctggcggatgccggagatatcgaggaggtgcgcctcgtgcgggatccggcggaccagcggctcaacaagggattcgcttttgtccgcttcgcggctgcatggcaggcccggtgggcggccaacgacctccgcgaggctacgattaagggaaaagcttgtggaatatgcaagaacagtgaaactgaaacccttcatctccgaaatatatgctttgattggtcaaaggatgatttagctgaaaaactgaaacccttcaagttggaaaacttggatagaattaatctaattgagcacccagacagaaagggtaaaaacagaggctatgcgtttcttgacttcaggactcatgtagatgctgtggaggcttttgtgaaactacaaaaaatagatctgtatcttggtactgactctagagcaaacatatcattttcaaacactctttcacaagatgatgagatcatggaaaaggtgaaatctgttttcttggatggcgtaccacctcactgggatgaagacaaagtgagagaaattttcgggaaatttggtgaaattgatagcatacaacttgctagaaatatgttcacggcagcacgaaaagattttggtttcattggctttacagcaagacagtcagctttagactgcattaagatggtcaataaagatggtgttggtgaaggtagtggaaaggttcccataaaagctagtttacaaaggccaaggcatgctttcaagaagtattcccggcaaggctcaagttccttgctaggcgtcagaagaggatttgtagataaaagttctagtggtagaggacaccactcggacagatataggcattttagtcctgtaaggcgttcgtattcagataatcattctcgccgtcactctattgatgttgaagagaggcatacttctgtgcgaggatacagagcttactatagaagagactctccagtgcatgccccaagctataaatatggaaggacacatctggagaccagaatcagcgaagaatatactgagggaagatacactagtaaatatccaaaacacagacacacgatgcatggaaccatggagcgagatgcaaaccgcaggatcaagtatggacattcataccaggagagggcacatagaacttgcccaggttgtaagctgtgtggtcaaaattacaattaccccaatggtgaggaattttctgcaatcagcggttgtcaggaggcatactaccagacagaccatgatctgattccttcaacttctcaagtagcatctcattgcgagggttcttgctgcaagcttcttacaattgaaacctgcattcttcagaatcaagagtcaacacctagttcaagtgaccatgccagaacaagatctaatcttccagcgccgcctcatcattggcatgttaaacattctaatgagcatcggaggcatgttactgatgcacattctgcttttgaggtcagggaaagccgaagctggtatctatcttccaaagatgctccaagtactcactccaggaagcaccataggccagcaagataagctgtaactgcaagatagagaaaatctagtagcagctcgcttctgatactgatggatagcatttgttaccggggccctgcttacgtggctgacaccctgttgcggggaggaatctgttccaaggacagcagtataccgtcccaatttataaccaaatactttgccttttctcggttctttgtattcgcgttcgatttctcgaaatgtggtgctgacaaatagggatgaaaacggaaactgtaatttttgaataacgggaattgtttttaaagtttaaccgaaatttaggtctaaacggaaatggaaacgat

SEQ ID NO: 21554 - DNA, 2411 bp, Zea Mays
gacagaccccacggcaccgcacctgctcggcacgtcccgctatataaccgcttgaagttcttccgccgccacgtgctcgctgccgtcgccgcgccgcattcgcatcaccgcatcgcgccgccgaggctgcttactagacggacgaggagtggactggagtaacttgcagcaaccctatcccggcaggccccatcgcgaaaccctagacttcgccgccggcggtcgccggagatggcctcctcgccgccgcgcgccccgcagctattccctttcgaccttaacgtcgcgcaggaggaggtagatgaggagccgattgaggttcttgaggaggatgtcgatgaggagggagccccgttggcgcagccccaggaggttgtcgtcgaggaggttgttgagaaattggtcgagcacgcggtgcctatcacggaggatgaacctgcggaagacgtgatcatggaggagccttcggaggaggtgatcatggaggacgaggagcctacgccgtcgccggcggaggaggtggttggggaggggaagaggaggaaaaagagggtggactatgaggtcttcgtgtccgggctgccgcaggacgccgctgaggaggacgtggcgcaggcgctggcggatgccggagatatcgaggaggtgcgcctcgtgcgggatccggcggaccagcggctcaacaagggattcgcttttgtccgcttcgcggctgcatggcaggcccggtgggcggccaacgacctccgcgaggctacgattaagggaaaagcttgtggaatatgcaagaacagtgaaactgaaacccttcatctccgaaatatatgctttgattggtcaaaggatgatttagctgaaaaactgaaacccttcaagttggaaaacttggatagaattaatctaattgagcacccagacagaaagggtaaaaacagaggctatgcgtttcttgacttcaggactcatgtagatgctgtggaggcttttgtgaaactacaaaaaatagatctgtatcttggtactgactctagagcaaacatatcattttcaaacactctttcacaagatgatgagatcatggaaaaggtgaaatctgttttcttggatggcgtaccacctcactgggatgaagacaaagtgagagaaattttcgggaaatttggtgaaattgatagcatacaacttgctagaaatatgttcacggcagcacgaaaagattttggtttcattggctttacagcaagacagtcagctttagactgcattaagatggtcaataaagatggtgttggtgaaggtagtggaaaggttcccataaaagctagtttacaaaggccaaggcatgctttcaagaagtattcccggcaaggctcaagttccttgctaggcgtcagaagaggatttgtagataaaagttctagtggtagaggacaccactcggacagatataggcattttagtcctgtaaggcgttcgtattcagataatcattctcgccgtcactctattgatgttgaagagaggcatacttctgtgcgaggatacagagcttactatagaagagactctccagtgcatgccccaagctataaatatggaaggacacatctggagaccagaatcagcgaagaatatactgagggaagatacactagtaaatatccaaaacacagacacacgatgcatggaaccatggagcgagatgcaaaccgcaggatcaagtatggacattcataccaggagagggcacatagaacttgcccaggttgtaagctgtgtggtcaaaattacaattaccccaatggtgaggaattttctgcaatcagcggttgtcaggaggcatactaccagacagaccatgatctgattccttcaacttctcaagtagcatctcattgcgagggttcttgctgcaagaatcaagagtcaacacctagttcaagtgaccatgccagaacaagatctaatcttccagcgccgcctcatcattggcatgttaaacattctaatgagcatcggagggaaagccgaagctggtatctatcttccaaagatgctccaagtactcactccaggaagcaccataggccagcaagataagctgtaactgcaagatagagaaaatctagtagcagctcgcttctgatactgatggatagcatttgttaccggggccctgcttacgtggctgacaccctgttgcggggaggaatctgttccaaggacagcagtataccgtcccaatttataaccaaatactttgccttttctcggttctttgtattcgcgttcgatttctcgaaatgtggtgctgacaaatagggatgaaaacggaaactgtaatttttgaataacgggaattgtttttaaagtttaaccgaaatttaggtctaaacggaaatggaaacgat

SEQ ID NO: 21555 - DNA, 2470 bp, Zea Mays
gacagaccccacggcaccgcacctgctcggcacgtcccgctatataaccgcttgaagttcttccgccgccacgtgctcgctgccgtcgccgcgccgcattcgcatcaccgcatcgcgccgccgaggctgcttactagacggacgaggagtggactggagtaacttgcagcaaccctatcccggcaggccccatcgcgaaaccctagacttcgccgccggcggtcgccggagatggcctcctcgccgccgcgcgccccgcagctattccctttcgaccttaacgtcgcgcaggaggaggtagatgaggagccgattgaggttcttgaggaggatgtcgatgaggagggagccccgttggcgcagccccaggaggttgtcgtcgaggaggttgttgagaaattggtcgagcacgcggtgcctatcacggaggatgaacctgcggaagacgtgatcatggaggagccttcggaggaggtgatcatggaggacgaggagcctacgccgtcgccggcggaggaggtggttggggaggggaagaggaggaaaaagagggtggactatgaggtcttcgtgtccgggctgccgcaggacgccgctgaggaggacgtggcgcaggcgctggcggatgccggagatatcgaggaggtgcgcctcgtgcgggatccggcggaccagcggctcaacaagggattcgcttttgtccgcttcgcggctgcatggcaggcccggtgggcggccaacgacctccgcgaggctacgattaagggaaaagcttgtggaatatgcaagaacagtgaaactgaaacccttcatctccgaaatatatgctttgattggtcaaaggatgatttagctgaaaaactgaaacccttcaagttggaaaacttggatagaattaatctaattgagcacccagacagaaagggtaaaaacagaggctatgcgtttcttgacttcaggactcatgtagatgctgtggaggcttttgtgaaactacaaaaaatagatctgtatcttggtactgactctagagcaaacatatcattttcaaacactctttcacaagatgatgagatcatggaaaaggtgaaatctgttttcttggatggcgtaccacctcactgggatgaagacaaagtgagagaaattttcgggaaatttggtgaaattgatagcatacaacttgctagaaatatgttcacggcagcacgaaaagattttggtttcattggctttacagcaagacagtcagctttagactgcattaagatggtcaataaagatggtgttggtgaaggtagtggaaaggttcccataaaagctagtttacaaaggccaaggcatgctttcaagaagtattcccggcaaggctcaagttccttgctaggcgtcagaagaggatttgtagataaaagttctagtggtagaggacaccactcggacagatataggcattttagtcctgtaaggcgttcgtattcagataatcattctcgccgtcactctattgatgttgaagagaggcatacttctgtgcgaggatacagagcttactatagaagagactctccagtgcatgccccaagctataaatatggaaggacacatctggagaccagaatcagcgaagaatatactgagggaagatacactagtaaatatccaaaacacagacacacgatgcatggaaccatggagcgagatgcaaaccgcaggatcaagtatggacattcataccaggagagggcacatagaacttgcccaggttgtaagctgtgtggtcaaaattacaattaccccaatggtgaggaattttctgcaatcagcggttgtcaggaggcatactaccagacagaccatgatctgattccttcaacttctcaagtagcatctcattgcgagggttcttgctgcaagggccagcagttgaaaccgaaaagttattctgtgatgcgtgattatgactatatcaatcaagagtcaacacctagttcaagtgaccatgccagaacaagatctaatcttccagcgccgcctcatcattggcatgttaaacattctaatgagcatcggaggtcagggaaagccgaagctggtatctatcttccaaagatgctccaagtactcactccaggaagcaccataggccagcaagataagctgtaactgcaagatagagaaaatctagtagcagctcgcttctgatactgatggatagcatttgttaccggggccctgcttacgtggctgacaccctgttgcggggaggaatctgttccaaggacagcagtataccgtcccaatttataaccaaatactttgccttttctcggttctttgtattcgcgttcgatttctcgaaatgtggtgctgacaaatagggatgaaaacggaaactgtaatttttgaataacgggaattgtttttaaagtttaaccgaaatttaggtctaaacggaaatggaaacgat

SEQ ID NO: 21556 - DNA, 2494 bp, Zea Mays
gacagaccccacggcaccgcacctgctcggcacgtcccgctatataaccgcttgaagttcttccgccgccacgtgctcgctgccgtcgccgcgccgcattcgcatcaccgcatcgcgccgccgaggctgcttactagacggacgaggagtggactggagtaacttgcagcaaccctatcccggcaggccccatcgcgaaaccctagacttcgccgccggcggtcgccggagatggcctcctcgccgccgcgcgccccgcagctattccctttcgaccttaacgtcgcgcaggaggaggtagatgaggagccgattgaggttcttgaggaggatgtcgatgaggagggagccccgttggcgcagccccaggaggttgtcgtcgaggaggttgttgagaaattggtcgagcacgcggtgcctatcacggaggatgaacctgcggaagacgtgatcatggaggagccttcggaggaggtgatcatggaggacgaggagcctacgccgtcgccggcggaggaggtggttggggaggggaagaggaggaaaaagagggtggactatgaggtcttcgtgtccgggctgccgcaggacgccgctgaggaggacgtggcgcaggcgctggcggatgccggagatatcgaggaggtgcgcctcgtgcgggatccggcggaccagcggctcaacaagggattcgcttttgtccgcttcgcggctgcatggcaggcccggtgggcggccaacgacctccgcgaggctacgattaagggaaaagcttgtggaatatgcaagaacagtgaaactgaaacccttcatctccgaaatatatgctttgattggtcaaaggatgatttagctgaaaaactgaaacccttcaagttggaaaacttggatagaattaatctaattgagcacccagacagaaagggtaaaaacagaggctatgcgtttcttgacttcaggactcatgtagatgctgtggaggcttttgtgaaactacaaaaaatagatctgtatcttggtactgactctagagcaaacatatcattttcaaacactctttcacaagatgatgagatcatggaaaaggtgaaatctgttttcttggatggcgtaccacctcactgggatgaagacaaagtgagagaaattttcgggaaatttggtgaaattgatagcatacaacttgctagaaatatgttcacggcagcacgaaaagattttggtttcattggctttacagcaagacagtcagctttagactgcattaagatggtcaataaagatggtgttggtgaaggtagtggaaaggttcccataaaagctagtttacaaaggccaaggcatgctttcaagaagtattcccggcaaggctcaagttccttgctaggcgtcagaagaggatttgtagataaaagttctagtggtagaggacaccactcggacagatataggcattttagtcctgtaaggcgttcgtattcagataatcattctcgccgtcactctattgatgttgaagagaggcatacttctgtgcgaggatacagagcttactatagaagagactctccagtgcatgccccaagctataaatatggaaggacacatctggagaccagaatcagcgaagaatatactgagggaagatacactagtaaatatccaaaacacagacacacgatgcatggaaccatggagcgagatgcaaaccgcaggatcaagtatggacattcataccaggagagggcacatagaacttgcccaggttgtaagctgtgtggtcaaaattacaattaccccaatggtgaggaattttctgcaatcagcggttgtcaggaggcatactaccagacagaccatgatctgattccttcaacttctcaagtagcatctcattgcgagggttcttgctgcaagggccagcagttgaaaccgaaaagttattctgtgatgcgtgattatgactatatcagtcaacacctagttcaagtgaccatgccagaacaagatctaatcttccagcgccgcctcatcattggcatgttaaacattctaatgagcatcggaggcatgttactgatgcacattctgcttttgaggtcagggaaagccgaagctggtatctatcttccaaagatgctccaagtactcactccaggaagcaccataggccagcaagataagctgtaactgcaagatagagaaaatctagtagcagctcgcttctgatactgatggatagcatttgttaccggggccctgcttacgtggctgacaccctgttgcggggaggaatctgttccaaggacagcagtataccgtcccaatttataaccaaatactttgccttttctcggttctttgtattcgcgttcgatttctcgaaatgtggtgctgacaaatagggatgaaaacggaaactgtaatttttgaataacgggaattgtttttaaagtttaaccgaaatttaggtctaaacggaaatggaaacgat

SEQ ID NO: 21557 - DNA, 2501 bp, Zea Mays
gacagaccccacggcaccgcacctgctcggcacgtcccgctatataaccgcttgaagttcttccgccgccacgtgctcgctgccgtcgccgcgccgcattcgcatcaccgcatcgcgccgccgaggctgcttactagacggacgaggagtggactggagtaacttgcagcaaccctatcccggcaggccccatcgcgaaaccctagacttcgccgccggcggtcgccggagatggcctcctcgccgccgcgcgccccgcagctattccctttcgaccttaacgtcgcgcaggaggaggtagatgaggagccgattgaggttcttgaggaggatgtcgatgaggagggagccccgttggcgcagccccaggaggttgtcgtcgaggaggttgttgagaaattggtcgagcacgcggtgcctatcacggaggatgaacctgcggaagacgtgatcatggaggagccttcggaggaggtgatcatggaggacgaggagcctacgccgtcgccggcggaggaggtggttggggaggggaagaggaggaaaaagagggtggactatgaggtcttcgtgtccgggctgccgcaggacgccgctgaggaggacgtggcgcaggcgctggcggatgccggagatatcgaggaggtgcgcctcgtgcgggatccggcggaccagcggctcaacaagggattcgcttttgtccgcttcgcggctgcatggcaggcccggtgggcggccaacgacctccgcgaggctacgattaagggaaaagcttgtggaatatgcaagaacagtgaaactgaaacccttcatctccgaaatatatgctttgattggtcaaaggatgatttagctgaaaaactgaaacccttcaagttggaaaacttggatagaattaatctaattgagcacccagacagaaagggtaaaaacagaggctatgcgtttcttgacttcaggactcatgtagatgctgtggaggcttttgtgaaactacaaaaaatagatctgtatcttggtactgactctagagcaaacatatcattttcaaacactctttcacaagatgatgagatcatggaaaaggtgaaatctgttttcttggatggcgtaccacctcactgggatgaagacaaagtgagagaaattttcgggaaatttggtgaaattgatagcatacaacttgctagaaatatgttcacggcagcacgaaaagattttggtttcattggctttacagcaagacagtcagctttagactgcattaagatggtcaataaagatggtgttggtgaaggtagtggaaaggttcccataaaagctagtttacaaaggccaaggcatgctttcaagaagtattcccggcaaggctcaagttccttgctaggcgtcagaagaggatttgtagataaaagttctagtggtagaggacaccactcggacagatataggcattttagtcctgtaaggcgttcgtattcagataatcattctcgccgtcactctattgatgttgaagagaggcatacttctgtgcgaggatacagagcttactatagaagagactctccagtgcatgccccaagctataaatatggaaggacacatctggagaccagaatcagcgaagaatatactgagggaagatacactagtaaatatccaaaacacagacacacgatgcatggaaccatggagcgagatgcaaaccgcaggatcaagtatggacattcataccaggagagggcacatagaacttgcccaggttgtaagctgtgtggtcaaaattacaattaccccaatggtgaggaattttctgcaatcagcggttgtcaggaggcatactaccagacagaccatgatctgattccttcaacttctcaagtagcatctcattgcgagggttcttgctgcaagggccagcagttgaaaccgaaaagttattctgtgatgcgtgattatgactatatcaatcaagagtcaacacctagttcaagtgaccatgccagaacaagatctaatcttccagcgccgcctcatcattggcatgttaaacattctaatgagcatcggaggcatgttactgatgcacattctgcttttgaggtcagggaaagccgaagctggtatctatcttccaaagatgctccaagtactcactccaggaagcaccataggccagcaagataagctgtaactgcaagatagagaaaatctagtagcagctcgcttctgatactgatggatagcatttgttaccggggccctgcttacgtggctgacaccctgttgcggggaggaatctgttccaaggacagcagtataccgtcccaatttataaccaaatactttgccttttctcggttctttgtattcgcgttcgatttctcgaaatgtggtgctgacaaatagggatgaaaacggaaactgtaatttttgaataacgggaattgtttttaaagtttaaccgaaatttaggtctaaacggaaatggaaacgat

SEQ ID NO: 21558 - DNA, 2441 bp, Zea Mays
gacagaccccacggcaccgcacctgctcggcacgtcccgctatataaccgcttgaagttcttccgccgccacgtgctcgctgccgtcgccgcgccgcattcgcatcaccgcatcgcgccgccgaggctgcttactagacggacgaggagtggactggagtaacttgcagcaaccctatcccggcaggccccatcgcgaaaccctagacttcgccgccggcggtcgccggagatggcctcctcgccgccgcgcgccccgcagctattccctttcgaccttaacgtcgcgcaggaggaggtagatgaggagccgattgaggttcttgaggaggatgtcgatgaggagggagccccgttggcgcagccccaggaggttgtcgtcgaggaggttgttgagaaattggtcgagcacgcggtgcctatcacggaggatgaacctgcggaagacgtgatcatggaggagccttcggaggaggtgatcatggaggacgaggagcctacgccgtcgccggcggaggaggtggttggggaggggaagaggaggaaaaagagggtggactatgaggtcttcgtgtccgggctgccgcaggacgccgctgaggaggacgtggcgcaggcgctggcggatgccggagatatcgaggaggtgcgcctcgtgcgggatccggcggaccagcggctcaacaagggattcgcttttgtccgcttcgcggctgcatggcaggcccggtgggcggccaacgacctccgcgaggctacgattaagggaaaagcttgtggaatatgcaagaacagtgaaactgaaacccttcatctccgaaatatatgctttgattggtcaaaggatgatttagctgaaaaactgaaacccttcaagttggaaaacttggatagaattaatctaattgagcacccagacagaaagggtaaaaacagaggctatgcgtttcttgacttcaggactcatgtagatgctgtggaggcttttgtgaaactacaaaaaatagatctgtatcttggtactgactctagagcaaacatatcattttcaaacactctttcacaagatgatgagatcatggaaaaggtgaaatctgttttcttggatggcgtaccacctcactgggatgaagacaaagtgagagaaattttcgggaaatttggtgaaattgatagcatacaacttgctagaaatatgttcacggcagcacgaaaagattttggtttcattggctttacagcaagacagtcagctttagactgcattaagatggtcaataaagatggtgttggtgaaggtagtggaaaggttcccataaaagctagtttacaaaggccaaggcatgctttcaagaagtattcccggcaaggctcaagttccttgctaggcgtcagaagaggatttgtagataaaagttctagtggtagaggacaccactcggacagatataggcattttagtcctgtaaggcgttcgtattcagataatcattctcgccgtcactctattgatgttgaagagaggcatacttctgtgcgaggatacagagcttactatagaagagactctccagtgcatgccccaagctataaatatggaaggacacatctggagaccagaatcagcgaagaatatactgagggaagatacactagtaaatatccaaaacacagacacacgatgcatggaaccatggagcgagatgcaaaccgcaggatcaagtatggacattcataccaggagagggcacatagaacttgcccaggttgtaagctgtgtggtcaaaattacaattaccccaatggtgaggaattttctgcaatcagcggttgtcaggaggcatactaccagacagaccatgatctgattccttcaacttctcaagtagcatctcattgcgagggttcttgctgcaagcttcttacaattgaaacctgcattcttcagaatcaagagtcaacacctagttcaagtgaccatgccagaacaagatctaatcttccagcgccgcctcatcattggcatgttaaacattctaatgagcatcggagggaaagccgaagctggtatctatcttccaaagatgctccaagtactcactccaggaagcaccataggccagcaagataagctgtaactgcaagatagagaaaatctagtagcagctcgcttctgatactgatggatagcatttgttaccggggccctgcttacgtggctgacaccctgttgcggggaggaatctgttccaaggacagcagtataccgtcccaatttataaccaaatactttgccttttctcggttctttgtattcgcgttcgatttctcgaaatgtggtgctgacaaatagggatgaaaacggaaactgtaatttttgaataacgggaattgtttttaaagtttaaccgaaatttaggtctaaacggaaatggaaacgat

SEQ ID NO: 21559 - DNA, 1731 bp, Zea Mays
cataatgggcttggcccaaacaaagattaagggaaaagcttgtggaatatgcaagaacagtgaaactgaaacccttcatctccgaaatatatgctttgattggtcaaaggatgatttagctgaaaaactgaaacccttcaagttggaaaacttggatagaattaatctaattgagcacccagacagaaagggtaaaaacagaggctatgcgtttcttgacttcaggactcatgtagatgctgtggaggcttttgtgaaactacaaaaaatagatctgtatcttggtactgactctagagcaaacatatcattttcaaacactctttcacaagatgatgagatcatggaaaaggtgaaatctgttttcttggatggcgtaccacctcactgggatgaagacaaagtgagagaaattttcgggaaatttggtgaaattgatagcatacaacttgctagaaatatgttcacggcagcacgaaaagattttggtttcattggctttacagcaagacagtcagctttagactgcattaagatggtcaataaagatggtgttggtgaaggtagtggaaaggttcccataaaagctagtttacaaaggccaaggcatgctttcaagaagtattcccggcaaggctcaagttccttgctaggcgtcagaagaggatttgtagataaaagttctagtggtagaggacaccactcggacagatataggcattttagtcctgtaaggcgttcgtattcagataatcattctcgccgtcactctattgatgttgaagagaggcatacttctgtgcgaggatacagagcttactatagaagagactctccagtgcatgccccaagctataaatatggaaggacacatctggagaccagaatcagcgaagaatatactgagggaagatacactagtaaatatccaaaacacagacacacgatgcatggaaccatggagcgagatgcaaaccgcaggatcaagtatggacattcataccaggagagggcacatagaacttgcccaggttgtaagctgtgtggtcaaaattacaattaccccaatggtgaggaattttctgcaatcagcggttgtcaggaggcatactaccagacagaccatgatctgattccttcaacttctcaagtagcatctcattgcgagggttcttgctgcaagggccagcagttgaaaccgaaaagttattctgtgatgcgtgattatgactatatcaatcaagagtcaacacctagttcaagtgaccatgccagaacaagatctaatcttccagcgccgcctcatcattggcatgttaaacattctaatgagcatcggagggaaagccgaagctggtatctatcttccaaagatgctccaagtactcactccaggaagcaccataggccagcaagataagctgtaactgcaagatagagaaaatctagtagcagctcgcttctgatactgatggatagcatttgttaccggggccctgcttacgtggctgacaccctgttgcggggaggaatctgttccaaggacagcagtataccgtcccaatttataaccaaatactttgccttttctcggttctttgtattcgcgttcgatttctcgaaatgtggtgctgacaaatagggatgaaaacggaaactgtaatttttgaataacgggaattgtttttaaagtttaaccgaaatttaggtctaaacggaaatggaaacgat

SEQ ID NO: 21560 - DNA, 825 bp, Zea Mays
atgatgctcatgacatttcccaatgcaacaaaatatctgaaaaaggtggggggctatcgcgtcggctacgacatcaagctctctggcaccgagtcccctaggtcggtcacggggctcgagggcgtccgcgtccgtgtgctatttgcctgggtgctcatcaccggcgtcgaggcgaccgacggagaggtcactgtccacatcgagccaatcaggaagtcgttccccgccattgggttcaaatccagccctcggtgcatcatcggattggcgacgggggtggagactaaggatccaagccactatcacggaccacaacatcaagtgtatgaggcagggcaaagaggccaacaggtgcaggttttcctcatttttattagatcctttcttagcgatcttggatctccactctccaggactccaggtcttgtgatatgtgtgttctcgtggcatgctgccttttcagtattggacaatgctaatggagttacaactccaaggacaggaaggtttaagcaagtcaaggatggactgctttctgcagtttcggaaatgcaatactgcgctagagagatgaggaagattattaactcgctatggacaatgaatttgaatgaagtgtcgtcgagacttcaagagatggctgtgtttctcgaagaaaacactatgtacataggggaactgggaggggtaactgatgccgactgggcacttgacaatggaggatatttgagatggttcaatgtaatctatggtgataatatgaaccatgtgggtggttgtagggtgcttttatctgaaacatctctatgtgattaaagagacaag

SEQ ID NO: 21561 - DNA, 924 bp, Zea Mays
atgatgctcatgacatttcccaatgcaacaaaatatctgaaaaagtgctcgatggttgtgtggaagaggtggggggctatcgcgtcggctacgacatcaagctctctggcaccgagtcccctaggtcggtcacggggctcgagggcgtccgcgtccgtgtgctatttgcctgggtgctcatcaccggcgtcgaggcgaccgacggagaggtcactgtccacatcgagccaatcaggaagtcgttccccgccattgggttcaaatccagccctcggtgcatcatcggattggcgacgggggtggagactaaggatccaagccactatcacggaccacaacatcaagtgtatgaggcagggcaaagaggccaacaggtgcaggttttcctcatttttattagatcctttcttagcgatcttggatctccactctccaggactccaggtcttgtgatatgtgtgttctcgtggcatgctgccttttcagtattggacaatgctaatggagttacaactccaaggacaggaaggtttaagcaagtcaaggatggactgctttctgcagtttcggaaatgcaatactgcgctagagagatgaggaagattattaactcgctatggacaatgaatttgaatgaagtgtcgtcgagacttcaagagatggctgtgtttctcgaaggtgcagctgatcgtggtcatatggctgctgaggagcttagtcctccccgcctcaatttctaatgatttgtatgcagaaaacactatgtacataggggaactgggaggggtaactgatgccgactgggcacttgacaatggaggatatttgagatggttcaatgtaatctatggtgataatatgaaccatgtgggtggttgtagggtgcttttatctgaaacatctctatgtgattaaagagacaag

SEQ ID NO: 21562 - DNA, 1380 bp, Zea Mays
atgatgctcatgacatttcccaatgcaacaaaatatctgaaaaaggtggggggctatcgcgtcggctacgacatcaagctctctggcaccgagtcccctaggtcggtcacggggctcgagggcgtccgcgtccgtgtgctatttgcctgggtgctcatcaccggcgtcgaggcgaccgacggagaggtcactgtccacatcgagccaatcaggaagtcgttccccgccattgggttcaaatccagccctcggtgcatcatcggattggcgacgggggtggagactaaggatccaagccactatcacggaccacaacatcaagtgtatgaggcagggcaaagaggccaacaggtgcaggttttcctcatttttattagatcctttcttagcgatcttggatctccactctccaggactccagggtttgccgttttcttgacgatcacacgtatcaaaaagggttctcaagtattattggtaaagtatcacaattagatatagcttgaagttgcattttacgcgttgagctatcacattgtagactaacttgtacagttttcttttgcagtccttcttgcttgctttcacatttggggtcttctgctattatttacgttgattatttttcccctgcaatttggcatgcatacaaacatttgctctctatttttctatccaacacttgttcctccccgacggtgcattcagcaacaccgtcttcttctccgtgtcggagcaccttgggccacaggggcgaacccgtgaacgacattctttcggcgtgtcacgacctcctgtcgcaagctcgatgctctccccatcgacacacgagccccttggaggggccccgacctagattttactgagatttctcctcatcaacctagatcttagtttctctggattttactgagcactcaacattgtgttttttggttgctgtattggacaatgctaatggagttacaactccaaggacaggaaggtttaagcaagtcaaggatggactgctttctgcagtttcggaaatgcaatactgcgctagagagatgaggaagattattaactcgctatggacaatgaatttgaatgaagtgtcgtcgagacttcaagagatggctgtgtttctcgaaggtgcagctgatcgtggtcatatggctgctgaggagcttagtcctccccgcctcaatttctaatgatttgtatgcagaaaacactatgtacataggggaactgggaggggtaactgatgccgactgggcacttgacaatggaggatatttgagatggttcaatgtaatctatggtgataatatgaaccatgtgggtggttgtagggtgcttttatctgaaacatctctatgtgattaaagagacaag

SEQ ID NO: 21563 - DNA, 557 bp, Zea Mays
ctgaaagctagcccaaactcccatccgtgcggtcaactgctcctgctggtttctgttaccgaagattgggataggtgggacatcaaacaaatcctaacaaactcaccgctaccacctgtagtcttggccatgagtttatctgctgccggattctccgtgccatggccggtcttccttttctcccctgccgaactcaaggtctgctatctcctgcgcatccggcggggattccgggagcaacaagaacaccgcaacaaccgcgaggaatccatcctttctccccccgtgctataaaaaccgggcgtcgtgtttcccctgcccaccaaaaccaaatccagaactctccctgggaatttggtggccgatttgccaccgcgtgggtgtggtggggcatgcgccgaacgacttctgcgttggagctccagcgccaggggggaaactgtcgcgccatcgctgggccgcggctcagattgctggggtggccggagtcaccggatcggaattcagaacactagcgtcgacgacacggggcgctcaagcgtgaggacacgtgtcat

SEQ ID NO: 21564 - DNA, 1104 bp, Zea Mays
acctactctccgctccctccataaatagctccaccctctcgctctcactcccccacctcacgcactcatccattcggccattccttaacatccttgttgcaagcggcgccagcttgctcgcgctctctcgcagctgctacgctaaagcaagtctagtctctagaggaggaggcggagggggaggccatgggcaaggacgacgtggtccagagcggcgcgggcggcggggagttcgccgccaaggactacacggacccgccgccggcgccgctggtggacgcggcggagctgggttcgtggtcgctgtaccgcgcggtgatcgcggagttcatcgcgacgctgctgttcctgttctggctcccctccccatcggcttcgccgtgttcatggtccacctggccaccatccccgtcaccggcaccggcatcaacccggccaggagcctgggcgccgccgtcgtctacaacaaggacaagccatgggatgaccactggattttctgggtgggcccgctcctgggcgctgccatcgcggccttctaccaccagtacatcctccgggcgggcgccatcaaggctctcggctccttcaggagcaacgcgtgatgagcagagctaaagaaaggccttcgctggactgcgtgctggagcaacggcgatcgatcgatctagcgtggggagaggcggataggcgggcgcgcgagggaggagaataagtttgtgccggtggcccggtctcgtcggtcgcttttgttccagcatgcagctgcgtcgcgttcgtgtgcgtgcgtgggggtctccttaatttccccggcccctgtaatcatcaatcaccatgtgtgcgtataatatctgctgccaagggatcgattattcccccccccccccctctctctctctctgctcttgtagctccttctgttttatcgttattatgtagcgacaacaacgacgacgaccaccatcatcagtgagaaacctcttgcctctgtctaactcaaccgacatgtggagtcttcatcatctgctgttctcttcttgctcgttcgtacgttgtctctgacctctctgtgtgtattgtattgcattgcatgccgcatgcgtg

SEQ ID NO: 21565 - DNA, 777 bp, Zea Mays
tttttgcgcgaccccccggtcaagttctggctcccctccccatcggcttcgccgtgttcatggtccacctggccaccatccccgtcaccggcaccggcatcaacccggccaggagcctgggcgccgccgtcgtctacaacaaggacaagccatgggatgaccactggattttctgggtgggcccgctcctgggcgctgccatcgcggccttctaccaccagtacatcctccgggcgggcgccatcaaggctctcggctccttcaggagcaacgcgtgatgagcagagctaaagaaaggccttcgctggactgcgtgctggagcaacggcgatcgatcgatctagcgtggggagaggcggataggcgggcgcgcgagggaggagaataagtttgtgccggtggcccggtctcgtcggtcgcttttgttccagcatgcagctgcgtcgcgttcgtgtgcgtgcgtgggggtctccttaatttccccggcccctgtaatcatcaatcaccatgtgtgcgtataatatctgctgccaagggatcgattattcccccccccccccctctctctctctctgctcttgtagctccttctgttttatcgttattatgtagcgacaacaacgacgacgaccaccatcatcagtgagaaacctcttgcctctgtctaactcaaccgacatgtggagtcttcatcatctgctgttctcttcttgctcgttcgtacgttgtctctgacctctctgtgtgtattgtattgcattgcatgccgcatgcgtg

SEQ ID NO: 21566 - DNA, 335 bp, Zea Mays
gctgcttataaaagcaaaaaaaatctactcctaggtcggtcaagactcaagaccagggcggcggccgcgttccattctgcgcaaggcgacgactgcggttgggaagggaagacgcctacaaacccctctctacctctcctctgcgaaccacctgccgccggaagccctagagggctcgacccatggatccgccgcagcagccggagcctgtcacctacgtctgcggagattgcggagctgagaacaccgtgaagctagtagacgtcgtccagtgccgtgaatgtggccaccgcatcctctacaagaagcggacccgccggaaggccgtcctctgt

SEQ ID NO: 21567 - DNA, 3910 bp, Zea Mays
gctgcttataaaagcaaaaaaaatctactcctaggtcggtcaagactcaagaccagggcggcggccgcgttccattctgcgcaaggcgacgactgcggttgggaagggaagacgcctacaaacccctctctacctctcctctgcgaaccacctgccgccggaagccctagagggctcgacccatggatccgccgcagcagccggagcctgtcacctacgtctgcggagattgcggagctgagaacaccgtgaagctagtagacgtcgtccagtgccgtgaatgtggccaccgcatcctctacaagaagcggacccgccggaatgtatgcggtctgcttgtagtgtccagcttgggcagcgtaattacgcatatacggtctacttccgtactcccaatttcgtatacgccgttcactacgaatacaccgtacgccgccgcttccacagttccacgtaaaaacgcgcaggccaggccccgcggctccatcgtgctcccatttcgcttcctttcccctaccgcatcgatggaccacgcgccagcgccccctttcgccgtgcacctcgtcaccggcggcggatcctcgtcggggatcgccctcctactgcgctccctcgccgccgcccgtgtcgtcgctcttgacgcagagtggaagccgcgccgccgcggtagccctgccgctgccgaccctgcggccctgggcgacgacacgacgccggcgtccgagacatctccagcgccgccgaagttcccgacggtgacgctgctccaggtggcctgccgcttcagcgatggtggtggaggtgagggcgagcgcagcgaggtgtttgtcgtcgacctgctttccgtgccgctcgccgacctgtgggcaccgctgcgagagctgttcgagcggcctgagacgctcaagctggggttcaggtttaagcaggacctggtgtacctctcctccaccttctccgccgccctcgggtgcgattccggattcgatagggtaagggcgtgttgaccaaatgtcgtggcaagctgcacattcatttcctggtggcaacgtcgatgtaaagtttcaagtcgggattaggttagtgattcccacgtaattggtactcatgtgctgggatatgcttaaccattgaactgattgttaaaatttagaaccaaattctgcaggatcaaccccctctggctttagcagctcttctgtgggaaatgaattaagctctgtactagcagcttagcctgcacaattgtgtagctagtgattgtaatcgcttgcactttttaggatggcattattttcgaaacaactagtttcaacccttgctcactaaccgttttagagaacatgggccaaatagtaaccatacatgtacatccactgtatattgaaaaaaataagggtcgttttgtgctgctccaacaaagtgagcaacaatcaaataccaatcaaactgcgatagactgcaaattacgtgggtcaaccatgtgttaatttcttgcatcttatgatccacattgcagtccctttttctgataaagtctaggactgagtccatacctgcaattcatccttgattacagggtaaagtctagggtttattgcagacttgcatttcatccttgatcaggggcggatctacacccttggccactcggtccgtggcctggggcttgatccatataactctacaagagtctctatttgatctaatataaaatggctaagatgaaaagaagagaatgaaattcagtaggtttggtggtcatggaaaaattctagatccgcccctgtcgtcgacaatagagttatctcccatatcactgagctattatcatactatatcatagtatatcatgtactcatcatagtttgattcatttgctcctgtctaatacactgaattatcaatgtggatagatcaggtatggtattggaaaataagtgtgttgacctttcactgttttttttattttgggctattgtgtttccatccctggatggaagcgaaattgtgatttttacacctccctcccccccccccaccccccaccgccccaaaaaaaatatttaactttgtgattttgggcctcccttttgaaaatgaagagcaaatttgggcctgctccgttagaagcacttgacgatgtgaaatacaagggcaaaatcacaattacagaacaaccaaattcaaaagcatggtcaaaatcacaattttctttgtttacaattgtgattttgccctgccttttaatttggctgttttttaattgtcatttgcccctatatttcacaccgtcaagtgtctctaccagaacaagcccacacttgttctcctttttcaaaaaggaggcgaaatcacaattgcacttccatccagtgacacaaacacaatagcctctttttatttttatattcagagagtgtttctaggattgtacccattttatttgtttttcatgaattttggatgcacattgtttgctctatattaagataaccatgctggtattcctttgtgcaaggtggagcctttcttggatgtcaccaacatttattactatctcaagggccatgataggcagaagaagcttccaaaggagaccaagagtttggcaactatttgtgaggagctgcttggtatccttttgtccaaggaactccagtgtagtgattggtcatgccgccccttaagtgaagggcaaatacaatatgctgcgtcggatgcctactacttgctagacatatttgatttgttccaaaaaaggatcacaatggaaggaaaatgttcatctacaacagaacttacttcagacaggcattgctcatcagtggtgatagaatgctcttcttctggatatggcatttgctcgggtagttgtttgatgtccatagtaaccaagtacagtgagaagataatattgacagaatctgatgcaaaaccgcgtacctccagacgaaaagaaaaactgaagattcctgccaatgccaaacgcaaagataatgtggattgcagtagtgaatggcagggtccccctccatgggatccttccattggtggggatgggtacccaaagttcttgtgtgatgtgatgattgagggcctagctaagcacttgcgatgtgttggaatagatgctgcaattccatcttcaaagaaacctgaaccaagggatctattaaatcaaacatacaaggaaggaagaatattattaacacgggatgccaagctcttgaaatatcaatatttagctggtaaccaggtatacagagtgaaaagcctgctcaaacatgatcaactagctgaggtcattaatatcttccaattaaagatttctgaggaccaacttatgtcgagattattcccacgtgcttgttcaaccgaaatctggagttctggaagtgcaccgattgcaaccaactctactgggaggggactcagtaccacaatgcagtccaaaggttcttgtcagtgtgcaacattagtgactaagcagcacgtacggccttggtactcatttgtaaaattgtaaggtactgagataccatcacctccgaaagatcgaaaataatctgatctttggcatccactcgtgcacgatgaggcatgccatccatttttagtggtttgctgttcgtcactgagatgctgttgtaaggaaaatagaccttgacttatttgattaatggactttgctccatgcacatccaagaggaaaggttctagatacgtagagttataggccaagtgctatgactgttgccctgcccccgaaaaggattcatgctatctattattaaactaaaccttacgttccttgcaccctttgcaaactccaggaatattctattgatttttctccactcgggcctattagtgggatatctcaacataccatctatcttacggtctt

SEQ ID NO: 21568 - DNA, 3683 bp, Zea Mays
gctgcttataaaagcaaaaaaaatctactcctaggtcggtcaagactcaagaccagggcggcggccgcgttccattctgcgcaaggcgacgactgcggttgggaagggaagacgcctacaaacccctctctacctctcctctgcgaaccacctgccgccggaagccctagagggctcgacccatggatccgccgcagcagccggagcctgtcacctacgtctgcggagattgcggagctgagaacaccgtgaagctagtagacgtcgtccagtgccgtgaatgtggccaccgcatcctctacaagaagcggacccgccggaatgtatgcggtctgcttgtagtgtccagcttgggcagcgtaattacgcatatacggtctacttccgtactcccaatttcgtatacgccgttcactacgaatacaccgtacgccgccgcttccacagttccacgtaaaaacgcgcaggccaggccccgcggctccatcgtgctcccatttcgcttcctttcccctaccgcatcgatggaccacgcgccagcgccccctttcgccgtgcacctcgtcaccggcggcggatcctcgtcggggatcgccctcctactgcgctccctcgccgccgcccgtgtcgtcgctcttgacgcagagtggaagccgcgccgccgcggtagccctgccgctgccgaccctgcggccctgggcgacgacacgacgccggcgtccgagacatctccagcgccgccgaagttcccgacggtgacgctgctccaggtggcctgccgcttcagcgatggtggtggaggtgagggcgagcgcagcgaggtgtttgtcgtcgacctgctttccgtgccgctcgccgacctgtgggcaccgctgcgagagctgttcgagcggcctgagacgctcaagctggggttcaggtttaagcaggacctggtgtacctctcctccaccttctccgccgccctcgggtgcgattccggattcgatagggtggagcctttcttggatgtcaccaacatttattactatctcaagggccatgataggcagaagaagcttccaaaggagaccaagagtttggcaactatttgtgaggagctgcttggtatccttttgtccaaggaactccagtgtagtgattggtcatgccgccccttaagtgaagggcaaatacaatatgctgcgtcggatgcctactacttgctagacatatttgatttgttccaaaaaaggatcacaatggaaggaaaatgttcatctacaacagaacttacttcagacaggcattgctcatcagtggtgatagaatgctcttcttctggatatggcatttgctcgggtagttgtttgatgtccatagtaaccaagtacagtgagaagataatattgacagaatctgatgcaaaaccgcgtacctccagacgaaaagaaaaactgaagattcctgccaatgccaaacgcaaagataatgtggattgcagtagtgaatggcagggtccccctccatgggatccttccattggtggggatgggtacccaaagttcttgtgtgatgtgatgattgagggcctagctaagcacttgcgatgtgttggaatagatgctgcaattccatcttcaaagaaacctgaaccaagggatctattaaatcaaacatacaaggaaggaagaatattattaacacgggatgccaagctcttgaaatatcaatatttagctggtaaccaggtatacagagtgaaaagcctgctcaaacatgatcaactagctgaggtttgtgcatattttgatcttttccatcttaaatgtgatttatacaacagctttcacaagttaatgctaaatctcccatggctcaagttcattttggttatattgttaacaccatatatttggttaccaaattgatggaaggtttaatttccttgttggttaacctatgattatggagcatctaataaatcatatttctctcagtaaatgctccactatcagctcaacccaggagagaacctttcaactgcagttacatggaccaatccaaagttagaccaaggagttctgagtagtttctagcaagaatcaatataaatggcaaattaatgtttacttttaactactgttgtttactgattaaagcttaatttaattcttttattagccacccatgctttataactagataaaaaaagatgacatggtatttccacaactgtttcaaggatttttcaagaagttttggaacttattaatgatgaagaactgggattatatggttagagaacgacaggttgagtaccatcttaaagatcataaattccatgacagtgaggttgataagtgagccctgaggcccaggggcgaagctagcatataaggttgccggggtcagtaggcttggctgacagggtcaaatagcttaatgtgcagtgctaaccaatgatttttcattgtatttttcaaaagtcattggggtcagccgaccccgacaattgaacgtagctacgcccctgctgaggccacatggtagcaacacaaccatgaaattttttaacccaagtaatctttgcaatgctgcagagaattcgtcccattcaaatattgcaacacatcaagtcggtatttgtttctcctagcacctttgatgtggatgcacagcattctcataaaaaatgtggtgttaggccattttcaatggtagttttataggagtttcattctcattaaatgatgtgtcatgtcaccaatttggatggtgtggcaagcaattaataaagaaagagatgaaatgagtttcatggggatgaaactatgtctacgccgttacctagacatattgtgtattgcatgtcatctacaatactgcatcaaatgaaactttccgctgtgagagactgttttaaccaagatttcatttctttcatgtttacgtggcatcttggaaacacaaatatgaaacctaccactgtgaatgaccttatgacatgaaggtaccagttatcacctgtgaactggtagcacatatcaggagtctctgactgagaattgtattgttacgcaggaagctctttaaaggtcattaatatcttccaattaaagatttctgaggaccaacttatgtcgagattattcccacgtgcttgttcaaccgaaatctggagttctggaagtgcaccgattgcaaccaactctactgggaggggactcagtaccacaatgcagtccaaaggttcttgtcagtgtgcaacattagtgactaagcagcacgtacggccttggtactcatttgtaaaattgtaaggtactgagataccatcacctccgaaagatcgaaaataatctgatctttggcatccactcgtgcacgatgaggcatgccatccatttttagtggtttgctgttcgtcactgagatgctgttgtaaggaaaatagaccttgacttatttgattaatggactttgctccatgcacatccaagaggaaaggttctagatacgtagagttataggccaagtgctatgactgttgccctgcccccgaaaaggattcatgctatctattattaaactaaaccttacgttccttgcaccctttgcaaactccaggaatattctattgatttttctccactcgggcctattagtgggatatctcaacataccatctatcttacggtctt

SEQ ID NO: 21569 - DNA, 4584 bp, Zea Mays
gctgcttataaaagcaaaaaaaatctactcctaggtcggtcaagactcaagaccagggcggcggccgcgttccattctgcgcaaggcgacgactgcggttgggaagggaagacgcctacaaacccctctctacctctcctctgcgaaccacctgccgccggaagccctagagggctcgacccatggatccgccgcagcagccggagcctgtcacctacgtctgcggagattgcggagctgagaacaccgtgaagctagtagacgtcgtccagtgccgtgaatgtggccaccgcatcctctacaagaagcggacccgccggattgtccaatttgaagcacgctgaggagtgacgacaggggaaaaacactggagatggttgatctattactcgccactcacctatgtaaagagtcttgtgagggaaatgaaagtgtcagacataatgtttgaatgaatgtcgtgtgcctcttttgggcttgaaaactttaatatgtaaggcttgaactagggtcggatttgagcattgagatactgcagtaatatgttgatgggtcctcctaagtaccgaatctaatgcgtgcctgttatgcctgcgttattatttatttattggccatttgtttggtgttcagtggaaatatcgatttagggggtgtttggtttgtagggactaatttttagtccctacattttattccactttagttacaaaatcatcaaatatagaaattaaaactctattttagtttctatatatatcaatttatatactaaaatggaataaaatgaagggactaaacattagtccctagaaaccaaacacctccttatacggctggaatattgtttgtgccctcacttgatccgttcattcggaactgatgaaaatgtgatgggctgacgggtgcgattcagatgtatgcggtctgcttgtagtgtccagcttgggcagcgtaattacgcatatacggtctacttccgtactcccaatttcgtatacgccgttcactacgaatacaccgtacgccgccgcttccacagttccacgtaaaaacgcgcaggccaggccccgcggctccatcgtgctcccatttcgcttcctttcccctaccgcatcgatggaccacgcgccagcgccccctttcgccgtgcacctcgtcaccggcggcggatcctcgtcggggatcgccctcctactgcgctccctcgccgccgcccgtgtcgtcgctcttgacgcagagtggaagccgcgccgccgcggtagccctgccgctgccgaccctgcggccctgggcgacgacacgacgccggcgtccgagacatctccagcgccgccgaagttcccgacggtgacgctgctccaggtggcctgccgcttcagcgatggtggtggaggtgagggcgagcgcagcgaggtgtttgtcgtcgacctgctttccgtgccgctcgccgacctgtgggcaccgctgcgagagctgttcgagcggcctgagacgctcaagctggggttcaggtttaagcaggacctggtgtacctctcctccaccttctccgccgccctcgggtgcgattccggattcgatagggtaagggcgtgttgaccaaatgtcgtggcaagctgcacattcatttcctggtggcaacgtcgatgtaaagtttcaagtcgggattaggttagtgattcccacgtaattggtactcatgtgctgggatatgcttaaccattgaactgattgttaaaatttagaaccaaattctgcaggatcaaccccctctggctttagcagctcttctgtgggaaatgaattaagctctgtactagcagcttagcctgcacaattgtgtagctagtgattgtaatcgcttgcactttttaggatggcattattttcgaaacaactagtttcaacccttgctcactaaccgttttagagaacatgggccaaatagtaaccatacatgtacatccactgtatattgaaaaaaataagggtcgttttgtgctgctccaacaaagtgagcaacaatcaaataccaatcaaactgcgatagactgcaaattacgtgggtcaaccatgtgttaatttcttgcatcttatgatccacattgcagtccctttttctgataaagtctaggactgagtccatacctgcaattcatccttgattacagggtaaagtctagggtttattgcagacttgcatttcatccttgatcaggggcggatctacacccttggccactcggtccgtggcctggggcttgatccatataactctacaagagtctctatttgatctaatataaaatggctaagatgaaaagaagagaatgaaattcagtaggtttggtggtcatggaaaaattctagatccgcccctgtcgtcgacaatagagttatctcccatatcactgagctattatcatactatatcatagtatatcatgtactcatcatagtttgattcatttgctcctgtctaatacactgaattatcaatgtggatagatcaggtatggtattggaaaataagtgtgttgacctttcactgttttttttattttgggctattgtgtttccatccctggatggaagcgaaattgtgatttttacacctccctcccccccccccaccccccaccgccccaaaaaaaatatttaactttgtgattttgggcctcccttttgaaaatgaagagcaaatttgggcctgctccgttagaagcacttgacgatgtgaaatacaagggcaaaatcacaattacagaacaaccaaattcaaaagcatggtcaaaatcacaattttctttgtttacaattgtgattttgccctgccttttaatttggctgttttttaattgtcatttgcccctatatttcacaccgtcaagtgtctctaccagaacaagcccacacttgttctcctttttcaaaaaggaggcgaaatcacaattgcacttccatccagtgacacaaacacaatagcctctttttatttttatattcagagagtgtttctaggattgtacccattttatttgtttttcatgaattttggatgcacattgtttgctctatattaagataaccatgctggtattcctttgtgcaaggtggagcctttcttggatgtcaccaacatttattactatctcaagggccatgataggcagaagaagcttccaaaggagaccaagagtttggcaactatttgtgaggagctgcttggtatccttttgtccaaggaactccagtgtagtgattggtcatgccgccccttaagtgaagggcaaatacaatatgctgcgtcggatgcctactacttgctagacatatttgatttgttccaaaaaaggatcacaatggaaggaaaatgttcatctacaacagaacttacttcagacaggcattgctcatcagtggtgatagaatgctcttcttctggatatggcatttgctcgggtagttgtttgatgtccatagtaaccaagtacagtgagaagataatattgacagaatctgatgcaaaaccgcgtacctccagacgaaaagaaaaactgaagattcctgccaatgccaaacgcaaagataatgtggattgcagtagtgaatggcagggtccccctccatgggatccttccattggtggggatgggtacccaaagttcttgtgtgatgtgatgattgagggcctagctaagcacttgcgatgtgttggaatagatgctgcaattccatcttcaaagaaacctgaaccaagggatctattaaatcaaacatacaaggaaggaagaatattattaacacgggatgccaagctcttgaaatatcaatatttagctggtaaccaggtatacagagtgaaaagcctgctcaaacatgatcaactagctgaggtcattaatatcttccaattaaagatttctgaggaccaacttatgtcgaggtgcacaaaatgcaatggtagctttattcagaaaccacttaccctagaggaagctgttgaagcctcaaaaggtttccagattattcccacgtgcttgttcaaccgaaatctggagttctggaagtgcaccgattgcaaccaactctactgggaggggactcagtaccacaatgcagtccaaaggttcttgtcagtgtgcaacattagtgactaagcagcacgtacggccttggtactcatttgtaaaattgtaaggtactgagataccatcacctccgaaagatcgaaaataatctgatctttggcatccactcgtgcacgatgaggcatgccatccatttttagtggtttgctgttcgtcactgagatgctgttgtaaggaaaatagaccttgacttatttgattaatggactttgctccatgcacatccaagaggaaaggttctagatacgtagagttataggccaagtgctatgactgttgccctgcccccgaaaaggattcatgctatctattattaaactaaaccttacgttccttgcaccctttgcaaactccaggaatattctattgatttttctccactcgggcctattagtgggatatctcaacataccatctatcttacggtctt

SEQ ID NO: 21570 - DNA, 3703 bp, Zea Mays
gctgcttataaaagcaaaaaaaatctactcctaggtcggtcaagactcaagaccagggcggcggccgcgttccattctgcgcaaggcgacgactgcggttgggaagggaagacgcctacaaacccctctctacctctcctctgcgaaccacctgccgccggaagccctagagggctcgacccatggatccgccgcagcagccggagcctgtcacctacgtctgcggagattgcggagctgagaacaccgtgaagctagtagacgtcgtccagtgccgtgaatgtggccaccgcatcctctacaagaagcggacccgccggaatgtatgcggtctgcttgtagtgtccagcttgggcagcgtaattacgcatatacggtctacttccgtactcccaatttcgtatacgccgttcactacgaatacaccgtacgccgccgcttccacagttccacgtaaaaacgcgcaggccaggccccgcggctccatcgtgctcccatttcgcttcctttcccctaccgcatcgatggaccacgcgccagcgccccctttcgccgtgcacctcgtcaccggcggcggatcctcgtcggggatcgccctcctactgcgctccctcgccgccgcccgtgtcgtcgctcttgacgcagagtggaagccgcgccgccgcggtagccctgccgctgccgaccctgcggccctgggcgacgacacgacgccggcgtccgagacatctccagcgccgccgaagttcccgacggtgacgctgctccaggtggcctgccgcttcagcgatggtggtggaggtgagggcgagcgcagcgaggtgtttgtcgtcgacctgctttccgtgccgctcgccgacctgtgggcaccgctgcgagagctgttcgagcggcctgagacgctcaagctggggttcaggtttaagcaggacctggtgtacctctcctccaccttctccgccgccctcgggtgcgattccggattcgatagggtggagcctttcttggatgtcaccaacatttattactatctcaagggccatgataggcagaagaagcttccaaaggagaccaagagtttggcaactatttgtgaggagctgcttggtatccttttgtccaaggaactccagtgtagtgattggtcatgccgccccttaagtgaagggcaaatacaatatgctgcgtcggatgcctactacttgctagacatatttgatttgttccaaaaaaggatcacaatggaaggaaaatgttcatctacaacagaacttacttcagacaggcattgctcatcagtggtgatagaatgctcttcttctggatatggcatttgctcgggtagttgtttgatgtccatagtaaccaagtacagtgagaagataatattgacagaatctgatgcaaaaccgcgtacctccagacgaaaagaaaaactgaagattcctgccaatgccaaacgcaaagataatgtggattgcagtagtgaatggcagggtccccctccatgggatccttccattggtggggatgggtacccaaagttcttgtgtgatgtgatgggatctattaaatcaaacatacaaggaaggaagaatattattaacacgggatgccaagctcttgaaatatcaatatttagctggtaaccaggtatacagagtgaaaagcctgctcaaacatgatcaactagctgaggtttgtgcatattttgatcttttccatcttaaatgtgatttatacaacagctttcacaagttaatgctaaatctcccatggctcaagttcattttggttatattgttaacaccatatatttggttaccaaattgatggaaggtttaatttccttgttggttaacctatgattatggagcatctaataaatcatatttctctcagtaaatgctccactatcagctcaacccaggagagaacctttcaactgcagttacatggaccaatccaaagttagaccaaggagttctgagtagtttctagcaagaatcaatataaatggcaaattaatgtttacttttaactactgttgtttactgattaaagcttaatttaattcttttattagccacccatgctttataactagataaaaaaagatgacatggtatttccacaactgtttcaaggatttttcaagaagttttggaacttattaatgatgaagaactgggattatatggttagagaacgacaggttgagtaccatcttaaagatcataaattccatgacagtgaggttgataagtgagccctgaggcccaggggcgaagctagcatataaggttgccggggtcagtaggcttggctgacagggtcaaatagcttaatgtgcagtgctaaccaatgatttttcattgtatttttcaaaagtcattggggtcagccgaccccgacaattgaacgtagctacgcccctgctgaggccacatggtagcaacacaaccatgaaattttttaacccaagtaatctttgcaatgctgcagagaattcgtcccattcaaatattgcaacacatcaagtcggtatttgtttctcctagcacctttgatgtggatgcacagcattctcataaaaaatgtggtgttaggccattttcaatggtagttttataggagtttcattctcattaaatgatgtgtcatgtcaccaatttggatggtgtggcaagcaattaataaagaaagagatgaaatgagtttcatggggatgaaactatgtctacgccgttacctagacatattgtgtattgcatgtcatctacaatactgcatcaaatgaaactttccgctgtgagagactgttttaaccaagatttcatttctttcatgtttacgtggcatcttggaaacacaaatatgaaacctaccactgtgaatgaccttatgacatgaaggtaccagttatcacctgtgaactggtagcacatatcaggagtctctgactgagaattgtattgttacgcaggaagctctttaaaggcaccatacttgttttctaatgtttctatttgagtaggctgaggaactgaggagattttggggctaactgatcagtttattaacttgcttgttctaggtcattaatatcttccaattaaagatttctgaggaccaacttatgtcgagattattcccacgtgcttgttcaaccgaaatctggagttctggaagtgcaccgattgcaaccaactctactgggaggggactcagtaccacaatgcagtccaaaggttcttgtcagtgtgcaacattagtgactaagcagcacgtacggccttggtactcatttgtaaaattgtaaggtactgagataccatcacctccgaaagatcgaaaataatctgatctttggcatccactcgtgcacgatgaggcatgccatccatttttagtggtttgctgttcgtcactgagatgctgttgtaaggaaaatagaccttgacttatttgattaatggactttgctccatgcacatccaagaggaaaggttctagatacgtagagttataggccaagtgctatgactgttgccctgcccccgaaaaggattcatgctatctattattaaactaaaccttacgttccttgcaccctttgcaaactccaggaatattctattgatttttctccactcgggcctattagtgggatatctcaacataccatctatcttacggtctt

SEQ ID NO: 21571 - DNA, 2427 bp, Zea Mays
gctgcttataaaagcaaaaaaaatctactcctaggtcggtcaagactcaagaccagggcggcggccgcgttccattctgcgcaaggcgacgactgcggttgggaagggaagacgcctacaaacccctctctacctctcctctgcgaaccacctgccgccggaagccctagagggctcgacccatggatccgccgcagcagccggagcctgtcacctacgtctgcggagattgcggagctgagaacaccgtgaagctagtagacgtcgtccagtgccgtgaatgtggccaccgcatcctctacaagaagcggacccgccggaatgtatgcggtctgcttgtagtgtccagcttgggcagcgtaattacgcatatacggtctacttccgtactcccaatttcgtatacgccgttcactacgaatacaccgtacgccgccgcttccacagttccacgtaaaaacgcgcaggccaggccccgcggctccatcgtgctcccatttcgcttcctttcccctaccgcatcgatggaccacgcgccagcgccccctttcgccgtgcacctcgtcaccggcggcggatcctcgtcggggatcgccctcctactgcgctccctcgccgccgcccgtgtcgtcgctcttgacgcagagtggaagccgcgccgccgcggtagccctgccgctgccgaccctgcggccctgggcgacgacacgacgccggcgtccgagacatctccagcgccgccgaagttcccgacggtgacgctgctccaggtggcctgccgcttcagcgatggtggtggaggtgagggcgagcgcagcgaggtgtttgtcgtcgacctgctttccgtgccgctcgccgacctgtgggcaccgctgcgagagctgttcgagcggcctgagacgctcaagctggggttcaggtttaagcaggacctggtgtacctctcctccaccttctccgccgccctcgggtgcgattccggattcgatagggtggagcctttcttggatgtcaccaacatttattactatctcaagggccatgataggcagaagaagcttccaaaggagaccaagagtttggcaactatttgtgaggagctgcttggtatccttttgtccaaggaactccagtgtagtgattggtcatgccgccccttaagtgaagggcaaatacaatatgctgcgtcggatgcctactacttgctagacatatttgatttgttccaaaaaaggatcacaatggaagacaggcattgctcatcagtggtgatagaatgctcttcttctggatatggcatttgctcgggtagttgtttgatgtccatagtaaccaagtacagtgagaagataatattgacagaatctgatgcaaaaccgcgtacctccagacgaaaagaaaaactgaagattcctgccaatgccaaacgcaaagataatgtggattgcagtagtgaatggcagggtccccctccatgggatccttccattggtggggatgggtacccaaagttcttgtgtgatgtgatgattgagggcctagctaagcacttgcgatgtgttggaatagatgctgcaattccatcttcaaagaaacctgaaccaagggatctattaaatcaaacatacaaggaaggaagaatattattaacacgggatgccaagctcttgaaatatcaatatttagctggtaaccaggtatacagagtgaaaagcctgctcaaacatgatcaactagctgaggtcattaatatcttccaattaaagatttctgaggaccaacttatgtcgaggtgcacaaaatgcaatggtagctttattcagaaaccacttaccctagaggaagctgttgaagcctcaaaaggtttccagattattcccacgtgcttgttcaaccgaaatctggagttctggaagtgcaccgattgcaaccaactctactgggaggggactcagtaccacaatgcagtccaaaggttcttgtcagtgtgcaacattagtgactaagcagcacgtacggccttggtactcatttgtaaaattgtaaggtactgagataccatcacctccgaaagatcgaaaataatctgatctttggcatccactcgtgcacgatgaggcatgccatccatttttagtggtttgctgttcgtcactgagatgctgttgtaaggaaaatagaccttgacttatttgattaatggactttgctccatgcacatccaagaggaaaggttctagatacgtagagttataggccaagtgctatgactgttgccctgcccccgaaaaggattcatgctatctattattaaactaaaccttacgttccttgcaccctttgcaaactccaggaatattctattgatttttctccactcgggcctattagtgggatatctcaacataccatctatcttacggtctt

SEQ ID NO: 21572 - DNA, 629 bp, Zea Mays
caaggttcatctgcattgagcttccctgcacagcattgcgaaatacgcaacagtactgagctaggaacagcatgaggagcaataagcagaagcaaagcgcaggaggggagaagagctggatcggcaggaagctgttcctgtacaacgtcaccgtcggcctctacgccatggatccgtgggagagatacctcttcaactctattgtcctagttctcctgtggttcatctgctacactacaacaaaacctatgtggcaggcatttgacaaccatctcaggagtagcatgcggcttggcgcaagaaactgttctacggtggcgatgtcctaaattatgttcctcggcacacaaaaaccatatataaatgcaaaagatggtgacgttggaagtgtatgtgctaaacaagtatttgtaaaaaaatgtacacaagtaattatgttcctcgatacacaagtaaggttactatatatgatatgattaggcatataccttttgtttggtgctaaagtacatatatacttttgagtgagagttgagaaaattgctactatatattgtacactgttttacagacagcgaaagagaattgcaaactcgtggtaccatatttattggaactgctagtttacc

SEQ ID NO: 21573 - DNA, 3019 bp, Zea Mays
cttggaatactttcctccgctcagcgccggggcagcatttgctcgcgattaaccgccccgcttttgccgcttatttcagcttgtccttttcccccagtggggaaggttagcatccagcacaagcaaccgccggttcttgccgcagtttctgcgcgctcgctttttgtccgcaagaccgaggagagcgagagcggagaggttcctgtgtggaattcttcagcgatgaggcccggcgcccgtctggactcggtggtcttccagctcactcccacccggaccaggttcgacttggtcctcatagcgaatggccggaaggagaagtttgcatctggtttgttgaaacccttcctggctcacctgaaggccgcccaggatcagattgcgaagggagggtactcgatcacacttgaaccaatctcagagttcgacgtgtcattgttcacgagaggcgccgtggagaggtttgtgcgtttcgtgagtactacggaggtccttgagcgagtcacaacactggagtctgagatcctgcagctcgaggatgccattgctatccagaggaacgatagtcttagattaaaatgtgtggaccggcaaattatgatcctaattcagccacggcaattgttgtttacaagcctgggtcaaattcaattccaccaatgcagaatgaaacaacagcacaggaggagaattcaaaagttcaaaactgtgttaagaaaagagcaagctatggctttcactcgtgctgtggctgctgggtttgacattgacaacctgggttactttacttgattgcgtttgcagagcgctttggtgcttcacgtatgatgaaggcatgttcacatttcatcgaactatggaagcagaagcatgaaactggacaatggattgaagttgaacctgaagcaatttctacacgctctgaatttcctccatttaatgcatctggcattgtgttgatgggagacaacatgaagcaaaacctggaatcagggtctattaatggagagccaaatggcgaggatggagctaaagctgatcagaagtccagccagcagatggggtctcatgctgcatatcctccatgggcaatgcatcctgcatctggtgcagttctttacccaccttatcctatgcaaggaatgcctttctatcctggggtgaatccctactaccctccatatcctccagtggatgatcccagttcaggtggaggaaattctcatggtcacaagtcacatagaaaggggaagaggtctggaaagaagcctagtgtagttgttatcaagaatgtgaatgtaacatctaagaagtgtggctcatcagagagtgaatcacaatcaagttctgaagttgagtctgctgacagtgacaactcacactccaaatcaagagaaagaaagcataaaagctcatgttcaaaggagggtaggagaactacttttgatccgggagatgagtataacaaggatgaaacatcgaatggccatggtgttgagcaaggcaactggagtgcattccaaaatttcttgttgagagcagaagaaaaaacaagatctagtgatgcagacctgtttgctggtgagaaagaacccccatcacggagaaaacagaatgtaaacacagcagatcctattattttagttgagagagatggtggcaacgtctgtgagcagaacaaaataggttttgattcagccaatgggaggactagagttatccgggtcatgtccaatgatgaacttgttatgtctggagaagggagaatctatatggattgtgaaatgaaggagattgaagctggtggaggaaggtacaggagagggacaggtgacgactacatggtttatggtcagggatgtcagatagacagacattgtttgttggatcctcttgcagaggcccagtacaagaatcctgttcagcaggacaataataggaatggtgttacggatgagtcctttatgattcctcttaggtccagctcacaggataatatcggagcagagagcagaactactatggacatagatgttgagcttccttctagcattcataaagcatcagataaaaaggctgggcatcagcttttttacgaacctgatgaactgagtactgtgaaggttgaagatgcaaaaccagaggatgtcttgccggtcactgacggtgtacagaaggtagagaaagagaagctaaagaacgcaagggatggttcagataaaagaacgaaggattccctattgaggagactatcggcgccaaggaccccactgaatgatgcacaaaaacgtgcacagaacctgcgtgcatataaagcagaccttcagaaactgaagaaagagcaggaagaagagcaaataaagcgattggagaggcttaaattggataggcaaaagtggatcgccgcaagaggtaatggaaagggtccagggaacgatgctcctagagcgaacggtatgaatggacttagtaaatcagttccaaccttcactgggatgaaaagggttgaaaacggaacgactgaatcactcagcggtcgactgaagaggctttctgaacccaaaagcattgttggggcagagcattcgttgaacccaaagtcagctggtgcaggccgttcacgaagaagtatggcatgagttgatgtgagatggagaactgaatagcttgagtccatcgtgccactcgctagcccggtaacttacttactagaaacgtgaaaggcatctcaaaaggctttttgtacaggaaaaaaggaaatggctggctctgtagcattgtctgcttccaagatttgtgatggaaaatcgagctatctttcaatggcatggcgttggactttcaattttaacataattatttcattcttttgattcagggtggcttgtgatagctgtaaacctggtttttttcccaatgtggagctatattgtgggtgtatttatggaatggattgatctgtgtttgagatatattgtggtatttatatagtgtataaatgtccgactttggattggac

SEQ ID NO: 21574 - DNA, 2898 bp, Zea Mays
ctttcctccgctcagcgccggggcagcatttgctcgcgattaaccgccccgcttttgccgcttatttcagcttgtccttttcccccagtggggaaggttagcatccagcacaagcaaccgccggttcttgccgcagtttctgcgcgctcgctttttgtccgcaagaccgaggagagcgagagcggagaggttcctgtgtggaattcttcagcgatgaggcccggcgcccgtctggactcggtggtcttccagctcactcccacccggaccaggttcgacttggtcctcatagcgaatggccggaaggagaagtttgcatctggtttgttgaaacccttcctggctcacctgaaggccgcccaggatcagattgcgaagggagggtactcgatcacacttgaaccaatctcagagttcgacgtgtcattgttcacgagaggcgccgtggagaggtttgtgcgtttcgtgagtactacggaggtccttgagcgagtcacaacactggagtctgagatcctgcagctcgaggatgccattgctatccagaggaacgatagtcttagattaaaatgtgtggaccggcaaattatgatcctaattcagccacggcaattgttgtttacaagcctgggtcaaattcaattccaccaatgcagaatgaaacaacagcacaggaggagaattcaaagaaggcatgttcacatttcatcgaactatggaagcagaagcatgaaactggacaatggattgaagttgaacctgaagcaatttctacacgctctgaatttcctccatttaatgcatctggcattgtgttgatgggagacaacatgaagcaaaacctggaatcagggtctattaatggagagccaaatggcgaggatggagctaaagctgatcagaagtccagccagcagatggggtctcatgctgcatatcctccatgggcaatgcatcctgcatctggtgcagttctttacccaccttatcctatgcaaggaatgcctttctatcctggggtgaatccctactaccctccatatcctccagtggatgatcccagttcaggtggaggaaattctcatggtcacaagtcacatagaaaggggaagaggtctggaaagaagcctagtgtagttgttatcaagaatgtgaatgtaacatctaagaagtgtggctcatcagagagtgaatcacaatcaagttctgaagttgagtctgctgacagtgacaactcacactccaaatcaagagaaagaaagcataaaagctcatgttcaaaggagggtaggagaactacttttgatccgggagatgagtataacaaggatgaaacatcgaatggccatggtgttgagcaaggcaactggagtgcattccaaaatttcttgttgagagcagaagaaaaaacaagatctagtgatgcagacctgtttgctggtgagaaagaacccccatcacggagaaaacagaatgtaaacacagcagatcctattattttagttgagagagatggtggcaacgtctgtgagcagaacaaaataggttttgattcagccaatgggaggactagagttatccgggtcatgtccaatgatgaacttgttatgtctggagaagggagaatctatatggattgtgaaatgaaggagattgaagctggtggaggaaggtacaggagagggacaggtgacgactacatggtttatggtcagggatgtcagatagacagacattgtttgttggatcctcttgcagaggcccagtacaagaatcctgttcagcaggacaataataggaatggtgttacggatgagtcctttatgattcctcttaggtccagctcacaggataatatcggagcagagagcagaactactatggacatagatgttgagcttccttctagcattcataaagcatcagataaaaaggctgggcatcagcttttttacgaacctgatgaactgagtactgtgaaggttgaagatgcaaaaccagaggatgtcttgccggtcactgacggtgtacagaaggtagagaaagagaagctaaagaacgcaagggatggttcagataaaagaacgaaggattccctattgaggagactatcggcgccaaggaccccactgaatgatgcacaaaaacgtgcacagaacctgcgtgcatataaagcagaccttcagaaactgaagaaagagcagtgacttttcttatttctcaggaagaagagcaaataaagcgattggagaggcttaaattggataggcaaaagtggatcgccgcaagaggtaatggaaagggtccagggaacgatgctcctagagcgaacggtatgaatggacttagtaaatcagttccaaccttcactgggatgaaaagggttgaaaacggaacgactgaatcactcagcggtcgactgaagaggctttctgaacccaaaagcattgttggggcagagcattcgttgaacccaaagtcagctggtgcaggccgttcacgaagaagtatggcatgagttgatgtgagatggagaactgaatagcttgagtccatcgtgccactcgctagcccggtaacttacttactagaaacgtgaaaggcatctcaaaaggctttttgtacaggaaaaaaggaaatggctggctctgtagcattgtctgcttccaagatttgtgatggaaaatcgagctatctttcaatggcatggcgttggactttcaattttaacataattatttcattcttttgattcagggtggcttgtgatagctgtaaacctggtttttttcccaatgtggagctatattgtgggtgtatttatggaatggattgatctgtgtttgagatatattgtggtatttatatagtgtataaatgtccgactttggattggac

SEQ ID NO: 21575 - DNA, 2950 bp, Zea Mays
ctttcctccgctcagcgccggggcagcatttgctcgcgattaaccgccccgcttttgccgcttatttcagcttgtccttttcccccagtggggaaggttagcatccagcacaagcaaccgccggttcttgccgcagtttctgcgcgctcgctttttgtccgcaagaccgaggagagcgagagcggagaggttcctgtgtggaattcttcagcgatgaggcccggcgcccgtctggactcggtggtcttccagctcactcccacccggaccaggttcgacttggtcctcatagcgaatggccggaaggagaagtttgcatctggtttgttgaaacccttcctggctcacctgaaggccgcccaggatcagattgcgaagggagggtactcgatcacacttgaaccaatctcagagttcgacgtgtcattgttcacgagaggcgccgtggagaggtttgtgcgtttcgtgagtactacggaggtccttgagcgagtcacaacactggagtctgagatcctgcagctcgaggatgccattgctatccagaggaacgatagtcttagattaaaatgtgtggaccggcaaattatgatcctaattcagccacggcaattgttgtttacaagcctgggtcaaattcaattccaccaatgcagaatgaaacaacagcacaggaggagaattcaaagaaggcatgttcacatttcatcgaactatggaagcagaagcatgaaactggacaatggattgaagttgaacctgaagcaatttctacacgctctgaatttcctccatttaatgcatctggcattgtgttgatgggagacaacatgaagcaaaacctggaatcagggtctattaatggagagccaaatggcgaggatggagctaaagctgatcagaagtccagccagcagatggggtctcatgctgcatatcctccatgggcaatgcatcctgcatctggtgcagttctttacccaccttatcctatgcaaggaatgcctttctatcctggggtgaatccctactaccctccatatcctccagtggatgatcccagttcaggtggaggaaattctcatggtcacaagtcacatagaaaggggaagaggtctggaaagaagcctagtgtagttgttatcaagaatgtgaatgtaacatctaagaagtgtggctcatcagagagtgaatcacaatcaagttctgaagttgagtctgctgacagtgacaactcacactccaaatcaagagaaagaaagcataaaagctcatgttcaaaggagggtaggagaactacttttgatccgggagatgagtataacaaggatgaaacatcgaatggccatggtgttgagcaaggcaactggagtgcattccaaaatttcttgttgagagcagaagaaaaaacaagatctagtgatgcagacctgtttgctggtgagaaagaacccccatcacggagaaaacagaatgtaaacacagcagatcctattattttagttgagagagatggtggcaacgtctgtgagcagaacaaaataggttttgattcagccaatgggaggactagagttatccgggtcatgtccaatgatgaacttgttatgtctggagaagggagaatctatatggattgtgaaatgaaggagattgaagctggtggaggaaggtacaggagagggacaggtgacgactacatggtttatggtcagggatgtcagatagacagacattgtttgttggatcctcttgcagaggcccagtacaagaatcctgttcagcaggacaataataggaatggtgttacggatgagtcctttatgattcctcttaggtccagctcacaggataatatcggagcagagagcagaactactatggacatagatgttgagcttccttctagcattcataaagcatcagataaaaaggctgggcatcagcttttttacgaacctgatgaactggtgcctgagcgttgattcgaagatgtttcatttggatatgatccagcaatggattatgatagccacatgcagagtactgtgaaggttgaagatgcaaaaccagaggatgtcttgccggtcactgacggtgtacagaaggtagagaaagagaagctaaagaacgcaagggatggttcagataaaagaacgaaggattccctattgaggagactatcggcgccaaggaccccactgaatgatgcacaaaaacgtgcacagaacctgcgtgcatataaagcagaccttcagaaactgaagaaagagcaggaagaagagcaaataaagcgattggagaggcttaaattggataggcaaaagtggatcgccgcaagaggtaatggaaagggtccagggaacgatgctcctagagcgaacggtatgaatggacttagtaaatcagttccaaccttcactgggatgaaaagggttgaaaacggaacgactgaatcactcagcggtcgactgaagaggctttctgaacccaaaagcattgttggggcagagcattcgttgaacccaaagtcagctggtgcaggccgttcacgaagaagtatggcatgagttgatgtgagatggagaactgaatagcttgagtccatcgtgccactcgctagcccggtaacttacttactagaaacgtgaaaggcatctcaaaaggctttttgtacaggaaaaaaggaaatggctggctctgtagcattgtctgcttccaagatttgtgatggaaaatcgagctatctttcaatggcatggcgttggactttcaattttaacataattatttcattcttttgattcagggtggcttgtgatagctgtaaacctggtttttttcccaatgtggagctatattgtgggtgtatttatggaatggattgatctgtgtttgagatatattgtggtatttatatagtgtataaatgtccgactttggattggac

SEQ ID NO: 21576 - DNA, 3582 bp, Zea Mays
taaccgccccgcttttgccgcttatttcagcttgtccttttcccccagtggggaaggttagcatccagcacaagcaaccgccggttcttgccgcagtttctgcgcgctcgctttttgtccgcaagaccgaggagagcgagagcggagaggttcctgtgtggaattcttcagcgatgaggcccggcgcccgtctggactcggtggtcttccagctcactcccacccggaccaggttcgacttggtcctcatagcgaatggccggaaggagaagtttgcatctggtttgttgaaacccttcctggctcacctgaaggccgcccaggatcagattgcgaagggagggtactcgatcacacttgaaccaatctcagagttcgacgtgtcattgttcacgagaggcgccgtggagaggtttgtgcgtttcgtgagtactacggaggtccttgagcgagtcacaacactggagtctgagatcctgcagctcgaggatgccattgctatccagaggaacgatagtcttagattaaaatgtgtcggagaccatggaagaaagttgactgaaagcaatgaaagtagtatgacgctgcaccaacctgattgctttctgagagcatgttgtatagaatagtgcatgcctttgaggattgtctgaatcacattgtttcgttgggctaccaaaaagaaaagcaaggtgcaatccactactattgttttagaatctagtcatcatggagtttgatgcgacatcacatcaagggccattattaagttggtacttgtcacttaactcccaaaatgttaggggtcataatctgatttatggacaacctttactatcgtttaatgttatgaattttctgtgtgatcacaataacttacatatgaatctatattttttgaagacctgaatatttagcaaaatcttatttgaaactggagaattctggatggtattatattctacattcaggggagtactgaaatggatccagctgtttcatccttttattcgccttaccatagtcacaagaaacgggtacagcggtactatggtagcgacccttgacacagaaatatcgtccccgcgaccaggatacacatgataattttcgttcccagtttcccaccatgtaaaaatctctcacaagtagtgtaccatgttccttggccctatcgatccaggaactttatgactatgcgccttacctgtcacagcctgccatatctttttatatttatttctaccacatgcctaatactatccatccactaataggtggaccggcaaattatgatcctaattcagccacggcaattgttgtttacaagcctgggtcaaattcaattccaccaatgcagaatgaaacaacagcacaggaggagaattcaaagaaggcatgttcacatttcatcgaactatggaagcagaagcatgaaactggacaatggattgaagttgaacctgaagcaatttctacacgctctgaatttcctccatttaatgcatctggcattgtgttgatgggagacaacatgaagcaaaacctggaatcagggtctattaatggagagccaaatggcgaggatggagctaaagctgatcagaagtccagccagcagatggggtctcatgctgcatatcctccatgggcaatgcatcctgcatctggtgcagttctttacccaccttatcctatgcaaggaatgcctttctatcctggggtgaatccctactaccctccatatcctccagtggatgatcccagttcaggtggaggaaattctcatggtcacaagtcacatagaaaggggaagaggtctggaaagaagcctagtgtagttgttatcaagaatgtgaatgtaacatctaagaagtgtggctcatcagagagtgaatcacaatcaagttctgaagttgagtctgctgacagtgacaactcacactccaaatcaagagaaagaaagcataaaagctcatgttcaaaggagggtaggagaactacttttgatccgggagatgagtataacaaggatgaaacatcgaatggccatggtgttgagcaaggcaactggagtgcattccaaaatttcttgttgagagcagaagaaaaaacaagatctagtgatgcagacctgtttgctggtgagaaagaacccccatcacggagaaaacagaatgtaaacacagcagatcctattattttagttgagagagatggtggcaacgtctgtgagcagaacaaaataggttttgattcagccaatgggaggactagagttatccgggtcatgtccaatgatgaacttgttatgtctggagaagggagaatctatatggattgtgaaatgaaggagattgaagctggtggaggaaggtacaggagagggacaggtgacgactacatggtttatggtcagggatgtcagatagacagacattgtttgttggatcctcttgcagaggcccagtacaagaatcctgttcagcaggacaataataggaatggtgttacggatgagtcctttatgattcctcttaggtccagctcacaggataatatcggagcagagagcagaactactatggacatagatgttgagcttccttctagcattcataaagcatcagataaaaaggctgggcatcagcttttttacgaacctgatgaactgagtactgtgaaggttgaagatgcaaaaccagaggatgtcttgccggtcactgacggtgtacagaaggtagagaaagagaagctaaagaacgcaagggatggttcagataaaagaacgaaggattccctattgaggagactatcggcgccaaggaccccactgaatgatgcacaaaaacgtgcacagaacctgcgtgcatataaagcagaccttcagaaactgaagaaagagcaggaagaagagcaaataaagcgattggagaggcttaaattggataggcaaaagtggatcgccgcaagaggtaatggaaagggtccagggaacgatgctcctagagcgaacggtatgaatggacttagtaaatcagttccaaccttcactgggatgaaaagggttgaaaacggaacgactgaatcactcagcggtcgactgaagaggctttctgaacccaaaagcattgttggggcagagcattcgttgaacccaaagtcagctggtgcaggccgttcacgaagaagtatggcatgagttgatgtgagatggagaactgaatagcttgagtccatcgtgccactcgctagcccggtaacttacttactagaaacgtgaaaggcatctcaaaaggctttttgtacaggaaaaaaggaaatggctggctctgtagcattgtctgcttccaagatttgtgatggaaaatcgagctatctttcaatggcatggcgttggactttcaattttaacataattatttcattcttttgattcagggtggcttgtgatagctgtaaacctggtttttttcccaatgtggagctatattgtgggtgtatttatggaatggattgatctgtgtttgagatatattgtggtatttatatagtgtataaatgtccgactttggattggac

SEQ ID NO: 21577 - DNA, 3201 bp, Zea Mays
taaccgccccgcttttgccgcttatttcagcttgtccttttcccccagtggggaaggttagcatccagcacaagcaaccgccggttcttgccgcagtttctgcgcgctcgctttttgtccgcaagaccgaggagagcgagagcggagaggttcctgtgtggaattcttcagcgatgaggcccggcgcccgtctggactcggtggtcttccagctcactcccacccggaccaggttcgacttggtcctcatagcgaatggccggaaggagaagtttgcatctggtttgttgaaacccttcctggctcacctgaaggccgcccaggatcagattgcgaagggagggtactcgatcacacttgaaccaatctcagagttcgacgtgtcattgttcacgagaggcgccgtggagaggtttgtgcgtttcgtgagtactacggaggtccttgagcgagtcacaacactggagtctgagatcctgcagctcgaggatgccattgctatccagaggaacgatagtcttagattaaaatgtgtcggagaccatggaagaaagttgactgaaagcaatgaaagtagtatgacgctgcaccaacctgattgctttctgagagcatgttgtatagaatagtgcatgcctttgaggattgtctgaatcacattgtttcgttgggctaccaaaaagaaaagcaaggtggaccggcaaattatgatcctaattcagccacggcaattgttgtttacaagcctgggtcaaattcaattccaccaatgcagaatgaaacaacagcacaggaggagaattcaaaagttcaaaactgtgttaagaaaagagcaagctatggctttcactcgtgctgtggctgctgggtttgacattgacaacctgggttactttacttgattgcgtttgcagagcgctttggtgcttcacgtatgatgaaggcatgttcacatttcatcgaactatggaagcagaagcatgaaactggacaatggattgaagttgaacctgaagcaatttctacacgctctgaatttcctccatttaatgcatctggcattgtgttgatgggagacaacatgaagcaaaacctggaatcagggtctattaatggagagccaaatggcgaggatggagctaaagctgatcagaagtccagccagcagatggggtctcatgctgcatatcctccatgggcaatgcatcctgcatctggtgcagttctttacccaccttatcctatgcaaggaatgcctttctatcctggggtgaatccctactaccctccatatcctccagtggatgatcccagttcaggtggaggaaattctcatggtcacaagtcacatagaaaggggaagaggtctggaaagaagcctagtgtagttgttatcaagaatgtgaatgtaacatctaagaagtgtggctcatcagagagtgaatcacaatcaagttctgaagttgagtctgctgacagtgacaactcacactccaaatcaagagaaagaaagcataaaagctcatgttcaaaggagggtaggagaactacttttgatccgggagatgagtataacaaggatgaaacatcgaatggccatggtgttgagcaaggcaactggagtgcattccaaaatttcttgttgagagcagaagaaaaaacaagatctagtgatgcagacctgtttgctggtgagaaagaacccccatcacggagaaaacagaatgtaaacacagcagatcctattattttagttgagagagatggtggcaacgtctgtgagcagaacaaaataggttttgattcagccaatgggaggactagagttatccgggtcatgtccaatgatgaacttgttatgtctggagaagggagaatctatatggattgtgaaatgaaggagattgaagctggtggaggaaggtacaggagagggacaggtgacgactacatggtttatggtcagggatgtcagatagacagacattgtttgttggatcctcttgcagaggcccagtacaagaatcctgttcagcaggacaataataggaatggtgttacggatgagtcctttatgattcctcttaggtccagctcacaggataatatcggagcagagagcagaactactatggacatagatgttgagcttccttctagcattcataaagcatcagataaaaaggctgggcatcagcttttttacgaacctgatgaactggtgcctgagcgttgattcgaagatgtttcatttggatatgatccagcaatggattatgatagccacatgcagagtactgtgaaggttgaagatgcaaaaccagaggatgtcttgccggtcactgacggtgtacagaaggtagagaaagagaagctaaagaacgcaagggatggttcagataaaagaacgaaggattccctattgaggagactatcggcgccaaggaccccactgaatgatgcacaaaaacgtgcacagaacctgcgtgcatataaagcagaccttcagaaactgaagaaagagcaggaagaagagcaaataaagcgattggagaggcttaaattggataggcaaaagtggatcgccgcaagaggtaatggaaagggtccagggaacgatgctcctagagcgaacggtatgaatggacttagtaaatcagttccaaccttcactgggatgaaaagggttgaaaacggaacgactgaatcactcagcggtcgactgaagaggctttctgaacccaaaagcattgttggggcagagcattcgttgaacccaaagtcagctggtgcaggccgttcacgaagaagtatggcatgagttgatgtgagatggagaactgaatagcttgagtccatcgtgccactcgctagcccggtaacttacttactagaaacgtgaaaggcatctcaaaaggctttttgtacaggaaaaaaggaaatggctggctctgtagcattgtctgcttccaagatttgtgatggaaaatcgagctatctttcaatggcatggcgttggactttcaattttaacataattatttcattcttttgattcagggtggcttgtgatagctgtaaacctggtttttttcccaatgtggagctatattgtgggtgtatttatggaatggattgatctgtgtttgagatatattgtggtatttatatagtgtataaatgtccgactttggattggac

SEQ ID NO: 21578 - DNA, 3705 bp, Zea Mays
cgcttttgccgcttatttcagcttgtccttttcccccagtggggaaggttagcatccagcacaagcaaccgccggttcttgccgcagtttctgcgcgctcgctttttgtccgcaagaccgaggagagcgagagcggagaggttcctgtgtggaattcttcagcgatgaggcccggcgcccgtctggactcggtggtcttccagctcactcccacccggaccaggttcgacttggtcctcatagcgaatggccggaaggagaagtttgcatctggtttgttgaaacccttcctggctcacctgaaggccgcccaggatcagattgcgaagggagggtactcgatcacacttgaaccaatctcagagttcgacgtgtcattgttcacgagaggcgccgtggagaggtttgtgcgtttcgtgagtactacggaggtccttgagcgagtcacaacactggagtctgagatcctgcagctcgaggatgccattgctatccagaggaacgatagtcttagattaaaatgtgtcggagaccatggaagaaagttgactgaaagcaatgaaagtagtatgacgctgcaccaacctgattgctttctgagagcatgttgtatagaatagtgcatgcctttgaggattgtctgaatcacattgtttcgttgggctaccaaaaagaaaagcaaggtgcaatccactactattgttttagaatctagtcatcatggagtttgatgcgacatcacatcaagggccattattaagttggtacttgtcacttaactcccaaaatgttaggggtcataatctgatttatggacaacctttactatcgtttaatgttatgaattttctgtgtgatcacaataacttacatatgaatctatattttttgaagacctgaatatttagcaaaatcttatttgaaactggagaattctggatggtattatattctacattcaggggagtactgaaatggatccagctgtttcatccttttattcgccttaccatagtcacaagaaacgggtacagcggtactatggtagcgacccttgacacagaaatatcgtccccgcgaccaggatacacatgataattttcgttcccagtttcccaccatgtaaaaatctctcacaagtagtgtaccatgttccttggccctatcgatccaggaactttatgactatgcgccttacctgtcacagcctgccatatctttttatatttatttctaccacatgcctaatactatccatccactaataggtggaccggcaaattatgatcctaattcagccacggcaattgttgtttacaagcctgggtcaaattcaattccaccaatgcagaatgaaacaacagcacaggaggagaattcaaaagttcaaaactgtgttaagaaaagagcaagctatggctttcactcgtgctgtggctgctgggtttgacattgacaacctgggttactttacttgattgcgtttgcagagcgctttggtgcttcacgtatgatgaaggcatgttcacatttcatcgaactatggaagcagaagcatgaaactggacaatggattgaagttgaacctgaagcaatttctacacgctctgaatttcctccatttaatgcatctggcattgtgttgatgggagacaacatgaagcaaaacctggaatcagggtctattaatggagagccaaatggcgaggatggagctaaagctgatcagaagtccagccagcagatggggtctcatgctgcatatcctccatgggcaatgcatcctgcatctggtgcagttctttacccaccttatcctatgcaaggaatgcctttctatcctggggtgaatccctactaccctccatatcctccagtggatgatcccagttcaggtggaggaaattctcatggtcacaagtcacatagaaaggggaagaggtctggaaagaagcctagtgtagttgttatcaagaatgtgaatgtaacatctaagaagtgtggctcatcagagagtgaatcacaatcaagttctgaagttgagtctgctgacagtgacaactcacactccaaatcaagagaaagaaagcataaaagctcatgttcaaaggagggtaggagaactacttttgatccgggagatgagtataacaaggatgaaacatcgaatggccatggtgttgagcaaggcaactggagtgcattccaaaatttcttgttgagagcagaagaaaaaacaagatctagtgatgcagacctgtttgctggtgagaaagaacccccatcacggagaaaacagaatgtaaacacagcagatcctattattttagttgagagagatggtggcaacgtctgtgagcagaacaaaataggttttgattcagccaatgggaggactagagttatccgggtcatgtccaatgatgaacttgttatgtctggagaagggagaatctatatggattgtgaaatgaaggagattgaagctggtggaggaaggtacaggagagggacaggtgacgactacatggtttatggtcagggatgtcagatagacagacattgtttgttggatcctcttgcagaggcccagtacaagaatcctgttcagcaggacaataataggaatggtgttacggatgagtcctttatgattcctcttaggtccagctcacaggataatatcggagcagagagcagaactactatggacatagatgttgagcttccttctagcattcataaagcatcagataaaaaggctgggcatcagcttttttacgaacctgatgaactgagtactgtgaaggttgaagatgcaaaaccagaggatgtcttgccggtcactgacggtgtacagaaggtagagaaagagaagctaaagaacgcaagggatggttcagataaaagaacgaaggattccctattgaggagactatcggcgccaaggaccccactgaatgatgcacaaaaacgtgcacagaacctgcgtgcatataaagcagaccttcagaaactgaagaaagagcaggaagaagagcaaataaagcgattggagaggcttaaattggataggcaaaagtggatcgccgcaagaggtaatggaaagggtccagggaacgatgctcctagagcgaacggtatgaatggacttagtaaatcagttccaaccttcactgggatgaaaagggttgaaaacggaacgactgaatcactcagcggtcgactgaagaggctttctgaacccaaaagcattgttggggcagagcattcgttgaacccaaagtcagctggtgcaggccgttcacgaagaagtatggcatgagttgatgtgagatggagaactgaatagcttgagtccatcgtgccactcgctagcccggtaacttacttactagaaacgtgaaaggcatctcaaaaggctttttgtacaggaaaaaaggaaatggctggctctgtagcattgtctgcttccaagatttgtgatggaaaatcgagctatctttcaatggcatggcgttggactttcaattttaacataattatttcattcttttgattcagggtggcttgtgatagctgtaaacctggtttttttcccaatgtggagctatattgtgggtgtatttatggaatggattgatctgtgtttgagatatattgtggtatttatatagtgtataaatgtccgactttggattggac

SEQ ID NO: 21579 - DNA, 3191 bp, Zea Mays
cttatttcagcttgtccttttcccccagtggggaaggttagcatccagcacaagcaaccgccggttcttgccgcagtttctgcgcgctcgctttttgtccgcaagaccgaggagagcgagagcggagaggttcctgtgtggaattcttcagcgatgaggcccggcgcccgtctggactcggtggtcttccagctcactcccacccggaccaggttcgacttggtcctcatagcgaatggccggaaggagaagtttgcatctggtttgttgaaacccttcctggctcacctgaaggccgcccaggatcagattgcgaagggagggtactcgatcacacttgaaccaatctcagagttcgacgtgtcattgttcacgagaggcgccgtggagagttctttgcaggtttgtgcgtttcgtgagtactacggaggtccttgagcgagtcacaacactggagtctgagatcctgcagctcgaggatgccattgctatccagaggaacgatagtcttagattaaaatgtgtcggagaccatggaagaaagttgactgaaagcaatgaaagtagtatgacgctgcaccaacctgattgctttctgagagcatgttgtatagaatagtgcatgcctttgaggattgtctgaatcacattgtttcgttgggctaccaaaaagaaaagcaaggtggaccggcaaattatgatcctaattcagccacggcaattgttgtttacaagcctgggtcaaattcaattccaccaatgcagaatgaaacaacagcacaggaggagaattcaaaagttcaaaactgtgttaagaaaagagcaagctatggctttcactcgtgctgtggctgctgggtttgacattgacaacctgggttactttacttgattgcgtttgcagagcgctttggtgcttcacgtatgatgaaggcatgttcacatttcatcgaactatggaagcagaagcatgaaactggacaatggattgaagttgaacctgaagcaatttctacacgctctgaatttcctccatttaatgcatctggcattgtgttgatgggagacaacatgaagcaaaacctggaatcagggtctattaatggagagccaaatggcgaggatggagctaaagctgatcagaagtccagccagcagatggggtctcatgctgcatatcctccatgggcaatgcatcctgcatctggtgcagttctttacccaccttatcctatgcaaggaatgcctttctatcctggggtgaatccctactaccctccatatcctccagtggatgatcccagttcaggtggaggaaattctcatggtcacaagtcacatagaaaggggaagaggtctggaaagaagcctagtgtagttgttatcaagaatgtgaatgtaacatctaagaagtgtggctcatcagagagtgaatcacaatcaagttctgaagttgagtctgctgacagtgacaactcacactccaaatcaagagaaagaaagcataaaagctcatgttcaaaggagggtaggagaactacttttgatccgggagatgagtataacaaggatgaaacatcgaatggccatggtgttgagcaaggcaactggagtgcattccaaaatttcttgttgagagcagaagaaaaaacaagatctagtgatgcagacctgtttgctggtgagaaagaacccccatcacggagaaaacagaatgtaaacacagcagatcctattattttagttgagagagatggtggcaacgtctgtgagcagaacaaaataggttttgattcagccaatgggaggactagagttatccgggtcatgtccaatgatgaacttgttatgtctggagaagggagaatctatatggattgtgaaatgaaggagattgaagctggtggaggaaggtacaggagagggacaggtgacgactacatggtttatggtcagggatgtcagatagacagacattgtttgttggatcctcttgcagaggcccagtacaagaatcctgttcagcaggacaataataggaatggtgttacggatgagtcctttatgattcctcttaggtccagctcacaggataatatcggagcagagagcagaactactatggacatagatgttgagcttccttctagcattcataaagcatcagataaaaaggctgggcatcagcttttttacgaacctgatgaactggtgcctgagcgttgattcgaagatgtttcatttggatatgatccagcaatggattatgatagccacatgcagagtactgtgaaggttgaagatgcaaaaccagaggatgtcttgccggtcactgacggtgtacagaaggtagagaaagagaagctaaagaacgcaagggatggttcagataaaagaacgaaggattccctattgaggagactatcggcgccaaggaccccactgaatgatgcacaaaaacgtgcacagaacctgcgtgcatataaagcagaccttcagaaactgaagaaagagcaggaagaagagcaaataaagcgattggagaggcttaaattggataggcaaaagtggatcgccgcaagaggtaatggaaagggtccagggaacgatgctcctagagcgaacggtatgaatggacttagtaaatcagttccaaccttcactgggatgaaaagggttgaaaacggaacgactgaatcactcagcggtcgactgaagaggctttctgaacccaaaagcattgttggggcagagcattcgttgaacccaaagtcagctggtgcaggccgttcacgaagaagtatggcatgagttgatgtgagatggagaactgaatagcttgagtccatcgtgccactcgctagcccggtaacttacttactagaaacgtgaaaggcatctcaaaaggctttttgtacaggaaaaaaggaaatggctggctctgtagcattgtctgcttccaagatttgtgatggaaaatcgagctatctttcaatggcatggcgttggactttcaattttaacataattatttcattcttttgattcagggtggcttgtgatagctgtaaacctggtttttttcccaatgtggagctatattgtgggtgtatttatggaatggattgatctgtgtttgagatatattgtggtatttatatagtgtataaatgtccgactttggattggac

SEQ ID NO: 21580 - DNA, 3622 bp, Zea Mays
ggaaggttagcatccagcacaagcaaccgccggttcttgccgcagtttctgcgcgctcgctttttgtccgcaagaccgaggagagcgagagcggagaggttcctgtgtggaattcttcagcgatgaggcccggcgcccgtctggactcggtggtcttccagctcactcccacccggaccaggttcgacttggtcctcatagcgaatggccggaaggagaagtttgcatctggtttgttgaaacccttcctggctcacctgaaggccgcccaggatcagattgcgaagggagggtactcgatcacacttgaaccaatctcagagttcgacgtgtcattgttcacgagaggcgccgtggagaggtccgcttctagatttcgatactactctagtacagttatttctggcattgcctatttgcctcttgggtcaattcttgtgtcagttctttgcaggtttgtgcgtttcgtgagtactacggaggtccttgagcgagtcacaacactggagtctgagatcctgcagctcgaggatgccattgctatccagaggaacgatagtcttagattaaaatgtcggagaccatggaagaaagttgactgaaagcaatgaaagtagtatgacgctgcaccaacctgattgctttctgagagcatgttgtatagaatagtgcatgcctttgaggattgtctgaatcacattgtttcgttgggctaccaaaaagaaaagcaaggtgcaatccactactattgttttagaatctagtcatcatggagtttgatgcgacatcacatcaagggccattattaagttggtacttgtcacttaactcccaaaatgttaggggtcataatctgatttatggacaacctttactatcgtttaatgttatgaattttctgtgtgatcacaataacttacatatgaatctatattttttgaagacctgaatatttagcaaaatcttatttgaaactggagaattctggatggtattatattctacattcaggggagtactgaaatggatccagctgtttcatccttttattcgccttaccatagtcacaagaaacgggtacagcggtactatggtagcgacccttgacacagaaatatcgtccccgcgaccaggatacacatgataattttcgttcccagtttcccaccatgtaaaaatctctcacaagtagtgtaccatgttccttggccctatcgatccaggaactttatgactatgcgccttacctgtcacagcctgccatatctttttatatttatttctaccacatgcctaatactatccatccactaataggtggaccggcaaattatgatcctaattcagccacggcaattgttgtttacaagcctgggtcaaattcaattccaccaatgcagaatgaaacaacagcacaggaggagaattcaaagaaggcatgttcacatttcatcgaactatggaagcagaagcatgaaactggacaatggattgaagttgaacctgaagcaatttctacacgctctgaatttcctccatttaatgcatctggcattgtgttgatgggagacaacatgaagcaaaacctggaatcagggtctattaatggagagccaaatggcgaggatggagctaaagctgatcagaagtccagccagcagatggggtctcatgctgcatatcctccatgggcaatgcatcctgcatctggtgcagttctttacccaccttatcctatgcaaggaatgcctttctatcctggggtgaatccctactaccctccatatcctccagtggatgatcccagttcaggtggaggaaattctcatggtcacaagtcacatagaaaggggaagaggtctggaaagaagcctagtgtagttgttatcaagaatgtgaatgtaacatctaagaagtgtggctcatcagagagtgaatcacaatcaagttctgaagttgagtctgctgacagtgacaactcacactccaaatcaagagaaagaaagcataaaagctcatgttcaaaggagggtaggagaactacttttgatccgggagatgagtataacaaggatgaaacatcgaatggccatggtgttgagcaaggcaactggagtgcattccaaaatttcttgttgagagcagaagaaaaaacaagatctagtgatgcagacctgtttgctggtgagaaagaacccccatcacggagaaaacagaatgtaaacacagcagatcctattattttagttgagagagatggtggcaacgtctgtgagcagaacaaaataggttttgattcagccaatgggaggactagagttatccgggtcatgtccaatgatgaacttgttatgtctggagaagggagaatctatatggattgtgaaatgaaggagattgaagctggtggaggaaggtacaggagagggacaggtgacgactacatggtttatggtcagggatgtcagatagacagacattgtttgttggatcctcttgcagaggcccagtacaagaatcctgttcagcaggacaataataggaatggtgttacggatgagtcctttatgattcctcttaggtccagctcacaggataatatcggagcagagagcagaactactatggacatagatgttgagcttccttctagcattcataaagcatcagataaaaaggctgggcatcagcttttttacgaacctgatgaactgagtactgtgaaggttgaagatgcaaaaccagaggatgtcttgccggtcactgacggtgtacagaaggtagagaaagagaagctaaagaacgcaagggatggttcagataaaagaacgaaggattccctattgaggagactatcggcgccaaggaccccactgaatgatgcacaaaaacgtgcacagaacctgcgtgcatataaagcagaccttcagaaactgaagaaagagcaggaagaagagcaaataaagcgattggagaggcttaaattggataggcaaaagtggatcgccgcaagaggtaatggaaagggtccagggaacgatgctcctagagcgaacggtatgaatggacttagtaaatcagttccaaccttcactgggatgaaaagggttgaaaacggaacgactgaatcactcagcggtcgactgaagaggctttctgaacccaaaagcattgttggggcagagcattcgttgaacccaaagtcagctggtgcaggccgttcacgaagaagtatggcatgagttgatgtgagatggagaactgaatagcttgagtccatcgtgccactcgctagcccggtaacttacttactagaaacgtgaaaggcatctcaaaaggctttttgtacaggaaaaaaggaaatggctggctctgtagcattgtctgcttccaagatttgtgatggaaaatcgagctatctttcaatggcatggcgttggactttcaattttaacataattatttcattcttttgattcagggtggcttgtgatagctgtaaacctggtttttttcccaatgtggagctatattgtgggtgtatttatggaatggattgatctgtgtttgagatatattgtggtatttatatagtgtataaatgtccgactttggattggac

SEQ ID NO: 21581 - DNA, 2808 bp, Zea Mays
agcgagagcggagaggttcctgtgtggaattcttcagcgatgaggcccggcgcccgtctggactcggtggtcttccagctcactcccacccggaccaggttcgacttggtcctcatagcgaatggccggaaggagaagtttgcatctggtttgttgaaacccttcctggctcacctgaaggccgcccaggatcagattgcgaagggagggtactcgatcacacttgaaccaatctcagagttcgacgtgtcattgttcacgagaggcgccgtggagagttctttgcaggtttgtgcgtttcgtgagtactacggaggtccttgagcgagtcacaacactggagtctgagatcctgcagctcgaggatgccattgctatccagaggaacgatagtcttagattaaaatgtgaactttatgactatgcgccttacctgtcacagcctgccatatctttttatatttatttctaccacatgcctaatactatccatccactaataggtggaccggcaaattatgatcctaattcagccacggcaattgttgtttacaagcctgggtcaaattcaattccaccaatgcagaatgaaacaacagcacaggaggagaattcaaagaaggcatgttcacatttcatcgaactatggaagcagaagcatgaaactggacaatggattgaagttgaacctgaagcaatttctacacgctctgaatttcctccatttaatgcatctggcattgtgttgatgggagacaacatgaagcaaaacctggaatcagggtctattaatggagagccaaatggcgaggatggagctaaagctgatcagaagtccagccagcagatggggtctcatgctgcatatcctccatgggcaatgcatcctgcatctggtgcagttctttacccaccttatcctatgcaaggaatgcctttctatcctggggtgaatccctactaccctccatatcctccagtggatgatcccagttcaggtggaggaaattctcatggtcacaagtcacatagaaaggggaagaggtctggaaagaagcctagtgtagttgttatcaagaatgtgaatgtaacatctaagaagtgtggctcatcagagagtgaatcacaatcaagttctgaagttgagtctgctgacagtgacaactcacactccaaatcaagagaaagaaagcataaaagctcatgttcaaaggagggtaggagaactacttttgatccgggagatgagtataacaaggatgaaacatcgaatggccatggtgttgagcaaggcaactggagtgcattccaaaatttcttgttgagagcagaagaaaaaacaagatctagtgatgcagacctgtttgctggtgagaaagaacccccatcacggagaaaacagaatgtaaacacagcagatcctattattttagttgagagagatggtggcaacgtctgtgagcagaacaaaataggttttgattcagccaatgggaggactagagttatccgggtcatgtccaatgatgaacttgttatgtctggagaagggagaatctatatggattgtgaaatgaaggagattgaagctggtggaggaaggtacaggagagggacaggtgacgactacatggtttatggtcagggatgtcagatagacagacattgtttgttggatcctcttgcagaggcccagtacaagaatcctgttcagcaggacaataataggaatggtgttacggatgagtcctttatgattcctcttaggtccagctcacaggataatatcggagcagagagcagaactactatggacatagatgttgagcttccttctagcattcataaagcatcagataaaaaggctgggcatcagcttttttacgaacctgatgaactgagtactgtgaaggttgaagatgcaaaaccagaggatgtcttgccggtcactgacggtgtacagaaggtagagaaagagaagctaaagaacgcaagggatggttcagataaaagaacgaaggattccctattgaggagactatcggcgccaaggaccccactgaatgatgcacaaaaacgtgcacagaacctgcgtgcatataaagcagaccttcagaaactgaagaaagagcaggaagaagagcaaataaagcgattggagaggcttaaattggataggcaaaagtggatcgccgcaagaggtaatggaaagggtccagggaacgatgctcctagagcgaacggtatgaatggacttagtaaatcagttccaaccttcactgggatgaaaagggttgaaaacggaacgactgaatcactcagcggtcgactgaagaggctttctgaacccaaaagcattgttggggcagagcattcgttgaacccaaagtcagctggtgcaggccgttcacgaagaagtatggcatgagttgatgtgagatggagaactgaatagcttgagtccatcgtgccactcgctagcccggtaacttacttactagaaacgtgaaaggcatctcaaaaggctttttgtacaggaaaaaaggaaatggctggctctgtagcattgtctgcttccaagatttgtgatggaaaatcgagctatctttcaatggcatggcgttggactttcaattttaacataattatttcattcttttgattcagggtggcttgtgatagctgtaaacctggtttttttcccaatgtggagctatattgtgggtgtatttatggaatggattgatctgtgtttgagatatattgtggtatttatatagtgtataaatgtccgactttggattggac

SEQ ID NO: 21582 - DNA, 2779 bp, Zea Mays
gccatttaaaaggtcggagaccatggaagaaagttgactgaaagcaatgaaagtagtatgacgctgcaccaacctgattgctttctgagagcatgttgtatagaatagtgcatgcctttgaggattgtctgaatcacattgtttcgttgggctaccaaaaagaaaagcaaggtgcaatccactactattgttttagaatctagtcatcatggagtttgatgcgacatcacatcaagggccattattaagttggtggaccggcaaattatgatcctaattcagccacggcaattgttgtttacaagcctgggtcaaattcaattccaccaatgcagaatgaaacaacagcacaggaggagaattcaaaagttcaaaactgtgttaagaaaagagcaagctatggctttcactcgtgctgtggctgctgggtttgacattgacaacctgggttactttacttgattgcgtttgcagagcgctttggtgcttcacgtatgatgaaggcatgttcacatttcatcgaactatggaagcagaagcatgaaactggacaatggattgaagttgaacctgaagcaatttctacacgctctgaatttcctccatttaatgcatctggcattgtgttgatgggagacaacatgaagcaaaacctggaatcagggtctattaatggagagccaaatggcgaggatggagctaaagctgatcagaagtccagccagcagatggggtctcatgctgcatatcctccatgggcaatgcatcctgcatctggtgcagttctttacccaccttatcctatgcaaggaatgcctttctatcctggggtgaatccctactaccctccatatcctccagtggatgatcccaggtaccactagccaggaaggaaatctttgaggaagcactcctcggatagtaaggactcagaaactcttgacgctgaaagtgaccatagcagttcaggtggaggaaattctcatggtcacaagtcacatagaaaggggaagaggtctggaaagaagcctagtgtagttgttatcaagaatgtgaatgtaacatctaagaagtgtggctcatcagagagtgaatcacaatcaagttctgaagttgagtctgctgacagtgacaactcacactccaaatcaagagaaagaaagcataaaagctcatgttcaaaggagggtaggagaactacttttgatccgggagatgagtataacaaggatgaaacatcgaatggccatggtgttgagcaaggcaactggagtgcattccaaaatttcttgttgagagcagaagaaaaaacaagatctagtgatgcagacctgtttgctggtgagaaagaacccccatcacggagaaaacagaatgtaaacacagcagatcctattattttagttgagagagatggtggcaacgtctgtgagcagaacaaaataggttttgattcagccaatgggaggactagagttatccgggtcatgtccaatgatgaacttgttatgtctggagaagggagaatctatatggattgtgaaatgaaggagattgaagctggtggaggaaggtacaggagagggacaggtgacgactacatggtttatggtcagggatgtcagatagacagacattgtttgttggatcctcttgcagaggcccagtacaagaatcctgttcagcaggacaataataggaatggtgttacggatgagtcctttatgattcctcttaggtccagctcacaggataatatcggagcagagagcagaactactatggacatagatgttgagcttccttctagcattcataaagcatcagataaaaaggctgggcatcagcttttttacgaacctgatgaactgagtactgtgaaggttgaagatgcaaaaccagaggatgtcttgccggtcactgacggtgtacagaaggtagagaaagagaagctaaagaacgcaagggatggttcagataaaagaacgaaggattccctattgaggagactatcggcgccaaggaccccactgaatgatgcacaaaaacgtgcacagaacctgcgtgcatataaagcagaccttcagaaactgaagaaagagcaggaagaagagcaaataaagcgattggagaggcttaaattggataggcaaaagtggatcgccgcaagaggtaatggaaagggtccagggaacgatgctcctagagcgaacggtatgaatggacttagtaaatcagttccaaccttcactgggatgaaaagggttgaaaacggaacgactgaatcactcagcggtcgactgaagaggctttctgaacccaaaagcattgttggggcagagcattcgttgaacccaaagtcagctggtgcaggccgttcacgaagaagtatggcatgagttgatgtgagatggagaactgaatagcttgagtccatcgtgccactcgctagcccggtaacttacttactagaaacgtgaaaggcatctcaaaaggctttttgtacaggaaaaaaggaaatggctggctctgtagcattgtctgcttccaagatttgtgatggaaaatcgagctatctttcaatggcatggcgttggactttcaattttaacataattatttcattcttttgattcagggtggcttgtgatagctgtaaacctggtttttttcccaatgtggagctatattgtgggtgtatttatggaatggattgatctgtgtttgagatatattgtggtatttatatagtgtataaatgtccgactttggattggac

SEQ ID NO: 21583 - DNA, 2450 bp, Zea Mays
aagaaagttgactgaaagcaatgaaagtagtatgacgctgcaccaacctgattgctttctgagagcatgttgtatagaatagtgcatgcctttgaggattgtctgaatcacattgtttcgttgggctaccaaaaagaaaagcaaggtggaccggcaaattatgatcctaattcagccacggcaattgttgtttacaagcctgggtcaaattcaattccaccaatgcagaatgaaacaacagcacaggaggagaattcaaagaaggcatgttcacatttcatcgaactatggaagcagaagcatgaaactggacaatggattgaagttgaacctgaagcaatttctacacgctctgaatttcctccatttaatgcatctggcattgtgttgatgggagacaacatgaagcaaaacctggaatcagggtctattaatggagagccaaatggcgaggatggagctaaagctgatcagaagtccagccagcagatggggtctcatgctgcatatcctccatgggcaatgcatcctgcatctggtgcagttctttacccaccttatcctatgcaaggaatgcctttctatcctggggtgaatccctactaccctccatatcctccagtggatgatcccagttcaggtggaggaaattctcatggtcacaagtcacatagaaaggggaagaggtctggaaagaagcctagtgtagttgttatcaagaatgtgaatgtaacatctaagaagtgtggctcatcagagagtgaatcacaatcaagttctgaagttgagtctgctgacagtgacaactcacactccaaatcaagagaaagaaagcataaaagctcatgttcaaaggagggtaggagaactacttttgatccgggagatgagtataacaaggatgaaacatcgaatggccatggtgttgagcaaggcaactggagtgcattccaaaatttcttgttgagagcagaagaaaaaacaagatctagtgatgcagacctgtttgctggtgagaaagaacccccatcacggagaaaacagaatgtaaacacagcagatcctattattttagttgagagagatggtggcaacgtctgtgagcagaacaaaataggttttgattcagccaatgggaggactagagttatccgggtcatgtccaatgatgaacttgttatgtctggagaagggagaatctatatggattgtgaaatgaaggagattgaagctggtggaggaaggtacaggagagggacaggtgacgactacatggtttatggtcagggatgtcagatagacagacattgtttgttggatcctcttgcagaggcccagtacaagaatcctgttcagcaggacaataataggaatggtgttacggatgagtcctttatgattcctcttaggtccagctcacaggataatatcggagcagagagcagaactactatggacatagatgttgagcttccttctagcattcataaagcatcagataaaaaggctgggcatcagcttttttacgaacctgatgaactgagtactgtgaaggttgaagatgcaaaaccagaggatgtcttgccggtcactgacggtgtacagaaggtagagaaagagaagctaaagaacgcaagggatggttcagataaaagaacgaaggattccctattgaggagactatcggcgccaaggaccccactgaatgatgcacaaaaacgtgcacagaacctgcgtgcatataaagcagaccttcagaaactgaagaaagagcaggaagaagagcaaataaagcgattggagaggcttaaattggataggcaaaagtggatcgccgcaagaggtaatggaaagggtccagggaacgatgctcctagagcgaacggtatgaatggacttagtaaatcagttccaaccttcactgggatgaaaagggttgaaaacggaacgactgaatcactcagcggtcgactgaagaggctttctgaacccaaaagcattgttggggcagagcattcgttgaacccaaagtcagctggtgcaggccgttcacgaagaagtatggcatgagttgatgtgagatggagaactgaatagcttgagtccatcgtgccactcgctagcccggtaacttacttactagaaacgtgaaaggcatctcaaaaggctttttgtacaggaaaaaaggaaatggctggctctgtagcattgtctgcttccaagatttgtgatggaaaatcgagctatctttcaatggcatggcgttggactttcaattttaacataattatttcattcttttgattcagggtggcttgtgatagctgtaaacctggtttttttcccaatgtggagctatattgtgggtgtatttatggaatggattgatctgtgtttgagatatattgtggtatttatatagtgtataaatgtccgactttggattggac

SEQ ID NO: 21584 - DNA, 3875 bp, Zea Mays
ccaaaaattcgccgattttggtctgggaaagtattccctggtgccgactaggcgacgggaccaccaaaaaccactctcttgtgcgcgagcatcgttaaaattggccacgccgccgccgccggccggcgaggagccggtactgtctgcttgctcttcttttcaccgaaccaaaacgcccgccggaaagggtcaaaggggaaacagagatctcggtttgcagtgatgaagcttcgctgatgagctggcgcccgtccactcgcaacgacgctggacaaaagactagccgtcccgtcccgtcacggcccggcgacctggcaaggagaactgcagcgacagcgacagcgacctctggacaatcggctgtgacggtctttctcgtttgttttatagataggaaagaaataaagataagggttaaagctttctcgtagcctcctcagaacatacgggcgattgtcttttcgccggtgagccattaattccgtcgagctgatttcttcttgctggttttgccggttttatttttttcttttattggtaattcttggccgtggcgactgacgattccttttggcgcttgtaatagcacaagcatagctaaagtcgtcccgtttcctcctggtttcaatctgtttggaacttttgttagttccggtccatagggggaatcgtactatcctgtggtcaaaattgtcgcttctttcttttgtcgctctctctatacacaccaaaaagaaggaaaaaaaaccacgattttttctcccaactttgagtaattaccgagtgtttcttcaagtcggagctcggctctgtgcttagccgggaccctatacttggggttttggcgggtccatcggaatggtcagcgggaatctgctctaccggaggaagcgctcgtggcgtgccgatgagttcgtgagccggagcacgctgcaattgctcgactttgatgatggctcaccaccagagcatgcatggagaaggaaactaagtagtcatgctaatagattgaaggagttcaatgtcacattcagagaagcaattagaatgatgaaacttggtctccgactttggtcatacattcgggaagaagcttctcacggaaggaaagcaccaatcgatccattcactagagagggcaacaagccctcagcctcgcaaggagtacctcttggtgggatggggagtggtagtatttcaagaggctttaggggagaattcaagcattggcagataactcctggttcttgtgaaatgtcacctgtgatggccaatcaattttcgatctttgtcactcggggaggaaccaagaaatacgcttcagttttgtcgcctggtcaacttgatggtttgaagaaatctactgatgatggtatatcatcctgggactggaaattaaagggtgatcgttcaacgtatcatgctttgtttcctcgagcatggactgtttatgatggcgagccagatcctgaactgaaagtatcctgccgtcaaatatctccatttattccccatgattaccaggagagcagccttcctacctctgtttttgtatacactctagtgaatactggaaaggaaagagcaaaagttagcctattgatgacttgggcgaattctataggaggactttcacatcattctggggatcatgtaaatgagccattcgtagggaaaaatggagtttctggtgttcttctacatcacaagacagccaataataatcctcctgtaacatttgcaattgcggcatgtgaaaatcaaaatgtaaatgtcacagtattgcctgtttttgggctttctggagaaagttctgttactgctaggggaatgtggggcacaatggttcaggatggttcctttgatcaagataatctcaatactggtcctagcatgccttctttgctgggcgatacagtttgtgcagcagtttctgcttccacctgggttgaaccacatggaagatgtgcagttgtatttgcattggcttggtcttctcctcaggttaaatttaaaaaggggagtacatactacaggagatatacaaagttttatggaacttctccaagatcagcagtaaatttggtagaggacgctttgatgaagtataaacattgggaagaagagattgataagtggcagaccccggttctccaagatgagaggcttccagaatggtacaagattacactctttaatgagctgtacttcctagttgctggtggaaccgtttggattgatagtggatctttggtgtctgatgctgataacaagtcgaatccagaggaaagtaatttgtcacatgagatcgatgacaaagaaaatgttgggaaatttttgtaccttgaaggaatagaatacttcatgtggtgcacctatgatagctgttttgcgggaagataacagaagagtcagatttcttgctgatggtacctggggtattcgtaaagtaatcggtgctgtcgcccatgatcttggagcacatgatccttggcatgaattgaatgcttacaacatacatgacacaagtagatggaaagatcttaatcccaagttcgttcttcagatttacagggattttgctgcaacaggtgacaagtcatttggcaaggatgtctggcctgcagtctgtactgctatggaatacatggaacaattcgatcatgatggtgatggtatgattgaaaatgatggatttcctgatcaaacttacgatgcttggacagttcaaggagtaagtgcatattgtggttgcctctggcttgctgcccttcaagctgcggcagcactggccggaagccttggacatgatgactatgctgagaggtgcatgacaagatttgtgaaagctaaaactgtatttgaagccaggttatggaatggttcacacttcaattatgacagtggtacaagttatagtagccgttccatccaggcagatcagctggctggacaatggtatactgcatcgtcaggtttgcctcctctatttgatgaggataggataaaatgcacgcttcagaaaatatttgactacaatgtgatgagggtgaaaggaggacgtatgggagccgtgaatggtatgcatccaaatgggaaggtagatgaaacctgtatgcagtcaagagaaatctggacaggagtaacatatagtttagcagcaacgatgctgctccatggaatggagcatcaggccttcactactgcagaaggcatttatactgcaggatggtctgaagagggctatgggtactggttccaaactccagaagcatggacaattgatggccattacaggtcactaatttatatgcgcccccttgcaatctgggcaatgcagtgggccttgtcgcctccaaggtcgatactggaggcgccgaaggtaaatacaatggacagagctcacatttctccaggcaccttccaatttctccaggatagcgttagaaagatgacaccaaaaaacggttgttttggaaacactgtaattaacttggattgctgatgtgacggtagcacttgtatctcgcactgtccaatgtatgtttacggagcacctcatttagaaaatgttgagtgtgaaacgggtgctatattctgttcagcctttgcagttatgtggtgtacctctctgatgtaaattgcatctcacagtgggccggactttgtaaattgttgtacagaaaacgtacatatgataatgccgtgttaccctgatattcatgacaccgtttaccacaaaaatctgtacagtttattgttcatatagtattttagaacgagtacttgtcagattggcgtaagacaatgtcctcttagcgctgtactcttgatggtatatatagatgtacatgtgaatgatttatgacttgttt

SEQ ID NO: 21585 - DNA, 3941 bp, Zea Mays
caaaaattcgccgattttggtctgggaaagtattccctggtgccgactaggcgacgggaccaccaaaaaccactctcttgtgcgcgagcatcgttaaaattggccacgccgccgccgccggccggcgaggagccggtactgtctgcttgctcttcttttcaccgaaccaaaacgcccgccggaaagggtcaaaggggaaacagagatctcggtttgcagtgatgaagcttcgctgatgagctggcgcccgtccactcgcaacgacgctggacaaaagactagccgtcccgtcccgtcacggcccggcgacctggcaaggagaactgcagcgacagcgacagcgacctctggacaatcggctgtgacggtctttctcgtttgttttatagataggaaagaaataaagataagggttaaagctttctcgtagcctcctcagaacatacgggcgattgtcttttcgccggtgagccattaattccgtcgagctgatttcttcttgctggttttgccggttttatttttttcttttattggtaattcttggccgtggcgactgacgattccttttggcgcttgtaatagcacaagcatagctaaagtcgtcccgtttcctcctggtttcaatctgtttggaacttttgttagttccggtccatagggggaatcgtactatcctgtggtcaaaattgtcgcttctttcttttgtcgctctctctatacacaccaaaaagaaggaaaaaaaaccacgattttttctcccaactttgagtaattaccgagtgtttcttcaagtcggagctcggctctgtgcttagccgggaccctatacttggggttttggcgggtccatcggaatggtcagcgggaatctgctctaccggaggaagcgctcgtggcgtgccgatgagttcgtgagccggagcacgctgcaattgctcgactttgatgatggctcaccaccagagcatgcatggagaaggaaactaagtagtcatgctaatagattgaaggagttcaatgtcacattcagagaagcaattagaatgatgaaacttggtctccgactttggtcatacattcgggaagaagcttctcacggaaggaaagcaccaatcgatccattcactagagagggcaacaagccctcagcctcgcaaggagtacctcttggagtggtagtatttcaagaggctttaggggagaattcaagcattggcagataactcctggttcttgtgaaatgtcacctgtgatggccaatcaattttcgatctttgtcactcggggaggaaccaagaaatacgcttcagttttgtcgcctggtcaacttgatggtttgaagaaatctactgatgatggtatatcatcctgggactggaaattaaagggtgatcgttcaacgtatcatgctttgtttcctcgagcatggactgtttatgatggcgagccagatcctgaactgaaagtatcctgccgtcaaatatctccatttattccccatgattaccaggagagcagccttcctacctctgtttttgtatacactctagtgaatactggaaaggaaagagcaaaagttagcctattgatgacttgggcgaattctataggaggactttcacatcattctggggatcatgtaaatgagccattcgtagggaaaaatggagtttctggtgttcttctacatcacaagacagccaataataatcctcctgtaacatttgcaattgcggcatgtgaaaatcaaaatgtaaatgtcacagtattgcctgtttttgggctttctggagaaagttctgttactgctaggggaatgtggggcacaatggttcaggatggttcctttgatcaagataatctcaatactggtcctagcatgccttctttgctgggcgatacagtttgtgcagcagtttctgcttccacctgggttgaaccacatggaagatgtgcagttgtatttgcattggcttggtcttctcctcaggttaaatttaaaaaggggagtacatactacaggagatatacaaagttttatggaacttctccaagatcagcagtaaatttggtagaggacgctttgatgaagtataaacattgggaagaagagattgataagtggcagaccccggttctccaagatgagaggcttccagaatggtacaagattacactctttaatgagctgtacttcctagttgctggtggaaccgtttggattgatagtggatctttggtgtctgatgctgataacaagtcgaatccagaggaaagtaatttgtcacatgagatcgatgacaaagaaaatgttgggaaatttttgtaccttgaaggaatagaatacttcatgtggtgcacctatgatgtacacttctatgcctcctttgctcttttggatctgtttcctaagattgaattgagcattcaacgtgattttgctagagctgttttgcgggaagataacagaagagtcagatttcttgctgatggtacctggggtattcgtaaagtaatcggtgctgtcgcccatgatcttggagcacatgatccttggcatgaattgaatgcttacaacatacatgacacaagtagatggaaagatcttaatcccaagttcgttcttcagatttacagggattttgctgcaacaggtgacaagtcatttggcaaggatgtctggcctgcagtctgtactgctatggaatacatggaacaattcgatcatgatggtgatggtatgattgaaaatgatggatttcctgatcaaacttacgatgcttggacagttcaaggagtaagtgcatattgtggttgcctctggcttgctgcccttcaagctgcggcagcactggccggaagccttggacatgatgactatgctgagaggtgcatgacaagatttgtgaaagctaaaactgtatttgaagccaggttatggaatggttcacacttcaattatgacagtggtacaagttatagtagccgttccatccaggcagatcagctggctggacaatggtatactgcatcgtcaggtttgcctcctctatttgatgaggataggataaaatgcacgcttcagaaaatatttgactacaatgtgatgagggtgaaaggaggacgtatgggagccgtgaatggtatgcatccaaatgggaaggtagatgaaacctgtatgcagtcaagagaaatctggacaggagtaacatatagtttagcagcaacgatgctgctccatggaatggagcatcaggccttcactactgcagaaggcatttatactgcaggatggtctgaagagggctatgggtactggttccaaactccagaagcatggacaattgatggccattacaggtcactaatttatatgcgcccccttgcaatctgggcaatgcagtgggccttgtcgcctccaaggtcgatactggaggcgccgaaggtaaatacaatggacagagctcacatttctccaggcaccttccaatttctccaggatagcgttagaaagatgacaccaaaaaacggttgttttggaaacactgtaattaacttggattgctgatgtgacggtagcacttgtatctcgcactgtccaatgtatgtttacggagcacctcatttagaaaatgttgagtgtgaaacgggtgctatattctgttcagcctttgcagttatgtggtgtacctctctgatgtaaattgcatctcacagtgggccggactttgtaaattgttgtacagaaaacgtacatatgataatgccgtgttaccctgatattcatgacaccgtttaccacaaaaatctgtacagtttattgttcatatagtattttagaacgagtacttgtcagattggcgtaagacaatgtcctcttagcgctgtactcttgatggtatatatagatgtacatgtgaatgatttatgacttgttt

SEQ ID NO: 21586 - DNA, 3941 bp, Zea Mays
caaaaattcgccgattttggtctgggaaagtattccctggtgccgactaggcgacgggaccaccaaaaaccactctcttgtgcgcgagcatcgttaaaattggccacgccgccgccgccggccggcgaggagccggtactgtctgcttgctcttcttttcaccgaaccaaaacgcccgccggaaagggtcaaaggggaaacagagatctcggtttgcagtgatgaagcttcgctgatgagctggcgcccgtccactcgcaacgacgctggacaaaagactagccgtcccgtcccgtcacggcccggcgacctggcaaggagaactgcagcgacagcgacagcgacctctggacaatcggctgtgacggtctttctcgtttgttttatagataggaaagaaataaagataagggttaaagctttctcgtagcctcctcagaacatacgggcgattgtcttttcgccggtgagccattaattccgtcgagctgatttcttcttgctggttttgccggttttatttttttcttttattggtaattcttggccgtggcgactgacgattccttttggcgcttgtaatagcacaagcatagctaaagtcgtcccgtttcctcctggtttcaatctgtttggaacttttgttagttccggtccatagggggaatcgtactatcctgtggtcaaaattgtcgcttctttcttttgtcgctctctctatacacaccaaaaagaaggaaaaaaaaccacgattttttctcccaactttgagtaattaccgagtgtttcttcaagtcggagctcggctctgtgcttagccgggaccctatacttggggttttggcgggtccatcggaatggtcagcgggaatctgctctaccggaggaagcgctcgtggcgtgccgatgagttcgtgagccggagcacgctgcaattgctcgactttgatgatggctcaccaccagagcatgcatggagaaggaaactaagtagtcatgctaatagattgaaggagttcaatgtcacattcagagaagcaattagaatgatgaaacttggtctccgactttggtcatacattcgggaagaagcttctcacggaaggaaagcaccaatcgatccattcactagagagggcaacaagccctcagcctcgcaaggagtacctcttggtgggatggggagtggtagtatttcaagaggctttaggggagaattcaagcattggcagataactcctggttcttgtgaaatgtcacctgtgatggccaatcaattttcgatctttgtcactcggggaggaaccaagaaatacgcttcagttttgtcgcctggtcaacttgatggtttgaagaaatctactgatgatggtatatcatcctgggactggaaattaaagggtgatcgttcaacgtatcatgctttgtttcctcgagcatggactgtttatgatggcgagccagatcctgaactgaaagtatcctgccgtcaaatatctccatttattccccatgattaccaggagagcagccttcctacctctgtttttgtatacactctagtgaatactggaaaggaaagagcaaaagttagcctattgatgacttgggcggaggactttcacatcattctggggatcatgtaaatgagccattcgtagggaaaaatggagtttctggtgttcttctacatcacaagacagccaataataatcctcctgtaacatttgcaattgcggcatgtgaaaatcaaaatgtaaatgtcacagtattgcctgtttttgggctttctggagaaagttctgttactgctaggggaatgtggggcacaatggttcaggatggttcctttgatcaagataatctcaatactggtcctagcatgccttctttgctgggcgatacagtttgtgcagcagtttctgcttccacctgggttgaaccacatggaagatgtgcagttgtatttgcattggcttggtcttctcctcaggttaaatttaaaaaggggagtacatactacaggagatatacaaagttttatggaacttctccaagatcagcagtaaatttggtagaggacgctttgatgaagtataaacattgggaagaagagattgataagtggcagaccccggttctccaagatgagaggcttccagaatggtacaagattacactctttaatgagctgtacttcctagttgctggtggaaccgtttggattgatagtggatctttggtgtctgatgctgataacaagtcgaatccagaggaaagtaatttgtcacatgagatcgatgacaaagaaaatgttgggaaatttttgtaccttgaaggaatagaatacttcatgtggtgcacctatgatgtacacttctatgcctcctttgctcttttggatctgtttcctaagattgaattgagcattcaacgtgattttgctagagctgttttgcgggaagataacagaagagtcagatttcttgctgatggtacctggggtattcgtaaagtaatcggtgctgtcgcccatgatcttggagcacatgatccttggcatgaattgaatgcttacaacatacatgacacaagtagatggaaagatcttaatcccaagttcgttcttcagatttacagggattttgctgcaacaggtgacaagtcatttggcaaggatgtctggcctgcagtctgtactgctatggaatacatggaacaattcgatcatgatggtgatggtatgattgaaaatgatggatttcctgatcaaacttacgatgcttggacagttcaaggagtaagtgcatattgtggttgcctctggcttgctgcccttcaagctgcggcagcactggccggaagccttggacatgatgactatgctgagaggtgcatgacaagatttgtgaaagctaaaactgtatttgaagccaggttatggaatggttcacacttcaattatgacagtggtacaagttatagtagccgttccatccaggcagatcagctggctggacaatggtatactgcatcgtcaggtttgcctcctctatttgatgaggataggataaaatgcacgcttcagaaaatatttgactacaatgtgatgagggtgaaaggaggacgtatgggagccgtgaatggtatgcatccaaatgggaaggtagatgaaacctgtatgcagtcaagagaaatctggacaggagtaacatatagtttagcagcaacgatgctgctccatggaatggagcatcaggccttcactactgcagaaggcatttatactgcaggatggtctgaagagggctatgggtactggttccaaactccagaagcatggacaattgatggccattacaggtcactaatttatatgcgcccccttgcaatctgggcaatgcagtgggccttgtcgcctccaaggtcgatactggaggcgccgaaggtaaatacaatggacagagctcacatttctccaggcaccttccaatttctccaggatagcgttagaaagatgacaccaaaaaacggttgttttggaaacactgtaattaacttggattgctgatgtgacggtagcacttgtatctcgcactgtccaatgtatgtttacggagcacctcatttagaaaatgttgagtgtgaaacgggtgctatattctgttcagcctttgcagttatgtggtgtacctctctgatgtaaattgcatctcacagtgggccggactttgtaaattgttgtacagaaaacgtacatatgataatgccgtgttaccctgatattcatgacaccgtttaccacaaaaatctgtacagtttattgttcatatagtattttagaacgagtacttgtcagattggcgtaagacaatgtcctcttagcgctgtactcttgatggtatatatagatgtacatgtgaatgatttatgacttgttt

SEQ ID NO: 21587 - DNA, 3961 bp, Zea Mays
attttggtctgggaaagtattccctggtgccgactaggcgacgggaccaccaaaaaccactctcttgtgcgcgagcatcgttaaaattggccacgccgccgccgccggccggcgaggagccggtactgtctgcttgctcttcttttcaccgaaccaaaacgcccgccggaaagggtcaaaggggaaacagagatctcggtttgcagtgatgaagcttcgctgatgagctggcgcccgtccactcgcaacgacgctggacaaaagactagccgtcccgtcccgtcacggcccggcgacctggcaaggagaactgcagcgacagcgacagcgacctctggacaatcggctgtgacggtctttctcgtttgttttatagataggaaagaaataaagataagggttaaagctttctcgtagcctcctcagaacatacgggcgattgtcttttcgccggtgagccattaattccgtcgagctgatttcttcttgctggttttgccggttttatttttttcttttattggtaattcttggccgtggcgactgacgattccttttggcgcttgtaatagcacaagcatagctaaagtcgtcccgtttcctcctggtttcaatctgtttggaacttttgttagttccggtccatagggggaatcgtactatcctgtggtcaaaattgtcgcttctttcttttgtcgctctctctatacacaccaaaaagaaggaaaaaaaaccacgattttttctcccaactttgagtaattaccgagtgtttcttcaagtcggagctcggctctgtgcttagccgggaccctatacttggggttttggcgggtccatcggaatggtcagcgggaatctgctctaccggaggaagcgctcgtggcgtgccgatgagttcgtgagccggagcacgctgcaattgctcgactttgatgatggctcaccaccagagcatgcatggagaaggaaactaagtagtcatgctaatagattgaaggagttcaatgtcacattcagagaagcaattagaatgatgaaacttggtctccgactttggtcatacattcgggaagaagcttctcacggaaggcttgacaaattaccaattggcagaaagcaccaatcgatccattcactagagagggcaacaagccctcagcctcgcaaggagtacctcttggtgggatggggagtggtagtatttcaagaggctttaggggagaattcaagcattggcagataactcctggttcttgtgaaatgtcacctgtgatggccaatcaattttcgatctttgtcactcggggaggaaccaagaaatacgcttcagttttgtcgcctggtcaacttgatggtttgaagaaatctactgatgatggtatatcatcctgggactggaaattaaagggtgatcgttcaacgtatcatgctttgtttcctcgagcatggactgtttatgatggcgagccagatcctgaactgaaagtatcctgccgtcaaatatctccatttattccccatgattaccaggagagcagccttcctacctctgtttttgtatacactctagtgaatactggaaaggaaagagcaaaagttagcctattgatgacttgggcgaattctataggaggactttcacatcattctggggatcatgtaaatgagccattcgtagggaaaaatggagtttctggtgttcttctacatcacaagacagccaataataatcctcctgtaacatttgcaattgcggcatgtgaaaatcaaaatgtaaatgtcacagtattgcctgtttttgggctttctggagaaagttctgttactgctaggggaatgtggggcacaatggttcaggatggttcctttgatcaagataatctcaatactggtcctagcatgccttctttgctgggcgatacagtttgtgcagcagtttctgcttccacctgggttgaaccacatggaagatgtgcagttgtatttgcattggcttggtcttctcctcaggttaaatttaaaaaggggagtacatactacaggagatatacaaagttttatggaacttctccaagatcagcagtaaatttggtagaggacgctttgatgaagtataaacattgggaagaagagattgataagtggcagaccccggttctccaagatgagaggcttccagaatggtacaagattacactctttaatgagctgtacttcctagttgctggtggaaccgtttggattgatagtggatctttggtgtctgatgctgataacaagtcgaatccagaggaaagtaatttgtcacatgagatcgatgacaaagaaaatgttgggaaatttttgtaccttgaaggaatagaatacttcatgtggtgcacctatgatgtacacttctatgcctcctttgctcttttggatctgtttcctaagattgaattgagcattcaacgtgattttgctagagctgttttgcgggaagataacagaagagtcagatttcttgctgatggtacctggggtattcgtaaagtaatcggtgctgtcgcccatgatcttggagcacatgatccttggcatgaattgaatgcttacaacatacatgacacaagtagatggaaagatcttaatcccaagttcgttcttcagatttacagggattttgctgcaacaggtgacaagtcatttggcaaggatgtctggcctgcagtctgtactgctatggaatacatggaacaattcgatcatgatggtgatggtatgattgaaaatgatggatttcctgatcaaacttacgatgcttggacagttcaaggagtaagtgcatattgtggttgcctctggcttgctgcccttcaagctgcggcagcactggccggaagccttggacatgatgactatgctgagaggtgcatgacaagatttgtgaaagctaaaactgtatttgaagccaggttatggaatggttcacacttcaattatgacagtggtacaagttatagtagccgttccatccaggcagatcagctggctggacaatggtatactgcatcgtcaggtttgcctcctctatttgatgaggataggataaaatgcacgcttcagaaaatatttgactacaatgtgatgagggtgaaaggaggacgtatgggagccgtgaatggtatgcatccaaatgggaaggtagatgaaacctgtatgcagtcaagagaaatctggacaggagtaacatatagtttagcagcaacgatgctgctccatggaatggagcatcaggccttcactactgcagaaggcatttatactgcaggatggtctgaagagggctatgggtactggttccaaactccagaagcatggacaattgatggccattacaggtcactaatttatatgcgcccccttgcaatctgggcaatgcagtgggccttgtcgcctccaaggtcgatactggaggcgccgaaggtaaatacaatggacagagctcacatttctccaggcaccttccaatttctccaggatagcgttagaaagatgacaccaaaaaacggttgttttggaaacactgtaattaacttggattgctgatgtgacggtagcacttgtatctcgcactgtccaatgtatgtttacggagcacctcatttagaaaatgttgagtgtgaaacgggtgctatattctgttcagcctttgcagttatgtggtgtacctctctgatgtaaattgcatctcacagtgggccggactttgtaaattgttgtacagaaaacgtacatatgataatgccgtgttaccctgatattcatgacaccgtttaccacaaaaatctgtacagtttattgttcatatagtattttagaacgagtacttgtcagattggcgtaagacaatgtcctcttagcgctgtactcttgatggtatatatagatgtacatgtgaatgatttatgacttgttt

SEQ ID NO: 21588 - DNA, 3781 bp, Zea Mays
aaaccactctcttgtgcgcgagcatcgttaaaattggccacgccgccgccgccggccggcgaggagccggtactgtctgcttgctcttcttttcaccgaaccaaaacgcccgccggaaagggtcaaaggggaaacagagatctcggtttgcagtgatgaagcttcgctgatgagctggcgcccgtccactcgcaacgacgctggacaaaagactagccgtcccgtcccgtcacggcccggcgacctggcaaggagaactgcagcgacagcgacagcgacctctggacaatcggctgtgacggtctttctcgtttgttttatagataggaaagaaataaagataagggttaaagctttctcgtagcctcctcagaacatacgggcgattgtcttttcgccggtgagccattaattccgtcgagctgatttcttcttgctggttttgccggttttatttttttcttttattggtaattcttggccgtggcgactgacgattccttttggcgcttgtaatagcacaagcatagctaaagtcgtcccgtttcctcctggtttcaatctgtttggaacttttgttagttccggtccatagggggaatcgtactatcctgtggtcaaaattgtcgcttctttcttttgtcgctctctctatacacaccaaaaagaaggaaaaaaaaccacgattttttctcccaactttgagtaattaccgagtgtttcttcaagtcggagctcggctctgtgcttagccgggaccctatacttggggttttggcgggtccatcggaatggtcagcgggaatctgctctaccggaggaagcgctcgtggcgtgccgatgagttcgtgagccggagcacgctgcaattgctcgactttgatgatggctcaccaccagagcatgcatggagaaggaaactaagtagtcatgctaatagattgaaggagttcaatgtcacattcagagaagcaattagaatgatgaaacttggtctccgactttggtcatacattcgggaagaagcttctcacggaaggaaagcaccaatcgatccattcactagagagggcaacaagccctcagcctcgcaaggagtacctcttggtgggatggggagtggtagtatttcaagaggctttaggggagaattcaagcattggcagataactcctggttcttgtgaaatgtcacctgtgatggccaatcaattttcgatctttgtcactcggggaggaaccaagaaatacgcttcagttttgtcgcctggtcaacttgatggtttgaagaaatctactgatgatggtatatcatcctgggactggaaattaaagggtgatcgttcaacgtatcatgctttgtttcctcgagcatggactgtttatgatgctagtgaatactggaaaggaaagagcaaaagttagcctattgatgacttgggcgaattctataggaggactttcacatcattctggggatcatgtaaatgagccattcgtagggaaaaatggagtttctggtgttcttctacatcacaagacagccaataataatcctcctgtaacatttgcaattgcggcatgtgaaaatcaaaatgtaaatgtcacagtattgcctgtttttgggctttctggagaaagttctgttactgctaggggaatgtggggcacaatggttcaggatggttcctttgatcaagataatctcaatactggtcctagcatgccttctttgctgggcgatacagtttgtgcagcagtttctgcttccacctgggttgaaccacatggaagatgtgcagttgtatttgcattggcttggtcttctcctcaggttaaatttaaaaaggggagtacatactacaggagatatacaaagttttatggaacttctccaagatcagcagtaaatttggtagaggacgctttgatgaagtataaacattgggaagaagagattgataagtggcagaccccggttctccaagatgagaggcttccagaatggtacaagattacactctttaatgagctgtacttcctagttgctggtggaaccgtttggattgatagtggatctttggtgtctgatgctgataacaagtcgaatccagaggaaagtaatttgtcacatgagatcgatgacaaagaaaatgttgggaaatttttgtaccttgaaggaatagaatacttcatgtggtgcacctatgatgtacacttctatgcctcctttgctcttttggatctgtttcctaagattgaattgagcattcaacgtgattttgctagagctgttttgcgggaagataacagaagagtcagatttcttgctgatggtacctggggtattcgtaaagtaatcggtgctgtcgcccatgatcttggagcacatgatccttggcatgaattgaatgcttacaacatacatgacacaagtagatggaaagatcttaatcccaagttcgttcttcagatttacagggattttgctgcaacaggtgacaagtcatttggcaaggatgtctggcctgcagtctgtactgctatggaatacatggaacaattcgatcatgatggtgatggtatgattgaaaatgatggatttcctgatcaaacttacgatgcttggacagttcaaggagtaagtgcatattgtggttgcctctggcttgctgcccttcaagctgcggcagcactggccggaagccttggacatgatgactatgctgagaggtgcatgacaagatttgtgaaagctaaaactgtatttgaagccaggttatggaatggttcacacttcaattatgacagtggtacaagttatagtagccgttccatccaggcagatcagctggctggacaatggtatactgcatcgtcaggtttgcctcctctatttgatgaggataggataaaatgcacgcttcagaaaatatttgactacaatgtgatgagggtgaaaggaggacgtatgggagccgtgaatggtatgcatccaaatgggaaggtagatgaaacctgtatgcagtcaagagaaatctggacaggagtaacatatagtttagcagcaacgatgctgctccatggaatggagcatcaggccttcactactgcagaaggcatttatactgcaggatggtctgaagagggctatgggtactggttccaaactccagaagcatggacaattgatggccattacaggtcactaatttatatgcgcccccttgcaatctgggcaatgcagtgggccttgtcgcctccaaggtcgatactggaggcgccgaaggtaaatacaatggacagagctcacatttctccaggcaccttccaatttctccaggatagcgttagaaagatgacaccaaaaaacggttgttttggaaacactgtaattaacttggattgctgatgtgacggtagcacttgtatctcgcactgtccaatgtatgtttacggagcacctcatttagaaaatgttgagtgtgaaacgggtgctatattctgttcagcctttgcagttatgtggtgtacctctctgatgtaaattgcatctcacagtgggccggactttgtaaattgttgtacagaaaacgtacatatgataatgccgtgttaccctgatattcatgacaccgtttaccacaaaaatctgtacagtttattgttcatatagtattttagaacgagtacttgtcagattggcgtaagacaatgtcctcttagcgctgtactcttgatggtatatatagatgtacatgtgaatgatttatgacttgttt

SEQ ID NO: 21589 - DNA, 4230 bp, Zea Mays
aaaccactctcttgtgcgcgagcatcgttaaaattggccacgccgccgccgccggccggcgaggagccggtactgtctgcttgctcttcttttcaccgaaccaaaacgcccgccggaaagggtcaaaggggaaacagagatctcggtttgcagtgatgaagcttcgctgatgagctggcgcccgtccactcgcaacgacgctggacaaaagactagccgtcccgtcccgtcacggcccggcgacctggcaaggagaactgcagcgacagcgacagcgacctctggacaatcggctgtgacggtctttctcgtttgttttatagataggaaagaaataaagataagggttaaagctttctcgtagcctcctcagaacatacgggcgattgtcttttcgccggtgagccattaattccgtcgagctgatttcttcttgctggttttgccggttttatttttttcttttattggtaattcttggccgtggcgactgacgattccttttggcgcttgtaatagcacaagcatagctaaagtcgtcccgtttcctcctggtttcaatctgtttggaacttttgttagttccggtccatagggggaatcgtactatcctgtggtcaaaattgtcgcttctttcttttgtcgctctctctatacacaccaaaaagaaggaaaaaaaaccacgattttttctcccaactttgagtaattaccgagtgtttcttcaagtcggagctcggctctgtgcttagccgggaccctatacttggggttttggcgggtccatcggaatggtcagcgggaatctgctctaccggaggaagcgctcgtggcgtgccgatgagttcgtgagccggagcacgctgcaattgctcgactttgatgatggctcaccaccagagcatgcatggagaaggaaactaagtagtcatgctaatagattgaaggagttcaatgtcacattcagagaagcaattagaatgatgaaacttggtctccgactttggtcatacattcgggaagaagcttctcacggaaggaaagcaccaatcgatccattcactagagagggcaacaagccctcagcctcgcaaggagtacctcttggtgggatggggagtggtagtatttcaagaggctttaggggagaattcaagcattggcagataactcctggttcttgtgaaatgtcacctgtgatggccaatcaattttcgatctttgtcactcggggaggaaccaagaaatacgcttcagttttgtcgcctggtcaacttgatggtttgaagaaatctactgatgatggtatatcatcctgggactggaaattaaagggtgatcgttcaacgtatcatgctttgtttcctcgagcatggactgtttatgatgctagtgaatactggaaaggaaagagcaaaagttagcctattgatgacttgggcgaattctataggaggactttcacatcattctggggatcatgtaaatgagccattcgtagggaaaaatggagtttctggtgttcttctacatcacaagacagccaataataatcctcctgtaacatttgcaattgcggcatgtgaaaatcaaaatgtaaatgtcacagtattgcctgtttttgggctttctggagaaagttctgttactgctaggggaatgtggggcacaatggttcaggatggttcctttgatcaagataatctcaatactggtcctagcatgccttctttgctgggcgatacagtttgtgcagcagtttctgcttccacctgggttgaaccacatggaagatgtgcagttgtatttgcattggcttggtcttctcctcaggttaaatttaaaaaggggagtacatactacaggagatatacaaagttttatggaacttctccaagatcagcagtaaatttggtagaggacgctttgatgaggatgacacatgctgcgggagcaggacctcttcttgacagtggtgcgtgactggaattttcaagagcaggcctacgccaagcgctactacgacggctatcatcgcgacctcaagttcttcgttgacaattaggtgtggctgcgcttcctccattgccaagccgcctcccttgtggcccgtcccaacatcaagcccggccctcgctatgtcgggcccttctatgtcaaagagcgcatcggcgctgttgcaaaccacctgcagctgctcaagggccctgcacgccaatcttcgcctaagcgccggcccccatcccccgtacaacactcctacgatccctgcagtgcaggctctaacagattcactactgcttcctttaatttgtggtgtatttatttctctactagttactttcttacttgagaaaatttgcttattaatgtgactttcagagtataaacattgggaagaagagattgataagtggcagaccccggttctccaagatgagaggcttccagaatggtacaagattacactctttaatgagctgtacttcctagttgctggtggaaccgtttggattgatagtggatctttggtgtctgatgctgataacaagtcgaatccagaggaaagtaatttgtcacatgagatcgatgacaaagaaaatgttgggaaatttttgtaccttgaaggaatagaatacttcatgtggtgcacctatgatgtacacttctatgcctcctttgctcttttggatctgtttcctaagattgaattgagcattcaacgtgattttgctagagctgttttgcgggaagataacagaagagtcagatttcttgctgatggtacctggggtattcgtaaagtaatcggtgctgtcgcccatgatcttggagcacatgatccttggcatgaattgaatgcttacaacatacatgacacaagtagatggaaagatcttaatcccaagttcgttcttcagatttacagggattttgctgcaacaggtgacaagtcatttggcaaggatgtctggcctgcagtctgtactgctatggaatacatggaacaattcgatcatgatggtgatggtatgattgaaaatgatggatttcctgatcaaacttacgatgcttggacagttcaaggagtaagtgcatattgtggttgcctctggcttgctgcccttcaagctgcggcagcactggccggaagccttggacatgatgactatgctgagaggtgcatgacaagatttgtgaaagctaaaactgtatttgaagccaggttatggaatggttcacacttcaattatgacagtggtacaagttatagtagccgttccatccaggcagatcagctggctggacaatggtatactgcatcgtcaggtttgcctcctctatttgatgaggataggataaaatgcacgcttcagaaaatatttgactacaatgtgatgagggtgaaaggaggacgtatgggagccgtgaatggtatgcatccaaatgggaaggtagatgaaacctgtatgcagtcaagagaaatctggacaggagtaacatatagtttagcagcaacgatgctgctccatggaatggagcatcaggccttcactactgcagaaggcatttatactgcaggatggtctgaagagggctatgggtactggttccaaactccagaagcatggacaattgatggccattacaggtcactaatttatatgcgcccccttgcaatctgggcaatgcagtgggccttgtcgcctccaaggtcgatactggaggcgccgaaggtaaatacaatggacagagctcacatttctccaggcaccttccaatttctccaggatagcgttagaaagatgacaccaaaaaacggttgttttggaaacactgtaattaacttggattgctgatgtgacggtagcacttgtatctcgcactgtccaatgtatgtttacggagcacctcatttagaaaatgttgagtgtgaaacgggtgctatattctgttcagcctttgcagttatgtggtgtacctctctgatgtaaattgcatctcacagtgggccggactttgtaaattgttgtacagaaaacgtacatatgataatgccgtgttaccctgatattcatgacaccgtttaccacaaaaatctgtacagtttattgttcatatagtattttagaacgagtacttgtcagattggcgtaagacaatgtcctcttagcgctgtactcttgatggtatatatagatgtacatgtgaatgatttatgacttgttt

SEQ ID NO: 21590 - DNA, 3788 bp, Zea Mays
aaaccactctcttgtgcgcgagcatcgttaaaattggccacgccgccgccgccggccggcgaggagccggtactgtctgcttgctcttcttttcaccgaaccaaaacgcccgccggaaagggtcaaaggggaaacagagatctcggtttgcagtgatgaagcttcgctgatgagctggcgcccgtccactcgcaacgacgctggacaaaagactagccgtcccgtcccgtcacggcccggcgacctggcaaggagaactgcagcgacagcgacagcgacctctggacaatcggctgtgacggtctttctcgtttgttttatagataggaaagaaataaagataagggttaaagctttctcgtagcctcctcagaacatacgggcgattgtcttttcgccggtgagccattaattccgtcgagctgatttcttcttgctggttttgccggttttatttttttcttttattggtaattcttggccgtggcgactgacgattccttttggcgcttgtaatagcacaagcatagctaaagtcgtcccgtttcctcctggtttcaatctgtttggaacttttgttagttccggtccatagggggaatcgtactatcctgtggtcaaaattgtcgcttctttcttttgtcgctctctctatacacaccaaaaagaaggaaaaaaaaccacgattttttctcccaactttgagtaattaccgagtgtttcttcaagtcggagctcggctctgtgcttagccgggaccctatacttggggttttggcgggtccatcggaatggtcagcgggaatctgctctaccggaggaagcgctcgtggcgtgccgatgagttcgtgagccggagcacgctgcaattgctcgactttgatgatggctcaccaccagagcatgcatggagaaggaaactaagtagtcatgctaatagattgaaggagttcaatgtcacattcagagaagcaattagaatgatgaaacttggtctccgactttggtcatacattcgggaagaagcttctcacggaaggaaagcaccaatcgatccattcactagagagggcaacaagccctcagcctcgcaaggagtacctcttggagtggtagtatttcaagaggctttaggggagaattcaagcattggcagataactcctggttcttgtgaaatgtcacctgtgatggccaatcaattttcgatctttgtcactcggggaggaaccaagaaatacgcttcagttttgtcgcctggtcaacttgatggtttgaagaaatctactgatgatggtatatcatcctgggactggaaattaaagggtgatcgttcaacgtatcatgctttgtttcctcgagcatggactgtttatgatggcgagccagatcctgaactgaaagtatcctgccgtcaaatatctccatttattccccatgattaccaggagagcagccttcctacctctgtttttgtatacactctagtgaatactggaaaggaaagagcaaaagttagcctattgatgacttgggcggaggactttcacatcattctggggatcatgtaaatgagccattcgtagggaaaaatggagtttctggtgttcttctacatcacaagacagccaataataatcctcctgtaacatttgcaattgcggcatgtgaaaatcaaaatgtaaatgtcacagtattgcctgtttttgggctttctggagaaagttctgttactgctaggggaatgtggggcacaatggttcaggatggttcctttgatcaagataatctcaatactggtcctagcatgccttctttgctgggcgatacagtttgtgcagcagtttctgcttccacctgggttgaaccacatggaagatgtgcagttgtatttgcattggcttggtcttctcctcaggttaaatttaaaaaggggagtacatactacaggagatatacaaagttttatggaacttctccaagatcagcagtaaatttggtagaggacgctttgatgaagtataaacattgggaagaagagattgataagtggcagaccccggttctccaagatgagaggcttccagaatggtacaagattacactctttaatgagctgtacttcctagttgctggtggaaccgtttggattgatagtggatctttggtgtctgatgctgataacaagtcgaatccagaggaaagtaatttgtcacatgagatcgatgacaaagaaaatgttgggaaatttttgtaccttgaaggaatagaatacttcatgtggtgcacctatgatagctgttttgcgggaagataacagaagagtcagatttcttgctgatggtacctggggtattcgtaaagtaatcggtgctgtcgcccatgatcttggagcacatgatccttggcatgaattgaatgcttacaacatacatgacacaagtagatggaaagatcttaatcccaagttcgttcttcagatttacagggattttgctgcaacaggtgacaagtcatttggcaaggatgtctggcctgcagtctgtactgctatggaatacatggaacaattcgatcatgatggtgatggtatgattgaaaatgatggatttcctgatcaaacttacgatgcttggacagttcaaggagtaagtgcatattgtggttgcctctggcttgctgcccttcaagctgcggcagcactggccggaagccttggacatgatgactatgctgagaggtgcatgacaagatttgtgaaagctaaaactgtatttgaagccaggttatggaatggttcacacttcaattatgacagtggtacaagttatagtagccgttccatccaggcagatcagctggctggacaatggtatactgcatcgtcaggtttgcctcctctatttgatgaggataggataaaatgcacgcttcagaaaatatttgactacaatgtgatgagggtgaaaggaggacgtatgggagccgtgaatggtatgcatccaaatgggaaggtagatgaaacctgtatgcagtcaagagaaatctggacaggagtaacatatagtttagcagcaacgatgctgctccatggaatggagcatcaggccttcactactgcagaaggcatttatactgcaggatggtctgaagagggctatgggtactggttccaaactccagaagcatggacaattgatggccattacaggtcactaatttatatgcgcccccttgcaatctgggcaatgcagtgggccttgtcgcctccaaggtcgatactggaggcgccgaaggtaaatacaatggacagagctcacatttctccaggcaccttccaatttctccaggatagcgttagaaagatgacaccaaaaaacggttgttttggaaacactgtaattaacttggattgctgatgtgacggtagcacttgtatctcgcactgtccaatgtatgtttacggagcacctcatttagaaaatgttgagtgtgaaacgggtgctatattctgttcagcctttgcagttatgtggtgtacctctctgatgtaaattgcatctcacagtgggccggactttgtaaattgttgtacagaaaacgtacatatgataatgccgtgttaccctgatattcatgacaccgtttaccacaaaaatctgtacagtttattgttcatatagtattttagaacgagtacttgtcagattggcgtaagacaatgtcctcttagcgctgtactcttgatggtatatatagatgtacatgtgaatgatttatgacttgttt

SEQ ID NO: 21591 - DNA, 3624 bp, Zea Mays
aaaccactctcttgtgcgcgagcatcgttaaaattggccacgccgccgccgccggccggcgaggagccggtactgtctgcttgctcttcttttcaccgaaccaaaacgcccgccggaaagggtcaaaggggaaacagagatctcggtttgcagtgatgaagcttcgctgatgagctggcgcccgtccactcgcaacgacgctggacaaaagactagccgtcccgtcccgtcacggcccggcgacctggcaaggagaactgcagcgacagcgacagcgacctctggacaatcggctgtgacggtctttctcgtttgttttatagataggaaagaaataaagataagggttaaagctttctcgtagcctcctcagaacatacgggcgattgtcttttcgccggtgagccattaattccgtcgagctgatttcttcttgctggttttgccggttttatttttttcttttattggtaattcttggccgtggcgactgacgattccttttggcgcttgtaatagcacaagcatagctaaagtcgtcccgtttcctcctggtttcaatctgtttggaacttttgttagttccggtccatagggggaatcgtactatcctgtggtcaaaattgtcgcttctttcttttgtcgctctctctatacacaccaaaaagaaggaaaaaaaaccacgattttttctcccaactttgagtaattaccgagtgtttcttcaagtcggagctcggctctgtgcttagccgggaccctatacttggggttttggcgggtccatcggaatggtcagcgggaatctgctctaccggaggaagcgctcgtggcgtgccgatgagttcgtgagccggagcacgctgcaattgctcgactttgatgatggctcaccaccagagcatgcatggagaaggaaactaagtagtcatgctaatagattgaaggagttcaatgtcacattcagagaagcaattagaatgatgaaacttggtctccgactttggtcatacattcgggaagaagcttctcacggaaggaaagcaccaatcgatccattcactagagagggcaacaagccctcagcctcgcaaggagtacctcttggtgggatggggagtggtagtatttcaagaggctttaggggagaattcaagcattggcagataactcctggttcttgtgaaatgtcacctgtgatggccaatcaattttcgatctttgtcactcggggaggaaccaagaaatacgcttcagttttgtcgcctggtcaacttgatggtttgaagaaatctactgatgatggtatatcatcctgggactggaaattaaagggtgatcgttcaacgtatcatgctttgtttcctcgagcatggactgtttatgatggcgagccagatcctgaactgaaagtatcctgccgtcaaatatctccatttattccccatgattaccaggagagcagccttcctacctctgtttttgtatacactctagtgaatactggaaaggaaagagcaaaagttagcctattgatgacttgggcgaattctataggaggactttcacatcattctggggatcatgtaaatgagccattcgtagggaaaaatggagtttctggtgttcttctacatcacaagacagccaataataatcctcctgtaacatttgcaattgcggcatgtgaaaatcaaaatgtaaatgtcacagtattgcctgtttttgggctttctggagaaagttctgttactgctaggggaatgtggggcacaatggttcaggatggttcctttgatcaagataatctcaatactggtcctagcatgccttctttgctgggcgatacagtttgtgcagcagtttctgcttccacctgggttgaaccacatggaagatgtgcagttgtatttgcattggcttggtcttctcctcaggttaaatttaaaaaggggagtacatactacaggagatatacaaagttttatggaacttctccaagatcagcagtaaatttggtagaggacgctttgatgaagtataaacattgggaagaagagattgataagtggcagaccccggttctccaagatgagaggcttccagaatggtacaagattacactctttaatgagctgtacttcctagttgctggtggaaccgtttggattgatagtggatctttggtgtctgatgctgataacaagtcgaatccagaggaaagtaatttgtcacatgagatcgatgacaaagaaaatgttgggaaatttttgtaccttgaaggaatagaatacttcatgtggtgcacctatgatatttacagggattttgctgcaacaggtgacaagtcatttggcaaggatgtctggcctgcagtctgtactgctatggaatacatggaacaattcgatcatgatggtgatggtatgattgaaaatgatggatttcctgatcaaacttacgatgcttggacagttcaaggagtaagtgcatattgtggttgcctctggcttgctgcccttcaagctgcggcagcactggccggaagccttggacatgatgactatgctgagaggtgcatgacaagatttgtgaaagctaaaactgtatttgaagccaggttatggaatggttcacacttcaattatgacagtggtacaagttatagtagccgttccatccaggcagatcagctggctggacaatggtatactgcatcgtcaggtttgcctcctctatttgatgaggataggataaaatgcacgcttcagaaaatatttgactacaatgtgatgagggtgaaaggaggacgtatgggagccgtgaatggtatgcatccaaatgggaaggtagatgaaacctgtatgcagtcaagagaaatctggacaggagtaacatatagtttagcagcaacgatgctgctccatggaatggagcatcaggccttcactactgcagaaggcatttatactgcaggatggtctgaagagggctatgggtactggttccaaactccagaagcatggacaattgatggccattacaggtcactaatttatatgcgcccccttgcaatctgggcaatgcagtgggccttgtcgcctccaaggtcgatactggaggcgccgaaggtaaatacaatggacagagctcacatttctccaggcaccttccaatttctccaggatagcgttagaaagatgacaccaaaaaacggttgttttggaaacactgtaattaacttggattgctgatgtgacggtagcacttgtatctcgcactgtccaatgtatgtttacggagcacctcatttagaaaatgttgagtgtgaaacgggtgctatattctgttcagcctttgcagttatgtggtgtacctctctgatgtaaattgcatctcacagtgggccggactttgtaaattgttgtacagaaaacgtacatatgataatgccgtgttaccctgatattcatgacaccgtttaccacaaaaatctgtacagtttattgttcatatagtattttagaacgagtacttgtcagattggcgtaagacaatgtcctcttagcgctgtactcttgatggtatatatagatgtacatgtgaatgatttatgacttgttt

SEQ ID NO: 21592 - DNA, 3896 bp, Zea Mays
aaaccactctcttgtgcgcgagcatcgttaaaattggccacgccgccgccgccggccggcgaggagccggtactgtctgcttgctcttcttttcaccgaaccaaaacgcccgccggaaagggtcaaaggggaaacagagatctcggtttgcagtgatgaagcttcgctgatgagctggcgcccgtccactcgcaacgacgctggacaaaagactagccgtcccgtcccgtcacggcccggcgacctggcaaggagaactgcagcgacagcgacagcgacctctggacaatcggctgtgacggtctttctcgtttgttttatagataggaaagaaataaagataagggttaaagctttctcgtagcctcctcagaacatacgggcgattgtcttttcgccggtgagccattaattccgtcgagctgatttcttcttgctggttttgccggttttatttttttcttttattggtaattcttggccgtggcgactgacgattccttttggcgcttgtaatagcacaagcatagctaaagtcgtcccgtttcctcctggtttcaatctgtttggaacttttgttagttccggtccatagggggaatcgtactatcctgtggtcaaaattgtcgcttctttcttttgtcgctctctctatacacaccaaaaagaaggaaaaaaaaccacgattttttctcccaactttgagtaattaccgagtgtttcttcaagtcggagctcggctctgtgcttagccgggaccctatacttggggttttggcgggtccatcggaatggtcagcgggaatctgctctaccggaggaagcgctcgtggcgtgccgatgagttcgtgagccggagcacgctgcaattgctcgactttgatgatggctcaccaccagagcatgcatggagaaggaaactaagtagtcatgctaatagattgaaggagttcaatgtcacattcagagaagcaattagaatgatgaaacttggtctccgactttggtcatacattcgggaagaagcttctcacggaaggaaagcaccaatcgatccattcactagagagggcaacaagccctcagcctcgcaaggagtacctcttggtgggatggggagtggtagtatttcaagaggctttaggggagaattcaagcattggcagataactcctggttcttgtgaaatgtcacctgtgatggccaatcaattttcgatctttgtcactcggggaggaaccaagaaatacgcttcagttttgtcgcctggtcaacttgatggtttgaagaaatctactgatgatggtatatcatcctgggactggaaattaaagggtgatcgttcaacgtatcatgctttgtttcctcgagcatggactgtttatgatggcgagccagatcctgaactgaaagtatcctgccgtcaaatatctccatttattccccatgattaccaggagagcagccttcctacctctgtttttgtatacactctagtgaatactggaaaggaaagagcaaaagttagcctattgatgacttgggcgaattctataggaggactttcacatcattctggggatcatgtaaatgagccattcgtagggaaaaatggagtttctggtgttcttctacatcacaagacagccaataataatcctcctgtaacatttgcaattgcggcatgtgaaaatcaaaatgtaaatgtcacagtattgcctgtttttgggctttctggagaaagttctgttactgctaggggaatgtggggcacaatggttcaggatggttcctttgatcaagataatctcaatactggtcctagcatgccttctttgctgggcgatacagtttgtgcagcagtttctgcttccacctgggttgaaccacatggaagatgtgcagttgtatttgcattggcttggtcttctcctcaggttaaatttaaaaaggggagtacatactacaggagatatacaaagttttatggaacttctccaagatcagcagtaaatttggtagaggacgctttgatgagtatgtttcctagtataaacattgggaagaagagattgataagtggcagaccccggttctccaagatgagaggcttccagaatggtacaagattacactctttaatgagctgtacttcctagttgctggtggaaccgtttggattgatagtggatctttggtgtctgatgctgataacaagtcgaatccagaggaaagtaatttgtcacatgagatcgatgacaaagaaaatgttgggaaatttttgtaccttgaaggaatagaatacttcatgtggtgcacctatgatgtacacttctatgcctcctttgctcttttggatctgtttcctaagattgaattgagcattcaacgtgattttgctagagctgttttgcgggaagataacagaagagtcagatttcttgctgatggtacctggggtattcgtaaagtaatcggtgctgtcgcccatgatcttggagcacatgatccttggcatgaattgaatgcttacaacatacatgacacaagtagatggaaagatcttaatcccaagttcgttcttcagatttacagggattttgctgcaacaggtgacaagtcatttggcaaggatgtctggcctgcagtctgtactgctatggaatacatggaacaattcgatcatgatggtgatggtatgattgaaaatgatggatttcctgatcaaacttacgatgcttggacagttcaaggagtaagtgcatattgtggttgcctctggcttgctgcccttcaagctgcggcagcactggccggaagccttggacatgatgactatgctgagaggtgcatgacaagatttgtgaaagctaaaactgtatttgaagccaggttatggaatggttcacacttcaattatgacagtggtacaagttatagtagccgttccatccaggcagatcagctggctggacaatggtatactgcatcgtcaggtttgcctcctctatttgatgaggataggataaaatgcacgcttcagaaaatatttgactacaatgtgatgagggtgaaaggaggacgtatgggagccgtgaatggtatgcatccaaatgggaaggtagatgaaacctgtatgcagtcaagagaaatctggacaggagtaacatatagtttagcagcaacgatgctgctccatggaatggagcatcaggccttcactactgcagaaggcatttatactgcaggatggtctgaagagggctatgggtactggttccaaactccagaagcatggacaattgatggccattacaggtcactaatttatatgcgcccccttgcaatctgggcaatgcagtgggccttgtcgcctccaaggtcgatactggaggcgccgaaggtaaatacaatggacagagctcacatttctccaggcaccttccaatttctccaggatagcgttagaaagatgacaccaaaaaacggttgttttggaaacactgtaattaacttggattgctgatgtgacggtagcacttgtatctcgcactgtccaatgtatgtttacggagcacctcatttagaaaatgttgagtgtgaaacgggtgctatattctgttcagcctttgcagttatgtggtgtacctctctgatgtaaattgcatctcacagtgggccggactttgtaaattgttgtacagaaaacgtacatatgataatgccgtgttaccctgatattcatgacaccgtttaccacaaaaatctgtacagtttattgttcatatagtattttagaacgagtacttgtcagattggcgtaagacaatgtcctcttagcgctgtactcttgatggtatatatagatgtacatgtgaatgatttatgacttgttt

SEQ ID NO: 21593 - DNA, 4017 bp, Zea Mays
aaaccactctcttgtgcgcgagcatcgttaaaattggccacgccgccgccgccggccggcgaggagccggtactgtctgcttgctcttcttttcaccgaaccaaaacgcccgccggaaagggtcaaaggggaaacagagatctcggtttgcagtgatgaagcttcgctgatgagctggcgcccgtccactcgcaacgacgctggacaaaagactagccgtcccgtcccgtcacggcccggcgacctggcaaggagaactgcagcgacagcgacagcgacctctggacaatcggctgtgacggtctttctcgtttgttttatagataggaaagaaataaagataagggttaaagctttctcgtagcctcctcagaacatacgggcgattgtcttttcgccggtgagccattaattccgtcgagctgatttcttcttgctggttttgccggttttatttttttcttttattggtaattcttggccgtggcgactgacgattccttttggcgcttgtaatagcacaagcatagctaaagtcgtcccgtttcctcctggtttcaatctgtttggaacttttgttagttccggtccatagggggaatcgtactatcctgtggtcaaaattgtcgcttctttcttttgtcgctctctctatacacaccaaaaagaaggaaaaaaaaccacgattttttctcccaactttgagtaattaccgagtgtttcttcaagtcggagctcggctctgtgcttagccgggaccctatacttggggttttggcgggtccatcggaatggtcagcgggaatctgctctaccggaggaagcgctcgtggcgtgccgatgagttcgtgagccggagcacgctgcaattgctcgactttgatgatggctcaccaccagagcatgcatggagaaggaaactaagtagtcatgctaatagattgaaggagttcaatgtcacattcagagaagcaattagaatgatgaaacttggtctccgactttggtcatacattcgggaagaagcttctcacggaaggaaagcaccaatcgatccattcactagagagggcaacaagccctcagcctcgcaaggagtacctcttggtgggatggggagtggtagtatttcaagaggctttaggggagaattcaagcattggcagataactcctggttcttgtgaaatgtcacctgtgatggccaatcaattttcgatctttgtcactcggggaggaaccaagaaatacgcttcagttttgtcgcctggtcaacttgatggtttgaagaaatctactgatgatggtatatcatcctgggactggaaattaaagggtgatcgttcaacgtatcatgctttgtttcctcgagcatggactgtttatgatggcgagccagatcctgaactgaaagtatcctgccgtcaaatatctccatttattccccatgattaccaggagagcagccttcctacctctgtttttgtatacactctagtgaatactggaaaggaaagagcaaaagttagcctattgatgacttgggcgaattctataggaggactttcacatcattctggggatcatgtaaatgagccattcgtagggaaaaatggagtttctggtgttcttctacatcacaagacagccaataataatcctcctgtaacatttgcaattgcggcatgtgaaaatcaaaatgtaaatgtcacagtattgcctgtttttgggctttctggagaaagttctgttactgctaggggaatgtggggcacaatggttcaggatggttcctttgatcaagataatctcaatactggtcctagcatgccttctttgctgggcgatacagtttgtgcagcagtttctgcttccacctgggttgaaccacatggaagatgtgcagttgtatttgcattggcttggtcttctcctcaggttaaatttaaaaaggggagtacatactacaggagatatacaaagttttatggaacttctccaagatcagcagtaaatttggtagaggacgctttgatgaggatgacacatgctgcgggagcaggacctcttcttgacagtggtgcgtgactggaattttcaagagcaggcctacgccaagcgctactacgacggctatcatcgcgacctcaagttcttcgttgacaattagagtataaacattgggaagaagagattgataagtggcagaccccggttctccaagatgagaggcttccagaatggtacaagattacactctttaatgagctgtacttcctagttgctggtggaaccgtttggattgatagtggatctttggtgtctgatgctgataacaagtcgaatccagaggaaagtaatttgtcacatgagatcgatgacaaagaaaatgttgggaaatttttgtaccttgaaggaatagaatacttcatgtggtgcacctatgatgtacacttctatgcctcctttgctcttttggatctgtttcctaagattgaattgagcattcaacgtgattttgctagagctgttttgcgggaagataacagaagagtcagatttcttgctgatggtacctggggtattcgtaaagtaatcggtgctgtcgcccatgatcttggagcacatgatccttggcatgaattgaatgcttacaacatacatgacacaagtagatggaaagatcttaatcccaagttcgttcttcagatttacagggattttgctgcaacaggtgacaagtcatttggcaaggatgtctggcctgcagtctgtactgctatggaatacatggaacaattcgatcatgatggtgatggtatgattgaaaatgatggatttcctgatcaaacttacgatgcttggacagttcaaggagtaagtgcatattgtggttgcctctggcttgctgcccttcaagctgcggcagcactggccggaagccttggacatgatgactatgctgagaggtgcatgacaagatttgtgaaagctaaaactgtatttgaagccaggttatggaatggttcacacttcaattatgacagtggtacaagttatagtagccgttccatccaggcagatcagctggctggacaatggtatactgcatcgtcaggtttgcctcctctatttgatgaggataggataaaatgcacgcttcagaaaatatttgactacaatgtgatgagggtgaaaggaggacgtatgggagccgtgaatggtatgcatccaaatgggaaggtagatgaaacctgtatgcagtcaagagaaatctggacaggagtaacatatagtttagcagcaacgatgctgctccatggaatggagcatcaggccttcactactgcagaaggcatttatactgcaggatggtctgaagagggctatgggtactggttccaaactccagaagcatggacaattgatggccattacaggtcactaatttatatgcgcccccttgcaatctgggcaatgcagtgggccttgtcgcctccaaggtcgatactggaggcgccgaaggtaaatacaatggacagagctcacatttctccaggcaccttccaatttctccaggatagcgttagaaagatgacaccaaaaaacggttgttttggaaacactgtaattaacttggattgctgatgtgacggtagcacttgtatctcgcactgtccaatgtatgtttacggagcacctcatttagaaaatgttgagtgtgaaacgggtgctatattctgttcagcctttgcagttatgtggtgtacctctctgatgtaaattgcatctcacagtgggccggactttgtaaattgttgtacagaaaacgtacatatgataatgccgtgttaccctgatattcatgacaccgtttaccacaaaaatctgtacagtttattgttcatatagtattttagaacgagtacttgtcagattggcgtaagacaatgtcctcttagcgctgtactcttgatggtatatatagatgtacatgtgaatgatttatgacttgttt

SEQ ID NO: 21594 - DNA, 2734 bp, Zea Mays
tcaagcattggcagataactcctggttcttgtgaaatgtcacctgtgatggccaatcaattttcggatctttgtcactcggggaggaaccaagaaatacgcttcagttttgtcgcctggtcaacttgatggtttgaagaaatctactgatgatggtatatcatcctgggactggaaattaaagggtgatcgttcaacgtatcatgctttgtttcctcgagcatggactgtttatgatggcgagccagatcctgaactgaaagtatcctgccgtcaaatatctccatttattccccatgattaccaggagagcagccttcctacctctgtttttgtatacactctagtgaatactggaaaggaaagagcaaaagttagcctattgatgacttgggcgaattctataggaggactttcacatcattctggggatcatgtaaatgagccattcgtagggaaaaatggagtttctggtgttcttctacatcacaagacagccaataataatcctcctgtaacatttgcaattgcggcatgtgaaaatcaaaatgtaaatgtcacagtattgcctgtttttgggctttctggagaaagttctgttactgctaggggaatgtggggcacaatggttcaggatggttcctttgatcaagataatctcaatactggtcctagcatgccttctttgctgggcgatacagtttgtgcagcagtttctgcttccacctgggttgaaccacatggaagatgtgcagttgtatttgcattggcttggtcttctcctcaggttaaatttaaaaaggggagtacatactacaggagatatacaaagttttatggaacttctccaagatcagcagtaaatttggtagaggacgctttgatgaagtataaacattgggaagaagagattgataagtggcagaccccggttctccaagatgagaggcttccagaatggtacaagattacactctttaatgagctgtacttcctagttgctggtggaaccgtttggattgatagtggatctttggtgtctgatgctgataacaagtcgaatccagaggaaagtaatttgtcacatgagatcgatgacaaagaaaatgttgggaaatttttgtaccttgaaggaatagaatacttcatgtggtgcacctatgatgtacacttctatgcctcctttgctcttttggatctgtttcctaagattgaattgagcattcaacgtgattttgctagagctgttttgcgggaagataacagaagagtcagatttcttgctgatggtacctggggtattcgtaaagtaatcggtgctgtcgcccatgatcttggagcacatgatccttggcatgaattgaatgcttacaacatacatgacacaagtagatggaaagatcttaatcccaagttcgttcttcagatttacagggattttgctgcaacaggtgacaagtcatttggcaaggatgtctggcctgcagtctgtactgctatggaatacatggaacaattcgatcatgatggtgatggtatgattgaaaatgatggatttcctgatcaaacttacgatgcttggacagttcaaggagtaagtgcatattgtggttgcctctggcttgctgcccttcaagctgcggcagcactggccggaagccttggacatgatgactatgctgagaggtgcatgacaagatttgtgaaagctaaaactgtatttgaagccaggttatggaatggttcacacttcaattatgacagtggtacaagttatagtagccgttccatccaggcagatcagctggctggacaatggtatactgcatcgtcaggtttgcctcctctatttgatgaggataggataaaatgcacgcttcagaaaatatttgactacaatgtgatgagggtgaaaggaggacgtatgggagccgtgaatggtatgcatccaaatgggaaggtagatgaaacctgtatgcagtcaagagaaatctggacaggagtaacatatagtttagcagcaacgatgctgctccatggaatggagcatcaggccttcactactgcagaaggcatttatactgcaggatggtctgaagagggctatgggtactggttccaaactccagaagcatggacaattgatggccattacaggtcactaatttatatgcgcccccttgcaatctgggcaatgcagtgggccttgtcgcctccaaggtcgatactggaggcgccgaaggtaaatacaatggacagagctcacatttctccaggcaccttccaatttctccaggatagcgttagaaagatgacaccaaaaaacggttgttttggaaacactgtaattaacttggattgctgatgtgacggtagcacttgtatctcgcactgtccaatgtatgtttacggagcacctcatttagaaaatgttgagtgtgaaacgggtgctatattctgttcagcctttgcagttatgtggtgtacctctctgatgtaaattgcatctcacagtgggccggactttgtaaattgttgtacagaaaacgtacatatgataatgccgtgttaccctgatattcatgacaccgtttaccacaaaaatctgtacagtttattgttcatatagtattttagaacgagtacttgtcagattggcgtaagacaatgtcctcttagcgctgtactcttgatggtatatatagatgtacatgtgaatgatttatgacttgttt

SEQ ID NO: 21595 - DNA, 2276 bp, Zea Mays
aattctataggaggactttcacatcattctggggatcatgtaaatgagccattcgtagggaaaaatggagtttctggtgttcttctacatcacaagacagccaataataatcctcctgtaacatttgcaattgcggcatgtgaaaatcaaaatgtaaatgtcacagtattgcctgtttttgggctttctggagaaagttctgttactgctaggggaatgtggggcacaatggttcaggatggttcctttgatcaagataatctcaatactggtcctagcatgccttctttgctgggcgatacagtttgtgcagcagtttctgcttccacctgggttgaaccacatggaagatgtgcagttgtatttgcattggcttggtcttctcctcaggttaaatttaaaaaggggagtacatactacaggagatatacaaagttttatggaacttctccaagatcagcagtaaatttggtagaggacgctttgatgaagtataaacattgggaagaagagattgataagtggcagaccccggttctccaagatgagaggcttccagaatgatagtggatctttggtgtctgatgctgataacaagtcgaatccagaggaaagtaatttgtcacatgagatcgatgacaaagaaaatgttgggaaatttttgtaccttgaaggaatagaatacttcatgtggtgcacctatgatgtacacttctatgcctcctttgctcttttggatctgtttcctaagattgaattgagcattcaacgtgattttgctagagctgttttgcgggaagataacagaagagtcagatttcttgctgatggtacctggggtattcgtaaagtaatcggtgctgtcgcccatgatcttggagcacatgatccttggcatgaattgaatgcttacaacatacatgacacaagtagatggaaagatcttaatcccaagttcgttcttcagatttacagggattttgctgcaacaggtgacaagtcatttggcaaggatgtctggcctgcagtctgtactgctatggaatacatggaacaattcgatcatgatggtgatggtatgattgaaaatgatggatttcctgatcaaacttacgatgcttggacagttcaaggagtaagtgcatattgtggttgcctctggcttgctgcccttcaagctgcggcagcactggccggaagccttggacatgatgactatgctgagaggtgcatgacaagatttgtgaaagctaaaactgtatttgaagccaggttatggaatggttcacacttcaattatgacagtggtacaagttatagtagccgttccatccaggcagatcagctggctggacaatggtatactgcatcgtcaggtttgcctcctctatttgatgaggataggataaaatgcacgcttcagaaaatatttgactacaatgtgatgagggtgaaaggaggacgtatgggagccgtgaatggtatgcatccaaatgggaaggtagatgaaacctgtatgcagtcaagagaaatctggacaggagtaacatatagtttagcagcaacgatgctgctccatggaatggagcatcaggccttcactactgcagaaggcatttatactgcaggatggtctgaagagggctatgggtactggttccaaactccagaagcatggacaattgatggccattacaggtcactaatttatatgcgcccccttgcaatctgggcaatgcagtgggccttgtcgcctccaaggtcgatactggaggcgccgaaggtaaatacaatggacagagctcacatttctccaggcaccttccaatttctccaggatagcgttagaaagatgacaccaaaaaacggttgttttggaaacactgtaattaacttggattgctgatgtgacggtagcacttgtatctcgcactgtccaatgtatgtttacggagcacctcatttagaaaatgttgagtgtgaaacgggtgctatattctgttcagcctttgcagttatgtggtgtacctctctgatgtaaattgcatctcacagtgggccggactttgtaaattgttgtacagaaaacgtacatatgataatgccgtgttaccctgatattcatgacaccgtttaccacaaaaatctgtacagtttattgttcatatagtattttagaacgagtacttgtcagattggcgtaagacaatgtcctcttagcgctgtactcttgatggtatatatagatgtacatgtgaatgatttatgacttgttt

SEQ ID NO: 21596 - DNA, 1484 bp, Zea Mays
attcatgtgtcatcctaaatattttatatcttatattctcgtcaatagtccaatacaattaacagacttaatatgcctgaaatactcccattaattccaaatgtaattcgtttagatttgtgcacaaggattgagaaaaatagatcaaatggccttagcgcccttcatttattatgaattgggaaagaccaatccattttgcccatatcaatgagaagggtcactgaccctagcaatgtccattcttcaataaaccttttccacatcctccattgcccatatctgttgtttacaaagctcattagatgtgtctactagctagcataggaactgacaccaataagtaataggttactagaatcctatcccactcaatcttctaataggcatgcagtaacaccatttatattactaaaaaataagacatctggcttaccattaattcattgcatggcaccactcacaacatgctgagcatcaatatcatatacctggcaagttgtagtaacaaggccaaacactgtatctaaaagttaaaagaaaaatgcaaacaaaaaatgatgcatatggtggtttagtaaacccaatgactatagtgaatacctctggaactataatgtataccttatccatgagttaaggttctttgactggaacattaatttagattcaaaataaaactagcactaaccgtccataacaaaatctaccacattaattatttaccatttgctgcagcttttacagaaaaataagaatacggtaattttataagttaagaaagggaaacataacagacatgaatggacaacaatatctttctctagagtatcattccttttgtgttaaaagaaaattacaagaggttacttgtacaatcagatgttcaagttgtttaattctagccccactgtctacaggattctcaagacagcaagacaacaaccaaggattcgcaagacaacaatcaatgacagcaaccaatggcaaaaattagatggcgccagggcttgggcaaaagaaactactatttagaaacttggtcctgaccgatcgttaaatccattcccttgtgtcttacactctagattccttaatacctaagaagattgatacattacatcactgagtgggtatggcccacgtcgcctctgcaactatattcaaagaaatacgaaattgcaattatgattcataagttactaatgttgctaagttatggaagatagatgttacaaatacctaccgaagcaccattttagttagagataacaaaatcataattctactatttatgtattcaggtgcaggtacaatggaaaaacaatcattttaccttttcttctaattcctattttggttgaaataatcggagtaataacctttcttacctcttgcggactcaataatatgctgttgatatcaattccagttgttctccttcatgaggatctcctagtgcatcctgttcttcaccaaacagg

SEQ ID NO: 21597 - DNA, 1872 bp, Zea Mays
caagatgtcattttgtatgccaacattttgcatcacacaacatataatacattttttatctcaactaccatgactatcaatcttgtctatgtcgcacgtgcatttcatcgagcacctttggtgcgtggcttcattgtaccactcaagtcattgcatcaccgtcgagcacgaatccattgagcacctccacttcactgcctccatccgttgcaaatcactgcctccagcgcccactcgacccctccatctctgcaatggtggccggtggtgcggtgaaaggagatgacgatgtgcagcttccatgcgggcgcggggaagatgacgtggtgaagaccgccagcctctacaccgtctccagcaaatgtcgatgccctggccatggtgaacaaggtgatccttgggcaagcaaggtgtcttctactgaaggtaaaggacaacagaatgattcttggtcaagtaagatgacttctcgtggtgctgaggataccagaggtggctgggacagcaaggtgaaaggctcttcctgcaatgatggggttgctgatgcaactgaggagctcgagcacgacacgattaactcaggaattttatgtaatgttgatgcaaggacattgacttttatcatcagaaagacttcctactgttgatggtatggattctagcagctggattttagtttttgtatttggtgaacttttgttcaacacactcgttgaagttaacagtaatagatacaagtctattatcctgatatttttaatatgcatttgcaggcattagcataaatcatatgaaggaagtagattcacatgcacccgtgaagcagaagctacaattatttccaataaatgaagctactcttaagccatttgagaaggttgatttattagacagccctattgccagactacctgacatagagaccacaacacttggagccacatatgttgctagcttagatgcaggagtttggaccaaggaacaagtatttgcaggttagcacaaggagaacgcgacaatctttcgcccaaaactggatgaggtgcacaagaagagggctgattcatggtacaagacggtttcaagatcattcgatttggctgacctttctctgtaaatgtttcttgtcggcattgatctatctgtttttggaagatgcaaatgaataaattggtctttgctggtactattcttaactacttgttatttacggtctttacaaaagcgagtacaagaatatcctcaaattttcggcaggaagtatttttctagaatatttatgtgtgcttccatagatttgaatggtttgcatagactatcccatcaacatagacaattggagaagctcaatttccgatctgcagctttgctagagaattttgcgtatgcattagttattgcatccgagaaaaaagacttagggtacataagccttgtactttgtcaatattaaaagtaggtcttggatgagcaatatgacagaagcaacatttgtgacctaattttcctgctcctgtttttgtcttgcatggacaacaagtttggctctttggactgacacaattagctcgagcagcccacgcaacacctccatcgggtcacttagagacacctccctcctctcgagttgcgttgccgctgtccctcccctccctcgttggcacctaatcttatcaaaataaaccatataaaattaaatagtgagataagtttaaatagccgatgtaaagttgagagtaacaatgcattgttattgacagaaattatcagatatttattcatttttatgtaattggtgtgcaatatcattttattgaataatttatgtaccgtcgcaacacacgaaaattgtactatttaatgttatctctg

SEQ ID NO: 21598 - DNA, 1636 bp, Zea Mays
caagatgtcattttgtatgccaacattttgcatcacacaacatataatacattttttatctcaactaccatgactatcaatcttgtctatgtcgcacgtgcatttcatcgagcacctttggtgcgtggcttcattgtaccactcaagtcattgcatcaccgtcgagcacgaatccattgagcacctccacttcactgcctccatccgttgcaaatcactgcctccagcgcccactcgacccctccatctctgcaatggtggccggtggtgcggtgaaaggagatgacgatgtgcagcttccatgcgggcgcggggaagatgacgtggtgaagaccgccagcctctacaccgtctccagcaaatgtcgatgccctggccatggtgaacaaggtgatccttgggcaagcaaggtgtcttctactgaaggtaaaggacaacagaatgattcttggtcaagtaagatgacttctcgtggtgctgaggataccagaggtggctgggacagcaaggtgaaaggctcttcctgcaatgatgggggcattagcataaatcatatgaaggaagtagattcacatgcacccgtgaagcagaagctacaattatttccaataaatgaagctactcttaagccatttgagaaggttgatttattagacagccctattgccagactacctgacatagagaccacaacacttggagccacatatgttgctagcttagatgcaggagtttggaccaaggaacaagtatttgcaggttagcacaaggagaacgcgacaatctttcgcccaaaactggatgaggtgcacaagaagagggctgattcatggtacaagacggtttcaagatcattcgatttggctgacctttctctgtaaatgtttcttgtcggcattgatctatctgtttttggaagatgcaaatgaataaattggtctttgctggtactattcttaactacttgttatttacggtctttacaaaagcgagtacaagaatatcctcaaattttcggcaggaagtatttttctagaatatttatgtgtgcttccatagatttgaatggtttgcatagactatcccatcaacatagacaattggagaagctcaatttccgatctgcagctttgctagagaattttgcgtatgcattagttattgcatccgagaaaaaagacttagggtacataagccttgtactttgtcaatattaaaagtaggtcttggatgagcaatatgacagaagcaacatttgtgacctaattttcctgctcctgtttttgtcttgcatggacaacaagtttggctctttggactgacacaattagctcgagcagcccacgcaacacctccatcgggtcacttagagacacctccctcctctcgagttgcgttgccgctgtccctcccctccctcgttggcacctaatcttatcaaaataaaccatataaaattaaatagtgagataagtttaaatagccgatgtaaagttgagagtaacaatgcattgttattgacagaaattatcagatatttattcatttttatgtaattggtgtgcaatatcattttattgaataatttatgtaccgtcgcaacacacgaaaattgtactatttaatgttatctctg

SEQ ID NO: 21599 - DNA, 1318 bp, Zea Mays
atggtggccggtggtgcggtgaaaggagatgacgatgtgcagcttccatgcgggcgcggggaagatgacgtggtgaagaccgccagcctctacaccgtctccagcaaatgtcgatgccctggccatggtgaacaaggtgatccttgggcaagcaaggtgtcttctactgaaggtaaaggacaacagaatgattcttggtcaagtaagatgacttctcgtggtgctgaggataccagaggtggctgggacagcaaggtgaaaggctcttcctgcaatgatggggttgctgatgcaactgaggagctcgagcacgacacgattaactcaggaattttatgtaatgttgatgcaaggacattgacttttatcatcagaaagacttcctactgttgatggtatggattctagcagctggattttagtttttgtatttggtgaacttttgttcaacacactcgttgaagttaacagtaatagatacaagtctattatcctgatatttttaatatgcatttgcaggcattagcataaatcatatgaaggaagtagattcacatgcacccgtgaagcagaagctacaattatttccaataaatgaagctactcttaagccatttgagaaggttgatttattagacagccctattgccagactacctgacatagagaccacaacacttggagccacatatgttgctagcttagatgcaggagtttggaccaaggaacaagtatttgcagatttgaatggtttgcatagactatcccatcaacatagacaattggagaagctcaatttccgatctgcagctttgctagagaattttgcgtatgcattagttattgcatccgagaaaaaagacttagggtacataagccttgtactttgtcaatattaaaagtaggtcttggatgagcaatatgacagaagcaacatttgtgacctaattttcctgctcctgtttttgtcttgcatggacaacaagtttggctctttggactgacacaattagctcgagcagcccacgcaacacctccatcgggtcacttagagacacctccctcctctcgagttgcgttgccgctgtccctcccctccctcgttggcacctaatcttatcaaaataaaccatataaaattaaatagtgagataagtttaaatagccgatgtaaagttgagagtaacaatgcattgttattgacagaaattatcagatatttattcatttttatgtaattggtgtgcaatatcattttattgaataatttatgtaccgtcgcaacacacgaaaattgtactatttaatgttatctctg

SEQ ID NO: 21600 - DNA, 742 bp, Zea Mays
atggtggccggtggtgcggtgaaaggagatgacgatgtgcagcttccatgcgggcgcggggaagatgacgtggtgaagaccgccagcctctacaccgtctccagcaaatgtcgatgccctggccatggtgaacaaggtgatccttgggcaagcaaggtgtcttctactgaaggtaaaggacaacagaatgattcttggtcaagtaagatgacttctcgtggtgctgaggataccagaggtggctgggacagcaaggtgaaaggctcttcctgcaatgatgggggtaagtgggaaaatgctggtagcgttgagtgttagactgtgtgtgttagtgtgtgtgggcaaaacctctttttttttttttttttttgcaggaacgggtgatagagcattggtgggatgggatctaacaggagggacgagtggaagggaaggtttggagatttcggctgtgctggtctgagtctgacgtcgaatattgggaagcgaccgcttgtcttcttttttatttgtgttaacggatttgctgccaacattctttcgtttaacccaaatcgtttcggtcctgattactgttgcaatctgttggtagattttgagatgtggtggcttctatacaaccagtgatgcacatccctatctcctccgtagtgtctaggtacatcgcatttctttgttcctgcatctccaatagttgccaaaatgcattctatatttcggtttagaagaatattaacaaaaa

SEQ ID NO: 21601 - DNA, 1460 bp, Zea Mays
agaaaatcaaactattcttttttcacttatttttaaacttttcgcgagagcaacttttaatgaacaaaaccatagtagtttaccgtgaaatagagtatttttatgtgaaatcgttcacgagagaagtgtcgcttcacatacaaaacagtttatccttcaaagctataattgacaatccatccggggtgtccatgggcctaattgacagtttgttgcaatcaatgccacctgtggttggtgtttctttagttgctgatgcaactgaggagctcgagcacgacacgattaactcaggaattttatgtaatgttgatgcaaggacattgacttttatcatcagaaagacttcctactgttgatggcattagcataaatcatatgaaggaagtagattcacatgcacccgtgaagcagaagctacaattatttccaataaatgaagctactcttaagccatttgagaaggttgatttattagacagccctattgccagactacctgacatagagaccacaacacttggagccacatatgttgctagcttagatgcaggagtttggaccaaggaacaagtatttgcaggttagcacaaggagaacgcgacaatctttcgcccaaaactggatgaggtgcacaagaagagggctgattcatggtacaagacggtttcaagatcattcgatttggctgacctttctctgtaaatgtttcttgtcggcattgatctatctgtttttggaagatgcaaatgaataaattggtctttgctggtactattcttaactacttgttatttacggtctttacaaaagcgagtacaagaatatcctcaaattttcggcaggaagtatttttctagaatatttatgtgtgcttccatagatttgaatggtttgcatagactatcccatcaacatagacaattggagaagctcaatttccgatctgcagctttgctagagaattttgcgtatgcattagttattgcatccgagaaaaaagacttagggtacataagccttgtactttgtcaatattaaaagtaggtcttggatgagcaatatgacagaagcaacatttgtgacctaattttcctgctcctgtttttgtcttgcatggacaacaagtttggctctttggactgacacaattagctcgagcagcccacgcaacacctccatcgggtcacttagagacacctccctcctctcgagttgcgttgccgctgtccctcccctccctcgttggcacctaatcttatcaaaataaaccatataaaattaaatagtgagataagtttaaatagccgatgtaaagttgagagtaacaatgcattgttattgacagaaattatcagatatttattcatttttatgtaattggtgtgcaatatcattttattgaataatttatgtaccgtcgcaacacacgaaaattgtactatttaatgttatctctg

SEQ ID NO: 21602 - DNA, 2710 bp, Zea Mays
caagagggggagaagtggagaagaaaacaaaagttcttccctcttccaaatccgcgtattgcgcacttttcaatctctcatcacatcgccccgttgcaaggctgcttctgccttctggtgtctctctcgctttccctctctagattccaatactttcccctgttcctgggcaagcccatcgtgacgggagggcgggagacgctgcccagtctactctagcctgggtttggagagagatgggcagatgagggtgggagtgggagtaatacaacagagccaaaccgagggaggagagagagggccagagaacacaaagaggcaaggcaaggaagcagggacagactccaagattgggggcgactgataagagcgaggagcagaggcgctgttttctctctccgattccctcagcttcctgtggcgtggtggggtgtgtggcgacgaagggaggctcgccggggcgcggacggacgcccgcgatggccggcgtcgacgttgccaggcacgcgcacagcccggcgcaccacgccgtggcggcgcgggaccacgtcgcgctgcgccgcgtgctggaagcgctcccgccggcccgccggcccgaggagatccggacggaggcggactccgtcgccgaggaggcccgcgccgaggccgtctcggcggtcatcgaccgccgcgacgtgccagggcgggagacgccgctccacctcgccgtgcgcctttgtgacgccacggcgaccgagatgctcatggcggccggcgccgactggagcctgcagaacgagcagggctggagcgcactgcaggaggccatctgcgcgcgcgaggaggctctggcgcgcgtcatcgtgcgccactaccagcccctcgcctgggccaagtggtgccgccgcctgccccgcgtcgtcgccgccatgcgccggatgcgggacttctacatggagatcaccttccacttcgagagctctgtcatcccattcatttcccgcgtcgccccctccgacacctacagggtatggaagcgcggcgccaacctccgcgccgacatgaccctcgccggtttcgatggcttcaagatccaacgctccgaccagaccatactcttcctcggggaagggtcggaggatggaaaggtgccgcctggttcactgtgcatgatcaaccacaaggacaaggagattatgaacgcgctcgagggggcaggcgccccggcctcggaggcagaggtccagcaggaggtcgctgcaatgtcacagaccaacatcttccgtccggggatcgacgtcacccaagcggtgctgctcccacagctcacatggcggcggcaggaacggacagaggccgttggcccgtggaaggccaaggtgtatgacatgaatcatgtgctggtcagtgtcaagtcaaggagggtcccgggagcgatgacggatgaggaattcttctcatctagcaacgacaatgatacagagagcgaggggtttgacgatgttctgacagaggaggagaagaaacagctggaggctgcgctaaaaatggattctccggatgccggtggagaagaccagtcggactcatttgctggccctcgacatagttgctttgagccaagggagagggagatacccatcgagggcatgagtgtttctggaaatgtggagagtaagcatgacaagaaaggttggttcagtaattggggaaagagagctcaagttagcaagccagaaagggtgaagaagatggcacctccaaggagctcgctctgtgtagatgagaaggtgagtgacctcctctttgaatcaccctcaaatgcacaaacaagaccaggaaggcattcagtagatgtagtcagagcagatgacaacagaaggatcagggaaagggatagtaggaggtatgttccttctgcagagaatgggcataggcgcaaagaaggttccaaagaaagtgaaggcaattcgtcgtttgagggatctacttacaacaaaactccctccagatacatttcctgtcaaggttgccatcccagtcgtgcctacgatcagagtgcttgtgacattcacgaaattcgaggagctacagccgctagaggagttcggcacaccaccttcaagccctgacaaaagcaagagcccagcagtgcagcctccttcgagctcctggattcaatggatcaaggcgccttattaccgccagatgaacttgtctacggcgccaggcccgagcagccgcgtggaggacatccaccaccaggacccgttcgccatcccttcggattacgtgtggaccacacccgaggagaagaaaaagaagacacaggaaaacaagaacaggtccaagaaaggcaggaacgggtgatagagcattggtgggatgggatctaacaggagggacgagtggaagggaaggtttggagatttcggctgtgctggtctgagtctgacgtcgaatattgggaagcgaccgcttgtcttcttttttatttgtgttaacggatttgctgccaacattctttcgtttaacccaaatcgtttcggtcctgattactgttgcaatctgttggtagattttgagatgtggtggcttctatacaaccagtgatgcacatccctatctcctccgtagtgtctaggtacatcgcatttctttgttcctgcatctccaatagttgccaaaatgcattctatatttcggtttagaagaatattaacaaaaa

SEQ ID NO: 21603 - DNA, 1526 bp, Zea Mays
tcccatcccatcagatccgcccgcccttcgccaacaggatgggagtagatacgatacgatacgagctcatttgtcgctgcttccttcatttcatctcttcttctccgctgctaggctcgtcctggccctgtcctagccggctagcccatgcctggaagatgatcggcgacggcaacaagcgcgatgcaaggcagttccggcgggggcgaactgagaacacatgagaataatgagatgagattgctcgcctcgcgggccttccttgctgctgttccgcagggtggcggtctgggtggccgcccgtcgtccaggggagtatcgagacacgtacgcacgaattcaccaccacgcgatccagcatgttttgctgctgcagtgctcttcgtcacggttatatatatatatatatgtgatcgaactgccatgcatggtaagaaatcactgcgcgcttgctattaaaaaatatatctgtgtgttagcgataactttattaagctgtactcctctcaattccatattgcaagctattttagcttttcttacgcacatgcatagtttttgttagacgtctagatttgtatacattgtgtctatgggtattttttggttctcgatctactttcctactacaacttacttaaggttagtcagccaaattaaagaactaatcttattgtacagaaaaatagataaattatgtcaagttatcaaacaaagcttaaatacatgcatagttaaaaaaatatatgcatctataaaaatagtgttaactttttttatatatatacatgtatgtagttatgtattatgtctaaatatatgtatctaaaagaactaggataataggttacagtttaaaaatagagataataagcatgtttggttcggcttttttctgaagggttttttctaagaatctagcttcctagataatctatggtcacaagaatctatatatcgtgaggcttgcacgtagaggaagatgaagggatcggtttagaatttaggaggtggcggattcgtctcgtcagggtcccgactcagaggattctacattcatgttgatttgagtgatcacaaaggccttaagttgatccaatttttccactgcaagatcatcatgttttgattctttcttaaattcttcattttatatggtatcaattctagcatttaatagctttttatagtaggggattattttttcgtttcctctcaagctttctaggatcatattcaacatatgtacgggcaatattctttaccatctgggaggttttgggctgccgattcgataaagaaggcccaacgtaagaatgatccggtgcttcactagttgggctggctcatctgatggcgtgtgtttatttgtttcatgtatagactactacaatatatagaaacgtgtgttcctagaggggaaaaaaggtcgatttgtaccttcctaaatcatatcattatagtctgatttgtttcatgtatagactaccaccgcagggttcaagagtgtttggcttacacataga

SEQ ID NO: 21604 - DNA, 1785 bp, Zea Mays
ccgcgacttctccgggcaccgctcgcacgccatcagcgccatccccactacctcaacttgcatatcgcgcgccgccatccaccttgcccatcgtgtgtcgcatgcccaaatctcatatttttatgccccacgcagcctaggccatcccaccgcagagcaggaaaaccctagcgtacccacggaccattgctggcccacatggcatcccggcctgtggccacatccatctcggcgcctcgcccgccacacccaacacgctgcaccgccgccgccgcttctcctcccccaccgcaccatcgccctgagtaccatcgcacacgccgccggggccgcatctctccccgttagggcccagctgaacactgtcgtcgcctccacctccgcgtttgggccaccgcaagagttcagggctcctctagggttcgagatcaaatccggccagcagagcagcatcctcagcaccacgctcaccatccccctctacctcggcaccggcgtcttcaccctcgggtacacaccacgccttttctcaccatctgagcattgccaaggagctcctctccatccccgatggcaccctcgccccaccaccgacgacgaatgggcgcttcagattcctgatcagcaggagagtcgttgaggctgagacgacgacacgaatgcggcaaggagcttcagattcactgccattagaaacttgcagtgacaggtaagaaatactgtggtggtttggacctcagttattggccagatgaagggcggaggccattatcagatcctcgtccacctttgggctactgctgataagaggacgagtgtcgtacacctctccaattccccccttcaatgtggtcagtgttgaatcatctacgtcatacagtgaacaagggcatactgatgagagaagggatgacatggatttttctcattcgagcatcaggttttgtgcgctgattatggtgtggtcgttggtgagactgcaacgtcctctgtaatcatctctctgacaagttagattatgtgctgaaatttctgttatttttgttggattgtattgttgtgaaagggggcatagtacgatgaattggggactgaaagagcatagcagagcagagggcctatgtaatataattttttatgtataaattgtgcaaaaacaaattacctcttttgggtttcaatcatttgacaacccttggaccctgacattatattagtttacttaccttgaccttgtgatgagttttggaatatttggaggaggttcacatggactgaacagcctgtttagtagctttgcttcagcacagtaaactatatttagaacatttggatggtaaactatttcaatcattgttgttacatggtatcagaggatttggcagtcaagtcaatgccacaattgtgagatattgaaatcgatgataatatatgtcagctccggcgaacgagaaggcgtaccgcagggccatgaagcgcgcctgcctagccgctgtggccgttctccgcgaggtccggtcactgagcgtttaccattttatggcccgctatctccctccttgtcatggcttggtatggcgtggcgcctggattttagccgctgatcggaattgtcgagtgcgtagggtacaattgggatcgggagattggggcacactgtccatttgcgttagtgagacgtggtgcattataaactgagtcgaccatggcctacttgttttcagtcctataaatttggggtttctgggtgactaattttattaccgtagcttcaggaggttgttg

SEQ ID NO: 21605 - DNA, 1013 bp, Zea Mays
gccgccggggccgcatctctccccgttagggcccagctgaacactgtcgtcgcctccacctccgcgtttgggccaccgcaagagttcagggctcctctagggttcgagatcaaatccggccagcagagcagcatcctcagcaccacgctcaccatccccctctacctcggcaccggcgtcttcaccctcgggtacacaccacgccttttctcaccatctgagcattgccaaggagctcctctccatccccgatggcaccctcgccccaccaccgacgacgaatgggcgcttcagattcctgatcagcaggagagtcgttgaggctgagacgacgacacgaatgcggcaaggagcttcagattcactgccattagaaacttgcaggtaagaaatactgtggtggtttggacctcagttattggccagatgaagggcggaggccattatcagatcctcgtccacctttgggctactgctgataagaggacgagtgtcgtacacctctccaattccccccttcaatgtggtcagtgttgaatcatctacgtcatacagtgaacaagggcatactgatgagagaagggatgacatggatttttctcattcgagcatcaggttttgtgcgctgattatggtgtggtcgttggtgagactgcaacgtcctctctccggcgaacgagaaggcgtaccgcagggccatgaagcgcgcctgcctagccgctgtggccgttctccgcgaggtccggtcactgagcgtttaccattttatggcccgctatctccctccttgtcatggcttggtatggcgtggcgcctggattttagccgctgatcggaattgtcgagtgcgtagggtacaattgggatcgggagattggggcacactgtccatttgcgttagtgagacgtggtgcattataaactgagtcgaccatggcctacttgttttcagtcctataaatttggggtttctgggtgactaattttattaccgtagcttcaggaggttgttg

SEQ ID NO: 21606 - DNA, 1422 bp, Zea Mays
gccgccggggccgcatctctccccgttagggcccagctgaacactgtcgtcgcctccacctccgcgtttgggccaccgcaagagttcagggctcctctagggttcgagatcaaatccggccagcagagcagcatcctcagcaccacgctcaccatccccctctacctcggcaccggcgtcttcaccctcgggtacacaccacgccttttctcaccatctgagcattgccaaggagctcctctccatccccgatggcaccctcgccccaccaccgacgacgaatgggcgcttcagattcctgatcagcaggagagtcgttgaggctgagacgacgacacgaatgcggcaaggagcttcagattcactgccattagaaacttgcaggtaagaaatactgtggtggtttggacctcagttattggccagatgaagggcggaggccattatcagatcctcgtccacctttgggctactgctgataagaggacgagtgtcgtacacctctccaattccccccttcaatgtggtcagtgttgaatcatctacgtcatacagtgaacaagggcatactgatgaggttttgtgcgctgattatggtgtggtcgttggtgagactgcaacgtcctctgtaatcatctctctgacaagttagattatgtgctgaaatttctgttatttttgttggattgtattgttgtgaaagggggcatagtacgatgaattggggactgaaagagcatagcagagcagagggcctatgtaatataattttttatgtataaattgtgcaaaaacaaattacctcttttgggtttcaatcatttgacaacccttggaccctgacattatattagtttacttaccttgaccttgtgatgagttttggaatatttggaggaggttcacatggactgaacagcctgtttagtagctttgcttcagcacagtaaactatatttagaacatttggatggtaaactatttcaatcattgttgttacatggtatcagaggatttggcagtcaagtcaatgccacaattgtgagatattgaaatcgatgataatatatgtcagctccggcgaacgagaaggcgtaccgcagggccatgaagcgcgcctgcctagccgctgtggccgttctccgcgaggtccggtcactgagcgtttaccattttatggcccgctatctccctccttgtcatggcttggtatggcgtggcgcctggattttagccgctgatcggaattgtcgagtgcgtagggtacaattgggatcgggagattggggcacactgtccatttgcgttagtgagacgtggtgcattataaactgagtcgaccatggcctacttgttttcagtcctataaatttggggtttctgggtgactaattttattaccgtagcttcaggaggttgttg

SEQ ID NO: 21607 - DNA, 1058 bp, Zea Mays
gccgccggggccgcatctctccccgttagggcccagctgaacactgtcgtcgcctccacctccgcgtttgggccaccgcaagagttcagggctcctctagggttcgagatcaaatccggccagcagagcagcatcctcagcaccacgctcaccatccccctctacctcggcaccggcgtcttcaccctcgggtacacaccacgccttttctcaccatctgagcattgccaaggagctcctctccatccccgatggcaccctcgccccaccaccgacgacgaatgggcgcttcagattcctgatcagcaggagagtcgttgaggctgagacgacgacacgaatgcggcaaggagcttcagattcactgccattagaaacttgcaggtaagaaatactgtggtggtttggacctcagttattggccagatgaagggcggaggccattatcagatcctcgtccacctttgggctactgctgataagaggacgagtgtcgtacacctctccaattccccccttcaatgtggtcagtgttgaatcatctacgtcatacagtgaacaagggcatactgatgagagaagggatgacatggatttttctcattcgagcatcaggttttgtgcgctgattatggtgtggtcgttgaggatttggcagtcaagtcaatgccacaattgtgagatattgaaatcgatgataatatatgtcagctccggcgaacgagaaggcgtaccgcagggccatgaagcgcgcctgcctagccgctgtggccgttctccgcgaggtccggtcactgagcgtttaccattttatggcccgctatctccctccttgtcatggcttggtatggcgtggcgcctggattttagccgctgatcggaattgtcgagtgcgtagggtacaattgggatcgggagattggggcacactgtccatttgcgttagtgagacgtggtgcattataaactgagtcgaccatggcctacttgttttcagtcctataaatttggggtttctgggtgactaattttattaccgtagcttcaggaggttgttg

SEQ ID NO: 21608 - DNA, 2083 bp, Zea Mays
ccccgttagggcccagctgaacactgtcgtcgcctccacctccgcgtttgggccaccgcaagagttcagggctcctctagggttcgagatcaaatccggccagcagagcagcatcctcagcaccacgctcaccatccccctctacctcggcaccggcgtcttcaccctcgggtacacaccacgccttttctcaccatctgagcattgccaaggagctcctctccatccccgatggcaccctcgccccaccaccgacgacgaatgggcgcttcagattcctgatcagcaggagagtcgttgaggctgagacgacgacacgaatgcggcaaggagcttcagattcactgccattagaaacttgcaggtgaggaaggagagggtccaagttcctgacctctgcatcgattgagagggtccaagttcctgacccctgcattgactaattatctttgagtttcatcattatgttgaaattagtatgcgttcaaaatactcaattgattctcacggctaccgtgcctcctagcgaaacttgcttttcgttggagtatctggcgtagtaatggaaaaaattaccttctccctttgagggttccagtccatttcgttctctataattgtcacctacccttcccgagcctacttttgttgctactataagaataagaatgaaaaaagcttcatctctatttgtttctgatatgaattgtgtagcttagagttgtctcttaacttacaatcttacattggtgtaaaacagtgaccacactaaaagcacaaatgcaaggttttacagaccagttgtgatgctgctaccactaacatgtacaaataggaaaggcaagaaaatggcttagagcaagtatttttaaagaaaaagtgatccatttaagaaacctttttattaagttacttctgataccagctcctcaatccgcgagtgtcttcagcttcactttctctatctgttgtacgcgggtgtctcttcgtcttgtgtgtgagttggatgagaactagacaactggtaggaaccactctctgtttcagtttctgtttgtgtttcacttcagttcaggttgtctgcgctcttctcttagggatcgagaatcatagggaggttcctcgcttctataagaaatatgtgcctttttgtttcattttccttgtggagttgtagttcagttcagttcatcttcgtgcatggggagtgcttggttcgattgttcacagccataggtgctacagattcgtctatggcgaagacagaagtttttgttttcatgatgttttcatggaagatggcgagaagctctccacccttatcatagttaactcttttgattaagtgattaaccaatttggtaacacatatttaatgttttagcttgtttggtttagatatggaggtccgtcagtaattttgtattttttttgtattatctttatctggaaactaagttgtatgtagtgacaggtaagaaatactgtggtggtttggacctcagttattggccagatgaagggcggaggccattatcagatcctcgtccacctttgggctactgctgataagaggacgagtgtcgtacacctctccaattccccccttcaatgtggtcagtgttgaatcatctacgtcatacagtgaacaagggcatactgatgagagaagggatgacatggatttttctcattcgagcatcaggttttgtgcgctgattatggtgtggtcgttgctccggcgaacgagaaggcgtaccgcagggccatgaagcgcgcctgcctagccgctgtggccgttctccgcgaggtccggtcactgagcgtttaccattttatggcccgctatctccctccttgtcatggcttggtatggcgtggcgcctggattttagccgctgatcggaattgtcgagtgcgtagggtacaattgggatcgggagattggggcacactgtccatttgcgttagtgagacgtggtgcattataaactgagtcgaccatggcctacttgttttcagtcctataaatttggggtttctgggtgactaattttattaccgtagcttcaggaggttgttg

SEQ ID NO: 21609 - DNA, 2383 bp, Zea Mays
gggccaccgcaagagttcagggctcctctagggttcgagatcaaatccggccagcagagcagcatcctcagcaccacgctcaccatccccctctacctcggcaccggcgtcttcaccctcgggagagtcgttgaggctgagacgacgacacgaatgcggcaaggagcttcagattcactgccattagaaacttgcaggtgaggaaggagagggtccaagttcctgacctctgcatcgattgagagggtccaagttcctgacccctgcattgactaattatctttgagtttcatcattatgttgaaattagtatgcgttcaaaatactcaattgattctcacggctaccgtgcctcctagcgaaacttgcttttcgttggagtatctggcgtagtaatggaaaaaattaccttctccctttgagggttccagtccatttcgttctctataattgtcacctacccttcccgagcctacttttgttgctactataagaataagaatgaaaaaagcttcatctctatttgtttctgatatgaattgtgtagcttagagttgtctcttaacttacaatcttacattggtgtaaaacagtgaccacactaaaagcacaaatgcaaggttttacagaccagttgtgatgctgctaccactaacatgtacaaataggaaaggcaagaaaatggcttagagcaagtatttttaaagaaaaagtgatccatttaagaaacctttttattaagttacttctgataccagctcctcaatccgcgagtgtcttcagcttcactttctctatctgttgtacgcgggtgtctcttcgtcttgtgtgtgagttggatgagaactagacaactggtaggaaccactctctgtttcagtttctgtttgtgtttcacttcagttcaggttgtctgcgctcttctcttagggatcgagaatcatagggaggttcctcgcttctataagaaatatgtgcctttttgtttcattttccttgtggagttgtagttcagttcagttcatcttcgtgcatggggagtgcttggttcgattgttcacagccataggtgctacagattcgtctatggcgaagacagaagtttttgttttcatgatgttttcatggaagatggcgagaagctctccacccttatcatagttaactcttttgattaagtgattaaccaatttggtaacacatatttaatgttttagcttgtttggtttagatatggaggtccgtcagtaattttgtattttttttgtattatctttatctggaaactaagttgtatgtagtgacaggtaagaaatactgtggtggtttggacctcagttattggccagatgaagggcggaggccattatcagatcctcgtccacctttgggctactgctgataagaggacgagtgtcgtacacctctccaattccccccttcaatgtggtcagtgttgaatcatctacgtcatacagtgaacaagggcatactgatgagagaagggatgacatggatttttctcattcgagcatcaggttttgtgcgctgattatggtgtggtcgttggtgagactgcaacgtcctctgtaatcatctctctgacaagttagattatgtgctgaaatttctgttatttttgttggattgtattgttgtgaaagggggcatagtacgatgaattggggactgaaagagcatagcagagcagagggcctatgtaatataattttttatgtataaattgtgcaaaaacaaattacctcttttgggtttcaatcatttgacaacccttggaccctgacattatattagtttacttaccttgaccttgtgatgagttttggaatatttggaggaggttcacatggactgaacagcctgtttagtagctttgcttcagcacagtaaactatatttagaacatttggatggtaaactatttcaatcattgttgttacatggtatcagaggatttggcagtcaagtcaatgccacaattgtgagatattgaaatcgatgataatatatgtcagctccggcgaacgagaaggcgtaccgcagggccatgaagcgcgcctgcctagccgctgtggccgttctccgcgaggtccggtcactgagcgtttaccattttatggcccgctatctccctccttgtcatggcttggtatggcgtggcgcctggattttagccgctgatcggaattgtcgagtgcgtagggtacaattgggatcgggagattggggcacactgtccatttgcgttagtgagacgtggtgcattataaactgagtcgaccatggcctacttgttttcagtcctataaatttggggtttctgggtgactaattttattaccgtagcttcaggaggttgttg

SEQ ID NO: 21610 - DNA, 1006 bp, Zea Mays
gaaggtccgcgtggttccatggaagtttaactataacagtggacaactagcaccaaagacgattattgatcaaatttatgggaacacactatcaatttcggaaataaaaacagcagacattcctgataatgtcctatcctctgttggagttgtaagcgatgaatgtgtttgacttccaacttatcaaggatttgcttttctcggcctgatttcagaatggtttcttctctgaactgatcgacttcaagggtgttgggttgcaatgctcctataatttcctgttatccagctagctctagcatcaatcatttacccctatgagatttagatgaggttgcagctacagaaatagtggtggtttgcatgctattatgaatagcaagctgaagaagctagcaaagaaggatgaagaagtggttgttgcatctggcatcccatgtacaacaatcagaactggttctctacaaagcgctcccggtggcgagagaggtttcaattttactgagcaaccaagggaagaaaacgcaaagaggatgctgctgccatatgtgtggaagctttgaatagcattccccaaaagacactcatttttgagagggattgcgaatggacattctgggcagcgtgtgaccaaactgattcgacggtgttgggatgaagatcatgatgtgtgtctgactttttttggagattattatggaactccaagatgttctacgccatatccaggttgtaaatatcgcaaactttggtgtggcgcgacattgaagtcagcgggggtagatgacagctgaaactggaacctaccaatggatggcaccatcattttgttatataaaaaatttcacacttttcaggaagaaagacatttttttgcaaagataggagtttctgaggttcatttggaaatgttgaaccgtactaatgtactaatgttctcaatgatgtaccctatatttttcataaaggactaattttgcatatcataataatatttgtcgttttg

SEQ ID NO: 21611 - DNA, 1841 bp, Zea Mays
ccgcgccccttccaacctcgacgcctcctcccatccacggcgcccatcgtgcgtccgtgcccccacctctggcctcctcgcaatccgtcagtcgcatctcgcaaacgtgcaccacgacctcacccctgcctccccaaaacgctccaccttcgctgccgaactccacctcgcatgcctctcctccacctccgcctcgcccccaccaccgcctcaccctcgcccgaaggctcgaccctagccccaatcaaacgggagcatcgccgacctccacctcaagcgcctcgcctacactcggcctcgctcccgcccgacatctcgactctagccattcaatggagctgctactcacctcaacctcgcgtgcgtcgcctccgcctcgcccccacccaatgccttgaccctggccccgatgtgacaaagagaaaggggtggaggcgagcccctaggtaggtgcaaagggataggatgggagatggttgcaatggttgagcacacatgtcgctaggttctctcctcacggcaccatcgtggcatcggccatgccagcgccctctaccggctcgccactcagtttaactataacagtggacaactagcaccaaagacgattattgatcaaatttatgggaacacactatcaatttcggaaataaaaacagcagacattcctgataatgtcctatcctctgttggagttgtaagcgatgaatgtgtttgacttccaacttatcaaggatttgcttttctcggcctgatttcagaatggtttcttctctgaactgatcgacttcaagggtgttgggttgcaatgctcctataatttcctgttatccagctagctctagcatcaatcatttacccctatgagatttagatgaggttgcagctacagaaatagtggtggtttgcatgctattatgaatagcaagctgaagaagctagcaaagaaggatgaagaagtggttgttgcatctggcatcccatgtacaacaatcagaactggttctctacaaagcgctcccggtggcgagagaggtttcaattttactgaggtctcagcgcgaaaacccagcttacccccactgcatattaattatcgtacaatttatcttcccagcattcagtaattgatctaataaatatcatgcaattaggacacttatttagacactattgtattcataaatgtctgatataatttgcagtcatcaaattaaatattatacatgtgtttctggactggaaactgaaaggaatatttatcatgttggagtacctatactattcattattgtgatgtatcgctatatggtactgtgcatgaaatgtgtgggggcatagcaaccaagggaagaaaacgcaaagaggatgctgctgccatatgtgtggaagctttgaatagcattccccaaaagacactcatttttgagagggattgcgaatggacattctgggcagcgtgtgaccaaactgattcgacggtgttgggatgaagatcatgatgtgtgtctgactttttttggagattattatggaactccaagatgttctacgccatatccaggttgtaaatatcgcaaactttggtgtggcgcgacattgaagtcagcgggggtagatgacagctgaaactggaacctaccaatggatggcaccatcattttgttatataaaaaatttcacacttttcaggaagaaagacatttttttgcaaagataggagtttctgaggttcatttggaaatgttgaaccgtactaatgtactaatgttctcaatgatgtaccctatatttttcataaaggactaattttgcatatcataataatatttgtcgttttg

SEQ ID NO: 21612 - DNA, 1552 bp, Zea Mays
ccgcgccccttccaacctcgacgcctcctcccatccacggcgcccatcgtgcgtccgtgcccccacctctggcctcctcgcaatccgtcagtcgcatctcgcaaacgtgcaccacgacctcacccctgcctccccaaaacgctccaccttcgctgccgaactccacctcgcatgcctctcctccacctccgcctcgcccccaccaccgcctcaccctcgcccgaaggctcgaccctagccccaatcaaacgggagcatcgccgacctccacctcaagcgcctcgcctacactcggcctcgctcccgcccgacatctcgactctagccattcaatggagctgctactcacctcaacctcgcgtgcgtcgcctccgcctcgcccccacccaatgccttgaccctggccccgatgtgacaaagagaaaggggtggaggcgagcccctaggtaggtgcaaagggataggatgggagatggttgcaatggttgagcacacatgtcgctaggttctctcctcacggcaccatcgtggcatcggccatgccagcgccctctaccggctcgccactcagtttaactataacagtggacaactagcaccaaagacgattattgatcaaatttatgggaacacactatcaatttcggaaataaaaacagcagacattcctgataatgtcctatcctctgttggagttgtaagcgatgaatgtgtttgacttccaacttatcaaggatttgcttttctcggcctgatttcagaatggtttcttctctgaactgatcgacttcaagggtgttgggttgcaatgctcctataatttcctgttatccagctagctctagcatcaatcatttacccctatgagatttagatgaggttgcagctacagaaatagtggtggtttgcatgctattatgaatagcaagctgaagaagctagcaaagaaggatgaagaagtggttgttgcatctggcatcccatgtacaacaatcagaactggttctctacaaagcgctcccggtggcgagagaggtttcaattttactgagcaaccaagggaagaaaacgcaaagaggatgctgctgccatatgtgtggaagctttgaatagcattccccaaaagacactcatttttgagagggattgcgaatggacattctgggcagcgtgtgaccaaactgattcgacggtgttgggatgaagatcatgatgtgtgtctgactttttttggagattattatggaactccaagatgttctacgccatatccaggttgtaaatatcgcaaactttggtgtggcgcgacattgaagtcagcgggggtagatgacagctgaaactggaacctaccaatggatggcaccatcattttgttatataaaaaatttcacacttttcaggaagaaagacatttttttgcaaagataggagtttctgaggttcatttggaaatgttgaaccgtactaatgtactaatgttctcaatgatgtaccctatatttttcataaaggactaattttgcatatcataataatatttgtcgttttg

SEQ ID NO: 21613 - DNA, 1632 bp, Zea Mays
cgcgccccttccaacctcgacgcctcctcccatccacggcgcccatcgtgcgtccgtgcccccacctctggcctcctcgcaatccgtcagtcgcatctcgcaaacgtgcaccacgacctcacccctgcctccccaaaacgctccaccttcgctgccgaactccacctcgcatgcctctcctccacctccgcctcgcccccaccaccgcctcaccctcgcccgaaggctcgaccctagccccaatcaaacgggagcatcgccgacctccacctcaagcgcctcgcctacactcggcctcgctcccgcccgacatctcgactctagccattcaatggagctgctactcacctcaacctcgcgtgcgtcgcctccgcctcgcccccacccaatgccttgaccctggccccgatgtgacaaagagaaaggggtggaggcgagcccctaggtaggtgcaaagggataggatgggagatggttgcaatggttgagcacacatgtcgctaggttctctcctcacggcaccatcgtggcatcggccatgccagcgccctctaccggctcgccactcagtttaactataacagtggacaactagcaccaaagacgattattgatcaaatttatgggaacacactatcaatttcggaaataaaaacagcagacattcctgataatgtcctatcctctgttggagttgtaagcgatgaatgtgtttgacttccaacttatcaaggatttgcttttctcggcctgatttcagtgcatggttggtgatattggagataagttcttcacaaagagagcactaaggggcgttcatgctgtaatttgtctaactgataatggtttcttctctgaactgatcgacttcaagggtgttgggttgcaatgctcctataatttcctgttatccagctagctctagcatcaatcatttacccctatgagatttagatgaggttgcagctacagaaatagtggtggtttgcatgctattatgaatagcaagctgaagaagctagcaaagaaggatgaagaagtggttgttgcatctggcatcccatgtacaacaatcagaactggttctctacaaagcgctcccggtggcgagagaggtttcaattttactgagcaaccaagggaagaaaacgcaaagaggatgctgctgccatatgtgtggaagctttgaatagcattccccaaaagacactcatttttgagagggattgcgaatggacattctgggcagcgtgtgaccaaactgattcgacggtgttgggatgaagatcatgatgtgtgtctgactttttttggagattattatggaactccaagatgttctacgccatatccaggttgtaaatatcgcaaactttggtgtggcgcgacattgaagtcagcgggggtagatgacagctgaaactggaacctaccaatggatggcaccatcattttgttatataaaaaatttcacacttttcaggaagaaagacatttttttgcaaagataggagtttctgaggttcatttggaaatgttgaaccgtactaatgtactaatgttctcaatgatgtaccctatatttttcataaaggactaattttgcatatcataataatatttgtcgttttg

SEQ ID NO: 21614 - DNA, 1833 bp, Zea Mays
tccaaagacagaaaaaaaagaaagggaaaaaagggggtctgctgtggactgtgtggtcccgcagggcgcaccattcacccgtcttccgccgagacaccctgcacggctcgccgagacttcagtttactggagcacgcaccgcagcgtctcccccttctgctcatcctccgtccctccgtcggaagggctggcgctaagggacgatccctccgtccgcccgtccgttcgacgggacctcggttggtttcgtcggtcgctgggaggacaggtgacggaacggtgatatgaggcggtggttatgttgtaactgccactatgacgtcgaggaagatgaccacgccaaggaacaggccaaagctcagagcaataagaccgactccaagcagaagtcttcaaagcctcctggtagtcaacctgagccagagttctcccctcctacaattgatgtccctgaattgtctttggatgatttgaaactaaagactgatgattttggatcaagtgctctgattggtgaaggttcttatggacgagtatatcatgccactttggacgatgggagacaagcagcagttaaaaaacttgatgcatctgaaaatgagcctaatgatgagtttctcaaacaggtctcactggcatcaaagctaaaacatgaaaatcttgttgagatgttgggttactgtgtcgatgggaattaccgtatactcgcatatgaatttgcaaccatgggttcgcttcatgatgttttacatggaagaaaaggcgttcaaggtgcgcagcctggacctgtacttgactggatgcagagggtcaaaattgctattgaggctgcaaaaggtatagaatatctgcatgaaaaggttcagccttcaatcatccatcgggacatcagatcaagcaatgtactgctgtttgaggatttcaaggcaaaaattgcagactttaatcttttgaaccaagcaccagatatggcagctcgtctccattcaactcgtgtattggggacttttggatatcatgctcctgactttggtgtggttcttttggaacttttgactggaaggaaaccagtagatcacacaatgcctcgaggtcaacaaagtttagtcacatgggctactccaaggttaagtgaagacaaggtgaagcaatgtgtagatcccaggttgaagggagaatatcctccaaagggagtcgctaagcttgctgcagtggcagctctatgtgcacagtacgaagcagagttcaggcccaacatgagcatcgttgttaaggcgctttcgcctctccttcaacaaagacctgcaccaaccaccgaagagccagctccacaacctgggagctgaaaccagtcacatgtgatgggacccctaggcataagccatctccgcaaccattcaatcagcacattctataaatcattgagagtattttgggtatttgttctgtagcgttctcagttgggtatagcatacatgaacttgcccctgctgtttgtggccacctagttcgtggcttgatgttggcgccgcacaatggtatatgaagttggttcgaagtttttttttaccttctctataccaataccaagtgaccaactgtttgtaggttttcataattcgcggcttgaagaatagatgcaggatggtctggatttttttttgtccgtggcgtggtgttgctgcctgacctacgtgatgtacttcctctcttccaaatcccaattcaccttttcttgttctaagctagaattatcaaactttgacttgtttatataaatatatttatggacgtctacaacagtatcaaatgcaagagtttggagcaatatat

SEQ ID NO: 21615 - DNA, 1768 bp, Zea Mays
tccaaagacagaaaaaaaagaaagggaaaaaagggggtctgctgtggactgtgtggtcccgcagggcgcaccattcacccgtcttccgccgagacaccctgcacggctcgccgagacttcagtttactggagcacgcaccgcagcgtctcccccttctgctcatcctccgtccctccgtcggaagggctggcgctaagggacgatccctccgtccgcccgtccgttcgacgggacctcggttggtttcgtcggtcgctgggaggacaggtgacggaacggtgatatgaggcggtggttatgttgtaactgccactatgacgtcgaggaagatgaccacgccaaggaacaggccaaagctcagagcaataagaccgactaagtcttcaaagcctcctggtagtcaacctgagccagagttctcccctcctacaattgatgtccctgaattgtctttggatgatttgaaactaaagactgatgattttggatcaagtgctctgattggtgaaggttcttatggacgagtatatcatgccactttggacgatgggagacaagcagcagttaaaaaacttgatgcatctgaaaatgagcctaatgatgagtttctcaaacaggtctcactggcatcaaagctaaaacatgaaaatcttgttgagatgttgggttactgtgtcgatgggaattaccgtatactcgcatatgaatttgcaaccatgggttcgcttcatgatgttttacatggaagaaaaggcgttcaaggtgcgcagcctggacctgtacttgactggatgcagagggtcaaaattgctattgaggctgcaaaagactttaatcttttgaaccaagcaccagatatggcagctcgtctccattcaactcgtgtattggggacttttggatatcatgctcctgagtatgctatgactggccagctgacacaaaaaagtgatgtctacagctttggtgtggttcttttggaacttttgactggaaggaaaccagtagatcacacaatgcctcgaggtcaacaaagtttagtcacatgggctactccaaggttaagtgaagacaaggtgaagcaatgtgtagatcccaggttgaagggagaatatcctccaaagggagtcgctaagcttgctgcagtggcagctctatgtgcacagtacgaagcagagttcaggcccaacatgagcatcgttgttaaggcgctttcgcctctccttcaacaaagacctgcaccaaccaccgaagagccagctccacaacctgggagctgaaaccagtcacatgtgatgggacccctaggcataagccatctccgcaaccattcaatcagcacattctataaatcattgagagtattttgggtatttgttctgtagcgttctcagttgggtatagcatacatgaacttgcccctgctgtttgtggccacctagttcgtggcttgatgttggcgccgcacaatggtatatgaagttggttcgaagtttttttttaccttctctataccaataccaagtgaccaactgtttgtaggttttcataattcgcggcttgaagaatagatgcaggatggtctggatttttttttgtccgtggcgtggtgttgctgcctgacctacgtgatgtacttcctctcttccaaatcccaattcaccttttcttgttctaagctagaattatcaaactttgacttgtttatataaatatatttatggacgtctacaacagtatcaaatgcaagagtttggagcaatatat

SEQ ID NO: 21616 - DNA, 1860 bp, Zea Mays
tccaaagacagaaaaaaaagaaagggaaaaaagggggtctgctgtggactgtgtggtcccgcagggcgcaccattcacccgtcttccgccgagacaccctgcacggctcgccgagacttcagtttactggagcacgcaccgcagcgtctcccccttctgctcatcctccgtccctccgtcggaagggctggcgctaagggacgatccctccgtccgcccgtccgttcgacgggacctcggttggtttcgtcggtcgctgaatgtactgctctccacgcgcttctggaaaaggctggctgaaagcgacccgcattgctgcaatcactcgttcattcacctgataggaggacaggtgacggaacggtgatatgaggcggtggttatgttgtaactgccactatgacgtcgaggaagatgaccacgccaaggaacaggccaaagctcagagcaataagaccgactccaagcagaagtcttcaaagcctcctggtagtcaacctgagccagagttctcccctcctacaattgatgtccctgaattgtctttggatgatttgaaactaaagactgatgattttggatcaagtgctctgattggtgaaggttcttatggacgagtatatcatgccactttggacgatgggagacaagcagcagttaaaaaacttgatgcatctgaaaatgagcctaatgatgagtttctcaaacaggtctcactggcatcaaagctaaaacatgaaaatcttgttgagatgttgggttactgtgtcgatgggaattaccgtatactcgcatatgaatttgcaaccatgggttcgcttcatgatgttttacatggaagaaaaggcgttcaaggtgcgcagcctggacctgtacttgactggatgcagagggtcaaaattgctattgaggctgcaaaagactttaatcttttgaaccaagcaccagatatggcagctcgtctccattcaactcgtgtattggggacttttggatatcatgctcctgagtatgctatgactggccagctgacacaaaaaagtgatgtctacagctttggtgtggttcttttggaacttttgactggaaggaaaccagtagatcacacaatgcctcgaggtcaacaaagtttagtcacatgggctactccaaggttaagtgaagacaaggtgaagcaatgtgtagatcccaggttgaagggagaatatcctccaaagggagtcgctaagcttgctgcagtggcagctctatgtgcacagtacgaagcagagttcaggcccaacatgagcatcgttgttaaggcgctttcgcctctccttcaacaaagacctgcaccaaccaccgaagagccagctccacaacctgggagctgaaaccagtcacatgtgatgggacccctaggcataagccatctccgcaaccattcaatcagcacattctataaatcattgagagtattttgggtatttgttctgtagcgttctcagttgggtatagcatacatgaacttgcccctgctgtttgtggccacctagttcgtggcttgatgttggcgccgcacaatggtatatgaagttggttcgaagtttttttttaccttctctataccaataccaagtgaccaactgtttgtaggttttcataattcgcggcttgaagaatagatgcaggatggtctggatttttttttgtccgtggcgtggtgttgctgcctgacctacgtgatgtacttcctctcttccaaatcccaattcaccttttcttgttctaagctagaattatcaaactttgacttgtttatataaatatatttatggacgtctacaacagtatcaaatgcaagagtttggagcaatatat

SEQ ID NO: 21617 - DNA, 1785 bp, Zea Mays
tccaaagacagaaaaaaaagaaagggaaaaaagggggtctgctgtggactgtgtggtcccgcagggcgcaccattcacccgtcttccgccgagacaccctgcacggctcgccgagacttcagtttactggagcacgcaccgcagcgtctcccccttctgctcatcctccgtccctccgtcggaagggctggcgctaagggacgatccctccgtccgcccgtccgttcgacgggacctcggttggtttcgtcggtcgctgggaggacaggtgacggaacggtgatatgaggcggtggttatgttgtaactgccactatgacgtcgaggaagatgaccacgccaaggaacaggccaaagctcagagcaataagaccgactccaagcagaagtcttcaaagcctcctggtagtcaacctgagccagagttctcccctcctacaattgatgtccctgaattgtctttggatgatttgaaactaaagactgatgattttggatcaagtgctctgattggtgaaggttcttatggacgagtatatcatgccactttggacgatgggagacaagcagcagttaaaaaacttgatgcatctgaaaatgagcctaatgatgagtttctcaaacaggtctcactggcatcaaagctaaaacatgaaaatcttgttgagatgttgggttactgtgtcgatgggaattaccgtatactcgcatatgaatttgcaaccatgggttcgcttcatgatgttttacatggaagaaaaggcgttcaaggtgcgcagcctggacctgtacttgactggatgcagagggtcaaaattgctattgaggctgcaaaaggtatagaatatctgcatgaaaaggttcagccttcaatcatccatcgggacatcagatcaagcaatgtactgctgtttgaggatttcaaggcaaaaattgcagactttaatcttttgaaccaagcaccagatatggcagctcgtctccattcaactcgtgtattggggacttttggatatcatgctcctgagtatgctatgactggccagctgacacaaaaaagtgatgtctacagctttggtgtggttcttttggaacttttgactggaaggaaaccagtagatcacacaatgcctcgaggtcaacaaagtttagtcacatgggctactccaaggttaagtgaagacaaggtgaagcaatgtgtagatcccaggttgaagggagaatatcctccaaagggagtcgctaagcttgctgcagtggcagctctatgtgcacagtacgaagcagagttcaggcccaacatgagcatcgttgttaaggcgctttcgcctctccttcaacaaagacctgcaccaaccaccgaagagccagctccacaacctgggagctgaaaccagtcacatcgttctcagttgggtatagcatacatgaacttgcccctgctgtttgtggccacctagttcgtggcttgatgttggcgccgcacaatggtatatgaagttggttcgaagtttttttttaccttctctataccaataccaagtgaccaactgtttgtaggttttcataattcgcggcttgaagaatagatgcaggatggtctggatttttttttgtccgtggcgtggtgttgctgcctgacctacgtgatgtacttcctctcttccaaatcccaattcaccttttcttgttctaagctagaattatcaaactttgacttgtttatataaatatatttatggacgtctacaacagtatcaaatgcaagagtttggagcaatatat

SEQ ID NO: 21618 - DNA, 1688 bp, Zea Mays
tccaaagacagaaaaaaaagaaagggaaaaaagggggtctgctgtggactgtgtggtcccgcagggcgcaccattcacccgtcttccgccgagacaccctgcacggctcgccgagacttcagtttactggagcacgcaccgcagcgtctcccccttctgctcatcctccgtccctccgtcggaagggctggcgctaagggacgatccctccgtccgcccgtccgttcgacgggacctcggttggtttcgtcggtcgctgggaggacaggtgacggaacggtgatatgaggcggtggttatgttgtaactgccactatgacgtcgaggaagatgaccacgccaaggaacaggccaaagctcagagcaataagaccgactccaagcagaagtcttcaaagcctcctggtagtcaacctgagccagagttctcccctcctacaattgatgtccctgaattgtctttggatgatttgaaactaaagactgatgattttggatcaagtgctctgattggtgaaggttcttatggacgagtatatcatgccactttggacgatgggagacaagcagcagttaaaaaacttgatgcatctgaaaatgagcctaatgatgagtttctcaaacaggtctcactggcatcaaagctaaaacatgaaaatcttgttgagatgttgggttactgtgtcgatgggaattaccgtatactcgcatatgaatttgcaaccatgggttcgcttcatgatgttttacatggaagaaaaggcgttcaaggtgcgcagcctggacctgtacttgactggatgcagagggtcaaaattgctattgaggctgcaaaaggtatgctatgactggccagctgacacaaaaaagtgatgtctacagctttggtgtggttcttttggaacttttgactggaaggaaaccagtagatcacacaatgcctcgaggtcaacaaagtttagtcacatgggctactccaaggttaagtgaagacaaggtgaagcaatgtgtagatcccaggttgaagggagaatatcctccaaagggagtcgctaagcttgctgcagtggcagctctatgtgcacagtacgaagcagagttcaggcccaacatgagcatcgttgttaaggcgctttcgcctctccttcaacaaagacctgcaccaaccaccgaagagccagctccacaacctgggagctgaaaccagtcacatgtgatgggacccctaggcataagccatctccgcaaccattcaatcagcacattctataaatcattgagagtattttgggtatttgttctgtagcgttctcagttgggtatagcatacatgaacttgcccctgctgtttgtggccacctagttcgtggcttgatgttggcgccgcacaatggtatatgaagttggttcgaagtttttttttaccttctctataccaataccaagtgaccaactgtttgtaggttttcataattcgcggcttgaagaatagatgcaggatggtctggatttttttttgtccgtggcgtggtgttgctgcctgacctacgtgatgtacttcctctcttccaaatcccaattcaccttttcttgttctaagctagaattatcaaactttgacttgtttatataaatatatttatggacgtctacaacagtatcaaatgcaagagtttggagcaatatat

SEQ ID NO: 21619 - DNA, 1555 bp, Zea Mays
ctgaaagcgacccgcattgctgcaatcactcgttcattcacctgataggaggacaggtgacggaacggtgatatgaggcggtggttatgttgtaactgccactatgacgtcgaggaagatgaccacgccaaggaacaggccaaagctcagagcaataagaccgactccaagcagaagtcttcaaagcctcctggtagtcaacctgagccagagttctcccctcctacaattgatgtccctgaattgtctttggatgatttgaaactaaagactgatgattttggatcaagtgctctgattggtgaaggttcttatggacgagtatatcatgccactttggacgatgggagacaagcagcagttaaaaaacttgatgcatctgaaaatgagcctaatgatgagtttctcaaacaggtctcactggcatcaaagctaaaacatgaaaatcttgttgagatgttgggttactgtgtcgatgggaattaccgtatactcgcatatgaatttgcaaccatgggttcgcttcatgatgttttacatggcgttcaaggtgcgcagcctggacctgtacttgactggatgcagagggtcaaaattgctattgaggctgcaaaagactttaatcttttgaaccaagcaccagatatggcagctcgtctccattcaactcgtgtattggggacttttggatatcatgctcctgagtatgctatgactggccagctgacacaaaaaagtgatgtctacagctttggtgtggttcttttggaacttttgactggaaggaaaccagtagatcacacaatgcctcgaggtcaacaaagtttagtcacatgggctactccaaggttaagtgaagacaaggtgaagcaatgtgtagatcccaggttgaagggagaatatcctccaaagggagtcgctaagcttgctgcagtggcagctctatgtgcacagtacgaagcagagttcaggcccaacatgagcatcgttgttaaggcgctttcgcctctccttcaacaaagacctgcaccaaccaccgaagagccagctccacaacctgggagctgaaaccagtcacatgtgatgggacccctaggcataagccatctccgcaaccattcaatcagcacattctataaatcattgagagtattttgggtatttgttctgtagcgttctcagttgggtatagcatacatgaacttgcccctgctgtttgtggccacctagttcgtggcttgatgttggcgccgcacaatggtatatgaagttggttcgaagtttttttttaccttctctataccaataccaagtgaccaactgtttgtaggttttcataattcgcggcttgaagaatagatgcaggatggtctggatttttttttgtccgtggcgtggtgttgctgcctgacctacgtgatgtacttcctctcttccaaatcccaattcaccttttcttgttctaagctagaattatcaaactttgacttgtttatataaatatatttatggacgtctacaacagtatcaaatgcaagagtttggagcaatatat

SEQ ID NO: 21620 - DNA, 1541 bp, Zea Mays
taaccgcaaaccctctcgaacgagggaggacaggtgacggaacggtgatatgaggcggtggttatgttgtaactgccactatgacgtcgaggaagatgaccacgccaaggaacaggccaaagctcagagcaataagaccgactccaagcagaagtcttcaaagcctcctggtagtcaacctgagccagagttctcccctcctacaattgatgtccctgaattgtctttggatgatttgaaactaaagactgatgattttggatcaagtgctctgattggtgaaggttcttatggacgagtatatcatgccactttggacgatgggagacaagcagcagttaaaaaacttgatgcatctgaaaatgagcctaatgatgagtttctcaaacaggtctcactggcatcaaagctaaaacatgaaaatcttgttgagatgttgggttactgtgtcgatgggaattaccgtatactcgcatatgaatttgcaaccatgggttcgcttcatgatgttttacatggaagaaaaggcgttcaaggtgcgcagcctggacctgtacttgactggatgcagagggtcaaaattgctattgaggctgcaaaagactttaatcttttgaaccaagcaccagatatggcagctcgtctccattcaactcgtgtattggggacttttggatatcatgctcctgagtatgctatgactggccagctgacacaaaaaagtgatgtctacagctttggtgtggttcttttggaacttttgactggaaggaaaccagtagatcacacaatgcctcgaggtcaacaaagtttagtcacatgggctactccaaggttaagtgaagacaaggtgaagcaatgtgtagatcccaggttgaagggagaatatcctccaaagggagtcgctaagcttgctgcagtggcagctctatgtgcacagtacgaagcagagttcaggcccaacatgagcatcgttgttaaggcgctttcgcctctccttcaacaaagacctgcaccaaccaccgaagagccagctccacaacctgggagctgaaaccagtcacatgtgatgggacccctaggcataagccatctccgcaaccattcaatcagcacattctataaatcattgagagtattttgggtatttgttctgtagcgttctcagttgggtatagcatacatgaacttgcccctgctgtttgtggccacctagttcgtggcttgatgttggcgccgcacaatggtatatgaagttggttcgaagtttttttttaccttctctataccaataccaagtgaccaactgtttgtaggttttcataattcgcggcttgaagaatagatgcaggatggtctggatttttttttgtccgtggcgtggtgttgctgcctgacctacgtgatgtacttcctctcttccaaatcccaattcaccttttcttgttctaagctagaattatcaaactttgacttgtttatataaatatatttatggacgtctacaacagtatcaaatgcaagagtttggagcaatatat

SEQ ID NO: 21621 - DNA, 4310 bp, Zea Mays
ccgacactcctctccttctccctgaatttctctttaaaaccccccgctcgctgatcccctccccctcccactcccacccccaccgacgctgccgccgctggcacgcattcctgcttcctctcctcctcttcttcatcggcgcggcgcggcgcagcgctgggggagaatcactcggatggaaatctgctgctagagtgagaggagctaccggacagtatcctgcgcgccttcgtcggcggcggaggggggaaggaagcgatggaggcgagcgccgggctggtggccggctcccacaaccgcaacgagctcgtcgtcatacgtcgcgacggcgatcccgggccgaagccgccgccgcgggagcagaacgggcaggtgtgccagatttgcggcgacgacgtcggccttgcccccggcggggagcccttcgtggcgtgcaacgagtgcgccttccccgtctgccgggactgctacgagtacgagcgccgggagggcacgcagaactgcccccagtgcaggacccggtacaagcgcctcaagggctgccagcgtgtgaccggtgatgaggaggaggacggcgtcgatgacctggacaacgagttcaactggaacggccatgactcgcggtctgtggccgactccatgctctacggccgtggaggtgaccctaatggcgcgccacaacctttccagctcaaccccaatgttccactcctcaccaacgggcagatggtactgttgctgccgaatccaagtcgatgacatcccaccggagcagcacgcgctggtgccttctttcatgggcggtgggggaaagagaatccatcccctcccttatgcggatcccagcttacctgtgcaacccaggtctatggacccatccaaggatcttgctgcatatgggtatggtagtgttgcttggaaggagcgggtggagaattggaagcagaggcaggagaggatgcaccagacaaggaatgatggtggtggtgatgacggtgatgatgctgatttaccactaatggatgaatcaagacaaccgctgtccaggaaaattccgcttccatcaagccagatcaatccatataggatgattatcattattcggcttgtggttttggggttcttcttccactaccgagtgatgcatccggtgaatgatgcatttgctttgtggctcatatctgttatctgtgaaatctggtttgccatgtcttggattcttgatcaattcccaaagtggttccctatagagagagagacttacctagaccggctgtcactgaggttcgataaggaaggccagccgtctcaacttgccccaatcgatttctttgtcagtacagttgaccccttaaaggaacctcctttggtcacagcaaatactgttctatctatcctttcagtggactatccagttgataaggtttcttgctatgtttctgatgatggtgctgcaatgctaacatttgaagcattatctgaaacatctgaatttgcaaagaaatgggctccattctgcaaaaggtacaatattgaacctcgtgctccagagtggtacttccaacagaagatagactacttgaaagacaaggtggcagcaaactttgttagggagaggagagcaatgaagagagagtacgaggaattcaaggtcagaatcaatgccttggttgctaaagcccagaaagttcctgaagaaggatggacaatgcaagatggaaccccctggcctggaaacaatgttcgtgatcatcctggaatgattcaggtcttccttggccaaagtggaggtcttgactgtgagggaaatgagctgccgcggttggtttatgtttcaagagagaaacgaccaggctataaccatcataagaaagctggtgctatgaatgcattggtccgagtctctgctgtactatcaaatgctccttatttgttaaacttggattgtgatcactacatcaacaacagcaaagctataaaggaagcaatgtgttttatgatggacccactactaggaaagaaggtttgctatgtacagttccctcaaagatttgatgggattgatcgccatgaccgatatgctaacaggaatgttgtctttttcgatatcaacatgaaaggtttggatggtattcagggtccgatttatgttggtactggatgtgtgtttagaaggcaggcattatatggttatgatgcccccaaaacaaagaagccaccatcaaggacttgcaactgctggcccaagtggtgtttttgctgttgctgctgtggtaataggaaacacaagaagaagactacgaaacccaaaacagagaagaaaaagttattatttttcaagaaagaagaaaatcaatcccctgcatatgctcttggtgaaattgatgaagctgctccaggagctgagaatgaaaaagctggtattgtaaatcaacaaaaattagaaaagaaatttggtcagtcttctgtctttgcaacatccacacttctcgaaaatggtggaaccttgaagagtgcaagtcctgcttctcttctgaaagaagctatacatgtcattagttgtggttatgaagacaagactgattggggaaaagagattggctggatctatggatcagttacagaggatattctaactggtttcaagatgcattgtcatggttggcggtcaatttactgcatacctaaacggcctgcattcaaaggttctgcacctctgaatctttcagatcgtcttcaccaggtgcttcggtgggctcttgggtctattgagatcttcttcagcaatcattgccctctttggtatgggtatggtggtggtctgaaatttttggaaagattttcctacatcaactccatcgtgtatccttggacatctatccccctcttggcttactgtacattgcctgccatctgtttattgacggggaaatttatcactccagagctgaacaatgttgccagcctgtggttcatgtcactttttatctgcatttttgctacaagcatcctagaaatgagatggagtggtgttgggattgatgattggtggaggaatgagcagttctgggtcattggaggtgtgtcctcgcacctcttcgctgtgtttcagggacttctcaaggtcatagctggtgttgatacaagcttcactgtgacatcaaagggtggagatgatgacgaattctcagagctgtacacatttaaatggactaccttattgatacctcctaccactttgctcctattgaacttcattggtgtggtcgctggtgtttccaatgcaatcaataatggatacgagtcatggggccccctcttcgggaagctcttctttgcattttgggtgattgtccatctgtatcccttcctcaaaggtttggttgggaggcaaaacaggacaccgacaattgtcatcgtctggtccatcctgctggcttcaatcttctcactcctttgggttcggattgaccctttccttgcaaaggatgatggtccacttcttgaggagtgtggtttggattgcaactaggggatgtcagcacatcagctcccccaatcagcgtatgattgaagtatttttgccggcgtttgtccccatatttacagtgccccctctgtaggtaagagacaagaaatgtctcccgttccttttgatccatggtgaacctcgacctaatatctgggatacactggagggaaaatggaggctgcggcaatccttgtgcagatgggccgtggaatacagcatatgcaagtgtttgattgtgcagcattctttattacttgggcgcaaaactgatcgtctgagccgagcagcaaggtattttgatcctgcactgctcccgtgtacaaacttggttctcaataaggcaggcaggaatgtgcatctgccagtggaacagaggaacctgcacagtatttatgtacaaacttcattacatgttcgtctatactaggaaaaacagaatatttgtaccaatctatacttgattaaagtatgtaaaggagtccctttttttttcttgtgtactgtaatcgtcggagtaggttttgtgagattttcgtagaaaggttgaatgtgatataatatattttatggtcccatactagtgtattgagcaactctagcaaggcaactcttttggttacctattcttctatcctatttataaggataggggagaaaaaccaccagatctcttgttccttctcccctatgattagtagatacaatcagttataaagacctcttgttccttctcccctataatcagctattttgatgcaagagatacaatcagttataa

SEQ ID NO: 21622 - DNA, 334 bp, Zea Mays
attcaataaggcaagcaagaattatttgtctcattcctctcctttgcctctcaaatctcacctccttcaccatcgggctgcggggcaaaaaccccgatgccattacaggtcgaggctacgaacttcgtagtcgaggccccgctgtcttgggcaccgacgcccttgacacttctagggccaaaaagaggagtgtccacgatgctctcacatcaaggaactgggtgaatgacatcagaggagctatctctcatgtacagtatcttatcatggactctaccccaatgtgtgcatctgttaagcgtgaaacctcagaaggaaaggaaggagaaagtcc

SEQ ID NO: 21623 - DNA, 235 bp, Zea Mays
gttataataaaaaggtattcttttcaaaaatgtgtgatctatactttataaaacaagacatgagcttaaaaatatcttaactgaaatctacaaatattaagttcacccatttaatcttttataaaacgtcatatgtgatatgtctaagattaagggtttataagatgttaaaacatgttataacaatattaaacctttttaactttttagagaagacatatgttatatatctaag

SEQ ID NO: 21624 - DNA, 343 bp, Zea Mays
cattattagaaaagttatatgacatattactattgtaaagtatataattatggatacttaaatatgagactaaacgagttttatgtgaagggataataaatgattatcattctattaagaaaacactaaatctatatttgttgagaaaactacattcaaaccagtaggtcatcattttaaagaaatgaactccaattctattattttagtatcttttagaaaactctattctttctatgaataagcaatttatatatgtacatgcataaacttgaatacaaaactaaattatactttatggataaatataattacttatcttttactttattatgaaacatac

SEQ ID NO: 21625 - DNA, 967 bp, Zea Mays
aactgaaaccctaacactaattgggtagggcatatattatatatcctggaatgtgggccaaggcccattacaatatacacaacgcactaacaaaaagaataccataaaggttagctaaagaagtgcatgatgctaggaaaaaaggtgaaggctttagtaagagcaactccagtagttctctaaaagactacctaaatcattaatttaggtagttaacttaaaaactcctattcaacggctctctaaatgaacttcctaaatttagtcacttctcatctaatctcatttcctccatacatttggcaaccatttaccaactcccaaaacataaaaactagtgcaatttttttatttcaacgtcttttctcatgctgtagtagtatagattaacaaagccaatgtgccggccgtcgaagatgcacaattgcaacagctagtaagctagagattaaacaattgataatgcaacaactacacatgcacaagtcaggaacaaacgaataaataattgtagcaacaaatcgaaaggctggcgaggtcacaatattgagatcgagttgcggaagggagatgaaaataaaaggaaaaattgacttgtcctgcaaaaactagtgatatggcaagttttaacatatttagaaagtaatatatagagaactgttggagaagatgagtttttttttgcttcctatatcatttgaggacttgctaaatctaggatttaggtagtggaattatacataactattggagctgctctaaacattctgaagaaatacaaatataaagttctaaaaatgagaagagaaacacaaatcagtggttaaagtgctcccatgtagcaaacacaacagatctagtacttacactatcaaacgtgaagcacctaaaaccatccatatagtcaatatccatccagacaacatcacaaggaatgtctttctccctaaatgtcctaacaacctgt

SEQ ID NO: 21626 - DNA, 1139 bp, Zea Mays
caagctccaacgtgacgtctccagcgtgggtgatgaagacgtgaatgtgttatgcgtggccggacggtggtcggcgccgtcggacctgatgacgtctccaggtccgtagagttcgttccgacggcgtcgtcgcccgcctccccaagtcccaatcagcccagccgcggacagggtggtcatcttgccccactccgcagtgaccttgggtggttcttatttttagacgacacccctacccgacccgatcggcgggagagcacgagacgccagcgccatccatcgcggcaaaagccgagacgacccaggaatctcggcaccgtcgcccccctttctctctcgctcaaaagttgctgctggagccctctcccctctctccgaccaccaaccatggatgaggcgcaagttgtggagtcaaaggatggaaccatctcggttgcttctgcatttgctggttatcaggaagctgtgcaagacagggatcacaaattcttgacaaaagcagtggaagaagcatatcgaggagtcgattgcggtgacggaggtccattcggagcagttgtcgtctgtaatgacgaagtagtagtcagctgccataacatggttctgaagcacactgaccctactgcgcatgctgaagtaactgcaattagagaggcttgcaaaaagcttgggaaaattgagctctcagactgcgaaatttacgcgtcctgcgagccatgcccaatgtgctttggtgcagttcatctctcccgaatcaagatgctctgagaggcactgggttctaccagaaggccaacttggagatcaagaaagctgacggcaatggtgcattgatcgctgagcaagtctttgaaaagactaaagagaagttccagatgtactgatgctgagcagaagagagatctcagatttgtacaatgcttactcataaggacaagaaataatacagtgcccaaatgtccattgtttcgggaaaaaaatctcaattccactgttcaacattttgatgatgcctgaatttcttgttaacagacacaagattgttatttgctgtaaaatgtgcagttgatggaatatactttctccctgtctgatggtgccatttagcacattaaattcgagtatgaggtccctttcct

SEQ ID NO: 21627 - DNA, 137 bp, Zea Mays
atgtcatctcaatgctgtgttgtaatgggtaagaaagaatcggaagtctgggtggtacacttggcgatggcgaagccagtcatctgctgtctgcatcaacgaagctacgagctgatgctcctcaggcctatttgacg

SEQ ID NO: 21628 - DNA, 1699 bp, Zea Mays
atcagtttcactgctaccttcgctgctagtatccatagattccccatcactttcctcccaagaatgccttaattaagcgagaaaattaactaagacagcgttacgagctatgaaaactgcaggaccaagaaaagaacagccatactgtgggggagcatttagacagtgtatgttgattccttttgagttttgatgcttattttgatgtccttatgtgaaactagactcgcaatgaacaatacacagctaaaagacttgcaaattgtagtgacttttagcttgtaaaactacaacaaaatagacagctacaaatcatacaggtaaaataaactatatttctcaaaattctagtaaagatattgtttccattattaggaaatatcaagactcagcaaaaggactaacttacatctctttctgctctaggctccaataatgtgatacttcaatcaactcatggacaatggacaattgactatgtcaaatcctatggcaattggcctctttaaaaaagtcatctatcctgatggtagtttcgataagtccaatttcatccccactgaagtaaaaagatgatatcctgaataacacgtttattcatgggcaatctaaagcttacccaataaacgcaacaacaaaatgcctaagtgattttaagtagaagatgttccatgctcccattgcattgttcttacaaatatttcagtcctagaatcatattggacaaccaagttaaacatgataagatcaatcaagttcaagaaaagtgagcaatagatcaatcaaccacaactgaattaatccaaggaactccccaatacaacaagcatttcataggtcaaagaagaattaatatcaacagcacattcacgacaacataaaaaagtgaatatatgagttgaatatcagtagttcaatttccattggcaaattaaccagatcaaaaactcttatgctgggcagtcaaatttatggtgtgtcatatatgtgaagaacaagcaaaaatacatatttgcaactatgacataacctgactaaaaaacacttatgagacgatccagggaaaagctgtacaccttgttagatcaaagaattacaccctcaagtgctcaataggcaacatgaagctttatattacattacattgaatcatataaacaaatcttagctaatgtcattcatcaacagaattttctagactctgtcagaaaggaaggatttcatttttattgatcaataagtataaaacatatccctgtttacagtccatttaaaatctgatcggccaattggtctgctgcctaccagatggccttatcctctcacattagaatttttttagtagctgaaatggaaacaatagataagaaaataaaatttcactggcccttggatattattctctagccttgataatgcatgaaggttcatagttcataattaatttcaaggattcagaagccataagattattttctgtttcacatttataaagcaagaaaggcaatcatggtgcaatggtgagagctgtctcactgagtcaccatgtcgcgggttcgaagcagcctatccgcatttgcgacgaaaaggcgtgcctcggtttatcccttcccaagaccccactgtgggagcttccggcaatgggcctaccctcacatttataaagcaaggctattgaagaacagaaaatcatgtctga

SEQ ID NO: 21629 - DNA, 1436 bp, Zea Mays
gtcttgagcacgagagtgcaaaagagcgaccagaaaagctggccggtcgctggcaacagcacgcattcctactctactccggcactgcacactcacgagctgtggatagctgatactctcccccggcgccaagaaaccacgaaatcgccccccacacacaccttcccttcggtccatcccgatcttaccaagaatccgagatccgcctgcgacagctagcggtcctatcttgatccgatggtgtcaccggcgccgggatgtagggattcgggggaggatggcggcaaggcggagtggctgatctacgcctttgtcgcgcgcggcatcgcggtgctggcggagtacacggaattcaccggcaacttccccgccatcgccgcacagtgcctgcagcgtctacccgccgggtcgtcctccgccagcaccgggcctgacggccgcggcggcgcgccggtacggttcagctatgcatgcgacgggcacacattcaacttcctcctgcaccgaggctacgcctattgtgtagttgcgaaggaatccgttccaaagaatgtctcagtggcatttcttgagaggttaaaggatgacttcatgaagagatatggtggcggtaaagctgatacagctcttgcaaaaagtctaaataaagaatatgggaactagataaaacgttaaaagtgcaggcccaagtttcagaagttaaaaatatcatgttaaacaacatagaaaagactttggaccgcggagaaaagttgagtgaactccaagacaagacttctgatctacatagtcaggcccaggagttcaagaaacagggggtgaagattcgtcggaagacatggctgcagaacgtgaaaattaagttggtgattcttggaatccttttgctccttgtgatcatagtctgggtatctgtttgtcaaggctttgactgcaccaagcatgaaacatagtagtaataagaatggtgcagcacgactgtggcagagctgcgatggatgcgagtttgtgctggtgaggtcaagtgtgtacccacatatgctttggctctcaagttcgattccaccagacaagtatcacggtacaaatgtaagtccgagctggtctttgttgcacgccggaggtaggtgtacttgcaatgcaagactagcatgatataaagtgatagcatggttccttctgtactagctgaattcgctagaatctagcataaaatgcatttcaattaccacttatttttgctcaacctattaacatatatagggcggactgagttcaagatatttagtgttagctaggttaaaccatgttacaagcagaaatagaagggtttactgttttttttttgagtggagcgtacatgtttttttaaataacaagcatcaagaatttcagtacaacataccattaatcctcttgaacatggtgagcatcac

SEQ ID NO: 21630 - DNA, 1470 bp, Zea Mays
gtcttgagcacgagagtgcaaaagagcgaccagaaaagctggccggtcgctggcaacagcacgcattcctactctactccggcactgcacactcacgagctgtggatagctgatactctcccccggcgccaagaaaccacgaaatcgccccccacacacaccttcccttcggtccatcccgatcttaccaagaatccgagatccgcctgcgacagctagcggtcctatcttgatccgatggtgtcaccggcgccgggatgtagggattcgggggaggatggcggcaaggcggagtggctgatctacgcctttgtcgcgcgcggcatcgcggtgctggcggagtacacggaattcaccggcaacttccccgccatcgccgcacagtgcctgcagcgtctacccgccgggtcgtcctccgccagcaccgggcctgacggccgcggcggcgcgccggtacggttcagctatgcatgcgacgggcacacattcaacttcctcctgcaccgaggctacgttgcgaaggaatccgttccaaagaatgtctcagtggcatttcttgagaggttaaaggatgacttcatgaagagatatggtggcggtaaagctgatacagctcttgcaaaaagtctaaataaagaatatggaccagttataaagcagcacattcagtatgttcttgatcattcacaggaactagataaaacgttaaaagtgcaggcccaagtttcagaagttaaaaatatcatgttaaacaacatagaaaagactttggaccgcggagaaaagttgagtgaactccaagacaagacttctgatctacatagtcaggcccaggagttcaagaaacagggggtgaagattcgtcggaagacatggctgcagaacgtgaaaattaagttggtgattcttggaatccttttgctccttgtgatcatagtctgggtatctgtttgtcaaggctttgactgcaccaagcatgaaacatagtagtaataagaatggtgcagcacgactgtggcagagctgcgatggatgcgagtttgtgctggtgaggtcaagtgtgtacccacatatgctttggctctcaagttcgattccaccagacaagtatcacggtacaaatgtaagtccgagctggtctttgttgcacgccggaggtaggtgtacttgcaatgcaagactagcatgatataaagtgatagcatggttccttctgtactagctgaattcgctagaatctagcataaaatgcatttcaattaccacttatttttgctcaacctattaacatatatagggcggactgagttcaagatatttagtgttagctaggttaaaccatgttacaagcagaaatagaagggtttactgttttttttttgagtggagcgtacatgtttttttaaataacaagcatcaagaatttcagtacaacataccattaatcctcttgaacatggtgagcatcac

SEQ ID NO: 21631 - DNA, 982 bp, Zea Mays
caaagctccaatcttgattgctgtagttgcgaaggaatccgttccaaagaatgtctcagtggcatttcttgagaggttaaaggatgacttcatgaagagatatggtggcggtaaagctgatacagctcttgcaaaaagtctaaataaagaatatggaccagttataaagcagcacattcagtatgttcttgatcattcacaggaactagataaaacgttaaaagtgcaggcccaagtttcagaagttaaaaatatcatgttaaacaacatagaaaagactttggaccgcggagaaaagttgagtgaactccaagacaagacttctgatctacatagtcaggcccaggagttcaagaaacagggggtgaagattcgtcggaagacatggctgcagaacgtgaaaattaagttggtgattcttggaatccttttgctccttgtgatcatagtctgggtatctgtttgtcaaggctttgactgcaccaagcatgaaacatagtagtaataagaatggtgcagcacgactgtggcagagctgcgatggatgcgagtttgtgctggtgaggtcaagtgtgtacccacatatgctttggctctcaagttcgattccaccagacaagtatcacggtacaaatgtaagtccgagctggtctttgttgcacgccggaggtaggtgtacttgcaatgcaagactagcatgatataaagtgatagcatggttccttctgtactagctgaattcgctagaatctagcataaaatgcatttcaattaccacttatttttgctcaacctattaacatatatagggcggactgagttcaagatatttagtgttagctaggttaaaccatgttacaagcagaaatagaagggtttactgttttttttttgagtggagcgtacatgtttttttaaataacaagcatcaagaatttcagtacaacataccattaatcctcttgaacatggtgagcatcac

SEQ ID NO: 21632 - DNA, 1026 bp, Zea Mays
tcaacagcaatgttggttatcagccaagagcctaaactcctttgtcatgtgttaccatcctattgtgtagttgcgaaggaatccgttccaaagaatgtctcagtggcatttcttgagaggttaaaggatgacttcatgaagagatatggtggcggtaaagctgatacagctcttgcaaaaagtctaaataaagaatatggaccagttataaagcagcacattcagtatgttcttgatcattcacaggaactagataaaacgttaaaagtgcaggcccaagtttcagaagttaaaaatatcatgttaaacaacatagaaaagactttggaccgcggagaaaagttgagtgaactccaagacaagacttctgatctacatagtcaggcccaggagttcaagaaacagggggtgaagattcgtcggaagacatggctgcagaacgtgaaaattaagttggtgattcttggaatccttttgctccttgtgatcatagtctgggtatctgtttgtcaaggctttgactgcaccaagcatgaaacatagtagtaataagaatggtgcagcacgactgtggcagagctgcgatggatgcgagtttgtgctggtgaggtcaagtgtgtacccacatatgctttggctctcaagttcgattccaccagacaagtatcacggtacaaatgtaagtccgagctggtctttgttgcacgccggaggtaggtgtacttgcaatgcaagactagcatgatataaagtgatagcatggttccttctgtactagctgaattcgctagaatctagcataaaatgcatttcaattaccacttatttttgctcaacctattaacatatatagggcggactgagttcaagatatttagtgttagctaggttaaaccatgttacaagcagaaatagaagggtttactgttttttttttgagtggagcgtacatgtttttttaaataacaagcatcaagaatttcagtacaacataccattaatcctcttgaacatggtgagcatcac

SEQ ID NO: 21633 - DNA, 2812 bp, Zea Mays
ctctctcctctcacgctcactaacctcctccttttctttaagaaaaaattttaaaagaaaagcacagcgccgccaccaccacgctaatcagcagcagctggtagcaacgcgggggttgcgctgctctgcttcccaagcaacgcaccaaagccaacgcggcgcggtactattataccaccacaccacccaccgatcccacagctcataccagcgcaggagcagcgcagcgcagcgcagagcggcgccgcgcgcagcacctccacgcccccagctgcctgcacatgtgagcggccgcggagggcgagagctaggtacatttcgttgtgccgccgctgcggggtccgtgcgcgaccgagatccggtggggcggtggacagagatggaggcgagcgcggggctggtggccggctcgcacaaccggaacgagctggtggtgatccgccgcgagtcaggagcgggcggcggcggaggaggcggcgcggcgcggcgggcggaggcgccgtgccagatatgcggcgacgaggttggggtgggcttcgacggggagcccttcgtggcgtgcaacgagtgcgccttccccgtctgccgcgcctgctacgagtacgagcgccgcgagggctcgcaggcgtgcccgcagtgcaggacccgctacaagcgcctcaagggttgcccgcgggtggctggggacgaggaggaggacggcgtcgacgacctggagggcgagttcggcctgcaggacggcgccggccacgaggacgacccgcagtacgtcgccgagtccatgctgcgggcgcagatgagctacggccgcggcggcgacgcgcacccggacttcaaccccgtccccaacgtgccgctcctcaccaacggccagatggttgatgacatcccgccggagcagcacgcgctcgtgccgtcctacatgggcagcggcggcggcggcaagaggatccacccgctccccttcgcagattccaaccttccagtgcaaccgagatccatggacccgtccaaggatttggccgcctacggctacggcagcgtggcttggaaggaaaggatggagggctggaagcagaagcaggagcgcctgcagcatgtcaggagcgagggtggcggtgattgggatggcgacaatgcagatctgccactaatggatgaagctcggcagccattgtccagaaaagttccaatatcgtcaagccgaataaatccctacaggatgattatcgttatccggttggtggtgttgggtttcttcttccattaccgagtgatgcatccagcgaaagatgcatttgcgttatggctcatatctgtaatctgtgaaatttggtttgccatgtcctggattcttgatcagttcccaaagtggcttccaattgagagagagacttacctggaccgtttgtcgctaaggtttgacaaggaaggtcaaccctctcagcttgctccaattgacttctttgtcagtacggttgatcccacaaaggaacctcccttggtcacagcgaacactgtcctttccatcctttccgtggattatccggttgagaaggtctcctgctatgtttctgatgatggtgctgcaatgcttacgtttgaagcattgtctgaaacatctgaatttgcaaagaaatgggttcctttctccaaaaagtttaatattgagcctcgtgctcctgagtggtacttccaacagaagatagactacctgaaagacaaggttgccgcttcatttgttagggagaggagggcgatgaagagagaatatgaggaattcaaggtaaggatcaatgccttggttgcaaaagcccaaaaggtacccgaggaaggatggacaatgcaagatggaagcctctggcctggaaacaatgtacgcgatcatcctggaatgattcaggtattccttggccaaagtggtggtcgcgatgtggaaggaaatgagttgcctcgccttgtttatgtctcgagagaaaagaggccaggttataaccatcacaagaaggctggtgccatgaatgcactggtccgtgtctctgctgtcttatcaaatgctccatacctattgaacttggactgcgatcactacatcaacaatagcaaggccataaaagaggctatgtgtttcatgatggatcctttggtggggaagaaagtgtgctatgtacagttccctcagaggttcgatggtattgaccgtcatgatcgatatgctaacaggaacgtcgtcttttttgatatcaacatgaaaggtttggatggtattcaagggcccatctatgtgggtactggatgtgttttcagacggcaggcactatatggttatgatgctcctaaaacaaagaagccaccatcaagaacttgcaactgctggcccaagtggtgcctctcttgctgctgcagcaggaacaagaataaaaagaagactacgaaaccaaagacggagaagaagaaaagattatttttcaagaaagcagaaaacccatctcctgcatatgctttgggtgaaattgaggaaggcgctccagatattgagaaggctggaattgtaaatcaacagaaactagaaaagaaatttgggcagtcttctgtttttgttgcatcgacacttcttgagaatggtgggaccctgaagagtgcaagcccagcttctcttctaaaggaagctatacatgttatcagctgcggctatgaagacaagactgactggggaaaagaggtctatataccatatataacctgattcaaagacttttgactgttctatttaaataaagatataatgtgctaagtggatcgtggtttgttg

SEQ ID NO: 21634 - DNA, 2618 bp, Zea Mays
caccacgctaatcagcagcagctggtagcaacgcgggggttgcgctgctctgcttcccaagcaacgcaccaaagccaacgcggcgcggtactattataccaccacaccacccaccgatcccacagctcataccagcgcaggagcagcgcagcgcagcgcagagcggcgccgcgcgcagcacctccacgcccccagctgcctgcacatgtgagcggccgcggagggcgagagctaggtacatttcgttgtgccgccgctgcggggtccgtgcgcgaccgagatccggtggggcggtggacagagatggaggcgagcgcggggctggtggccggctcgcacaaccggaacgagctggtggtgatccgccgcgagtcaggagcgggcggcggcggaggaggcggcgcggcgcggcgggcggaggcgccgtgccagatatgcggcgacgaggttggggtgggcttcgacggggagcccttcgtggcgtgcaacgagtgcgccttccccgtctgccgcgcctgctacgagtacgagcgccgcgagggctcgcaggcgtgcccgcagtgcaggacccgctacaagcgcctcaagggttgcccgcgggtggctggggacgaggaggaggacggcgtcgacgacctggagggcgagttcggcctgcaggacggcgccggccacgaggacgacccgcagtacgtcgccgagtccatgctgcgggcgcagatgagctacggccgcggcggcgacgcgcacccggacttcaaccccgtccccaacgtgccgctcctcaccaacggccagatggttgatgacatcccgccggagcagcacgcgctcgtgccgtcctacatgggcagcggcggcggcggcaagaggatccacccgctccccttcgcagattccaaccttccagtgcaaccgagatccatggacccgtccaaggatttggccgcctacggctacggcagcgtggcttggaaggaaaggatggagggctggaagcagaagcaggagcgcctgcagcatgtcaggagcgagggtggcggtgattgggatggcgacaatgcagatctgccactaatggatgaagctcggcagccattgtccagaaaagttccaatatcgtcaagccgaataaatccctacaggatgattatcgttatccgttcccaaagtggcttccaattgagagagagacttacctggaccgtttgtcgctaaggtttgacaaggaaggtcaaccctctcagcttgctccaattgacttctttgtcagtacggttgatcccacaaaggaacctcccttggtcacagcgaacactgtcctttccatcctttccgtggattatccggttgagaaggtctcctgctatgtttctgatgatggtgctgcaatgcttacgtttgaagcattgtctgaaacatctgaatttgcaaagaaatgggttcctttctccaaaaagtttaatattgagcctcgtgctcctgagtggtacttccaacagaagatagactacctgaaagacaaggttgccgcttcatttgttagggagaggagggcgatgaagagagaatatgaggaattcaaggtaaggatcaatgccttggttgcaaaagcccaaaaggtacccgaggaaggatggacaatgcaagatggaagcctctggcctggaaacaatgtacgcgatcatcctggaatgattcaggtattccttggccaaagtggtggtcgcgatgtggaaggaaatgagttgcctcgccttgtttatgtctcgagagaaaagaggccaggttataaccatcacaagaaggctggtgccatgaatgcactggtccgtgtctctgctgtcttatcaaatgctccatacctattgaacttggactgcgatcactacatcaacaatagcaaggccataaaagaggctatgtgtttcatgatggatcctttggtggggaagaaagtgtgctatgtacagttccctcagaggttcgatggtattgaccgtcatgatcgatatgctaacaggaacgtcgtcttttttgatatcaacatgaaaggtttggatggtattcaagggcccatctatgtgggtactggatgtgttttcagacggcaggcactatatggttatgatgctcctaaaacaaagaagccaccatcaagaacttgcaactgctggcccaagtggtgcctctcttgctgctgcagcaggaacaagaataaaaagaagactacgaaaccaaagacggagaagaagaaaagattatttttcaagaaagcagaaaacccatctcctgcatatgctttgggtgaaattgaggaaggcgctccaggtgcagatattgagaaggctggaattgtaaatcaacagaaactagaaaagaaatttgggcagtcttctgtttttgttgcatcgacacttcttgagaatggtgggaccctgaagagtgcaagcccagcttctcttctaaaggaagctatacatgttatcagctgcggctatgaagacaagactgactggggaaaagaggtctatataccatatataacctgattcaaagacttttgactgttctatttaaataaagatataatgtgctaagtggatcgtggtttgttg

SEQ ID NO: 21635 - DNA, 2153 bp, Zea Mays
gtccctgcagcatccatcggcggagcgcaaacgccgacgatccgcgtgcgtacatcggtacatgcgcctttacgagccgagcacgcacgaagggcacgctatgccgagtgacgttagccctcgtccccaactgcgcgaactcccgcgacaaccgcgcatgtccccgtcagccccgacagcgcgtgcggctcgcgctcccgcctcggcgtcacgcgacggcgggggggcgcgctgctctatacacgttccgccaccgccaggcgcggccgcggcaacttggctatttagttcgagaattctccaggggagatggagcacggagtccctgagatcgatcttgctctcagcgtcggagagttagctgcacaccccccgatccccggccacgctccgatcgtacgaggctagctgctccatcatcgccctcttctgggaccctgcccctgccgtgagtggatcaatccatggacgccgcgcaggtgcccgcggcagtggtggtcgacgtcggggcgctcaccggaccgatagggagcgaggcccccgctgcgccgaagggcccagcatggaaaaggttcttgtaccacgttggaccagggtttatgctcctctgggtgaccttgattggcctcatcttcgcgctaattattcagtcactatctgctaatcttggagtagtgacagggcggcatcttgccgagctatgcaagacggaatatccagcatgggtgagaatctgcctatggctgctagcagagttagctgtgattgctgcagatatcccagaagttatagggacagcttttgctttcaacatcttgttccacgtgcctttgtgggtgggggttcttatcactggctcaagcacacttcttctccttggactgcaaaaatatggggttaggaagctggaacttttggtcggcctattggtgttcgttatggcagcatgcttcttcatagagatgagcatagtgaagcctcctgcagaagaggtcatccacgggctattcatccccagtctgagtgggccgggcgccactggagacactatagcccttcttggggctcttgtgatgccgcacaatctattcttgcactctgccctggtactgtcaaggaacactccgtcatcagtaagaggaatcaatgatgcttgcaggttcttccttcttgaaagtggtgtagcgatgttcgtggcactaatcatcaacatatgcatcatctctgtctctggaactgtctgtaactccagcaacgtctcaccagatgactctgcaaaatgcagtgacatcaccttggactcctcgtccttcctcctgaggaatgtgctaggcaacagcagtgcggttgtgtatggtgtggctctcttggcttgtggaataagctcttccatcactggtacttacgctgggcaatacatcatgcagggtttcttggacatcaagatgagacagtggctgaggaacctgatgactcgcagcattgccattataccaagcttaatcgtcgccatcatcggcggatccagcggtgcgggccgcctcgtcatcattgcatcgatgatactgtcttttgagctgccatttgctctcatccctctcctcaagtttagcagtagtagcagcacgatgggccaacataaaaactctatatttattattgggttctcatggattctcggttttgttattattgggataaacatctacttcctcagctcaaaatttgttggctggatcctccacaattcactgcaaatctatgctaacattctcattggcattgtcgtgttccctcttatgctgatctacgtttgtgctgtgatctacctcacgttaaggaaggagaccatcaagttcgtggcttgcggtgagctgcagaccattgagaccgacaaatcaaagcttgccaatggcagcaacatggaggaaaagaaggatcagcttgtttagtcacatgacatgctttcaagaatgcttagggtgtagttggtttgatggcaagggtggatgatcataagtagatcttaggatatagatatctatgcaggctgtttggttcgatagatgaaataaacattttttctatttggttagatagattagcatatattttactacaaaagttcgacataagaccggatagagttttat

SEQ ID NO: 21636 - DNA, 2054 bp, Zea Mays
atggacgccgcgcaggtgcccgcggcagtggtggtcgacgtcggggcgctcaccggaccgatagggagcgaggcccccgctgcgccgaagttccgtggccagcattcagcaaaactgggacgtgcgctccgcatgtttgtggaaatgcctacggccattgcacatagtagcagaattccgattgcagggtacatgaacatgtatgatgctaagggcccagcatggaaaaggttcttgtaccacgttggaccagggtttatggtgtgtttggcctaccttgatcccggaaacttggggacagatttgcaagctggcgcagatcatagatatgagctcctctgggtgaccttgattggcctcatcttcgcgctaattattcagtcactatctgctaatcttggagtagtgacagggcggcatcttgccgagctatgcaagacggaatatccagcatgggtgagaatctgcctatggctgctagcagagttagctgtgattgctgcagatatcccagaagttatagggacagcttttgctttcaacatcttgttccacgtgcctttgtgggtgggggttcttatcactggctcaagcacacttcttctccttggactgcaaaaatatggggttaggaagctggaacttttggtcggcctattggtgttcgttatggcagcatgcttcttcatagagatgagcatagtgaagcctcctgcagaagaggtcatccacgggctattcatccccagtctgagtgggccgggcgccactggagacactatagcccttcttggggctcttgtgatgccgcacaatctattcttgcactctgccctggtactgtcaaggaacactccgtcatcagtaagaggaatcaatgatgcttgcaggttcttccttcttgaaagtggtgtagcgatgttcgtggcactaatcatcaacatatgcatcatctctgtctctggaactgtctgtaactccagcaacgtctcaccagatgactctgcaaaatgcagtgacatcaccttggactcctcgtccttcctcctgaggaatgtgctaggcaacagcagtgcggttgtgtatggtgtggctctcttggcttgtggaataagctcttccatcactggtacttacgctgggcaatacatcatgcaggtagcgcttcttggcctgttgaagatgcatagaggatctgtatttgtcctagccagcaatcatcgttaaactaacagattataatatcatattctttccaacatttacatacttgtacacagattgttatacttgaagcacggtttgcatgtgtttggctccttgctcagggtttcttggacatcaagatgagacagtggctgaggaacctgatgactcgcagcattgccattataccaagcttaatcgtcgccatcatcggcggatccagcggtgcgggccgcctcgtcatcattgcatcgatgatactgtcttttgagctgccatttgctctcatccctctcctcaagtttagcagtagtagcagcacgatgggccaacataaaaactctatatttattattgggttctcatggattctcggttttgttattattgggataaacatctacttcctcagctcaaaatttgttggctggatcctccacaattcactgcaaatctatgctaacattctcattggcattgtcgtgttccctcttatgctgatctacgtttgtgctgtgatctacctcacgttaaggaaggagaccatcaagttcgtggcttgcggtgagctgcagaccattgagaccgacaaatcaaagcttgccaatggcagcaacatggaggaaaagaaggatcagcttgtttagtcacatgacatgctttcaagaatgcttagggtgtagttggtttgatggcaagggtggatgatcataagtagatcttaggatatagatatctatgcaggctgtttggttcgatagatgaaataaacattttttctatttggttagatagattagcatatattttactacaaaagttcgacataagaccggatagagttttat

SEQ ID NO: 21637 - DNA, 121 bp, Zea Mays
ttacacattagtcatcttgtcaacactggattgcagtatttggttgacagtgtcgtagctgcctatttgctctcatctgaccttctgacatggaatatgagtaaaatccaagaattttgta

SEQ ID NO: 21638 - DNA, 1733 bp, Zea Mays
atttcctttccagcgaccggcgagcgcacagccacacgcacagaggggtgttgccgtgtagcagagcagctcgcgccatgtccctgtccgtcggcggcgcgcggacctctctcctcccttcttcgttcaccgcctcttcatcccgcccgcgcttcctcgcgctccctctccaccgccgctcgcacggctccctcacctcgctgccggccgcgtgcaggcggcggctccgggtgcgcatggcccggacggagtccaccggcgtcaccatcggcttccgcgcgccggatttcgagctccctgagccactgactggaaagctctggacgttggatgacttcgagggcaactctgcactgcttgtcagtgaatttttctttcagtatttccttcggtattatatatgtgctccaattcaacacgtattccacactcacgcattcggcattcgatgtaggacccatttcctgtgcaactaactgtgtctgattttttttttttttgcctgtaacttgactgaagaaacatgctcagttccattgtttgattgttgttagcccttgcacgttacattctgaaccccgtctgatttgttttctcttcaggttatgttcatatgcaaccactgtccatttgtaaaacatctgaaaaaggacatcagcaagctcgcctctttctatgtggaggtaacaaacaacttgggagagctggcagagctccctcttctgtttacatctgtgatgacttgacttctagatgcattgcagaaaggacttggtgctgttgccatatcgtccaactcagttaggacgcatccccaggatggcccagatcgcatggctgaagaagcagagctgttcaaatatcctttcccatatctttacgatgaggtctggccgcaccgtgccttggattcagagatttttcagcgaccatgaagatgcttttttaggccgagtgatatcctatcctttttcagcattgaagttcttcctcgtgactaattttgtttatttttttgttaccaccgcaacctacagtctcaagaggtagccaaggcttttggagcggtctgcacgccagagttctacttgttcaaaaaggatggccggaggccttttgaacttttctaccatggacagttcgatgactcaagacccagtaacaacgtgcctgtaaccggaaggtaaacttttgtgacgtctgtgttagcgcttgcttgcttgaactctgcagtgccccctcccctgtgctcaagctcttcccccagttttgcagggacctaagccgcgcgattgactgtgcgctcagtggccaagaactgccctttgtgcaaaagccaagtgtcggctgcagcatcaaatggcacccatgaggtgcccaccttgttcggcatttgattcggcccaggctcacaggggctgaagatgagacagatctgtgggggagaaacagaaacatgggaacttctcttgtgtgacggcgaaatagtgtagcgctagcgcagcaaccagcaaaaggctcatgtaaagaattgttcacgaaacagaagagcttcacttctaccttctgtaggacatggtcatcgcaaaaggcgttggtattgtttcctgctggaagtaatttctgccgggatggatattcattttcaggatgaattttttttaaaaaaaaataaggtcaaaaagtggcttcgcccggactcgaaccggagaccttcagtgtgttagactgac

SEQ ID NO: 21639 - DNA, 1336 bp, Zea Mays
atttcctttccagcgaccggcgagcgcacagccacacgcacagaggggtgttgccgtgtagcagagcagctcgcgccatgtccctgtccgtcggcggcgcgcggacctctctcctcccttcttcgttcaccgcctcttcatcccgcccgcgcttcctcgcgctccctctccaccgccgctcgcacggctccctcacctcgctgccggccgcgtgcaggcggcggctccgggtgcgcatggcccggacggagtccaccggcgtcaccatcggcttccgcgcgccggatttcgagctccctgagccactgactggaaagctctggacgttggatgacttcgagggcaactctgcactgcttgttatgttcatatgcaaccactgtccatttgtaaaacatctgaaaaaggacatcagcaagctcgcctctttctatgtggagatgcattgcagaaaggacttggtgctgttgccatatcgtccaactcagttaggacgcatccccaggatggcccagatcgcatggctgaagaagcagagctgttcaaatatcctttcccatatctttacgatgaggtctggccgcaccgtgccttggattcagagatttttcagcgaccatgaagatgcttttttaggccgagtgatatcctatcctttttcagcattgaagttcttcctcgtgactaattttgtttatttttttgttaccaccgcaacctacagtctcaagaggtagccaaggcttttggagcggtctgcacgccagagttctacttgttcaaaaaggatggccggaggccttttgaacttttctaccatggacagttcgatgactcaagacccagtaacaacgtgcctgtaaccggaagttttgcagggacctaagccgcgcgattgactgtgcgctcagtggccaagaactgccctttgtgcaaaagccaagtgtcggctgcagcatcaaatggcacccatgaggtgcccaccttgttcggcatttgattcggcccaggctcacaggggctgaagatgagacagatctgtgggggagaaacagaaacatgggaacttctcttgtgtgacggcgaaatagtgtagcgctagcgcagcaaccagcaaaaggctcatgtaaagaattgttcacgaaacagaagagcttcacttctaccttctgtaggacatggtcatcgcaaaaggcgttggtattgtttcctgctggaagtaatttctgccgggatggatattcattttcaggatgaattttttttaaaaaaaaataaggtcaaaaagtggcttcgcccggactcgaaccggagaccttcagtgtgttagactgac

SEQ ID NO: 21640 - DNA, 1178 bp, Zea Mays
atttcctttccagcgaccggcgagcgcacagccacacgcacagaggggtgttgccgtgtagcagagcagctcgcgccatgtccctgtccgtcggcggcgcgcggacctctctcctcccttcttcgttcaccgcctcttcatcccgcccgcgcttcctcgcgctccctctccaccgccgctcgcacggctccctcacctcgctgccggccgcgtgcaggcggcggctccgggtgcgcatggcccggacggagtccaccggcgtcaccatcggcttccgcgcgccggatttcgagctccctgagccactgactggaaagctctggacgttggatgacttcgagggcaactctgcactgcttgttatgttcatatgcaaccactgtccatttgtaaaacatctgaaaaaggacatcagcaagctcgcctctttctatgtggagatgcattgcagaaaggacttggtgctgttgccatatcgtccaactcagttaggacgcatccccaggatggcccagatcgcatggctgaagaagcagagctgttcaaatatcctttcccatatctttacgatgagtctcaagaggtagccaaggcttttggagcggtctgcacgccagagttctacttgttcaaaaaggatggccggaggccttttgaacttttctaccatggacagttcgatgactcaagacccagtaacaacgtgcctgtaaccggaagggacctaagccgcgcgattgactgtgcgctcagtggccaagaactgccctttgtgcaaaagccaagtgtcggctgcagcatcaaatggcacccatgaggtgcccaccttgttcggcatttgattcggcccaggctcacaggggctgaagatgagacagatctgtgggggagaaacagaaacatgggaacttctcttgtgtgacggcgaaatagtgtagcgctagcgcagcaaccagcaaaaggctcatgtaaagaattgttcacgaaacagaagagcttcacttctaccttctgtaggacatggtcatcgcaaaaggcgttggtattgtttcctgctggaagtaatttctgccgggatggatattcattttcaggatgaattttttttaaaaaaaaataaggtcaaaaagtggcttcgcccggactcgaaccggagaccttcagtgtgttagactgac

SEQ ID NO: 21641 - DNA, 1739 bp, Zea Mays
aaatatggggcctaaaaattagtccttaccaaacactgcctaaccgcctaaggattccgccgccggcaccttgccagctgacgccaccaatcaacgcttccctttatggccggagcaatagttggcagactcggccgccatcccacctccttgctcctcctaacactgccccgtcacgccgccgcacaccaccggctgcactctccttcctcctcccaagttgcaagagccggattgccaggtcagtattcaaaaatgggtgatccaagtgagaggaatggacacggcgctcttacccgggtgctattctgtggtccatattggcctgcttctactaactacaccagggagtatttgcaggactatccattcattcaggttgatgaagtaggtcttgagcaggtacctgatgttattcacagctatcatatatgtgtagtaaaaaataagcgtatagattcagatattattgccaaggcaactcagatgaagattataatgcagtatggtgttgggttagaaggtgttgatgtaaatgctgctacagaacacaaaatcaaagttgcacgaatacctggaagtacgacaggaaatgctgtctcttgcgcagaaatggcaatctatcttactctaggcattctgcgtaagcaaaaggagatggatactgctgtgaaccggaaagaccttggtgttccagttggagatacattatttggcaaaacaatccttatccttggatttggggccattggcatcgaggttgccaagaggctaagaccctttggggtaaaaattcttgctaccaaaagaaattggtcatcggacacattgccatcttatgttgatgagctagttgacaagaaaggtgggccggaagatatgtatgagtttgctggtgaagctaacattgttatagcatgcatgaccttaaccagcgagacaattggaattgtggatcataagtttgtttcatcaatgaaaaaggggtcatatctggtcaacattgctcggggacgcctgctggactacaaggctgtgtttgatcacctggaatcgggccatctagctggtctggggattgatgttgcttggatggagccatttgatcctgaggaccctgttctgaaattcccaaacgtcattctaacgccccatgtggccggcgtcaccgagtattcctacagaactatggcaaagtctgttggtgacaccgcccttcagcttcatttaggcgaggcgttcacggaggtagagttcgtcaactaaaaaaccgtccaggcggcagccgtagacgcatgccattcgtgggctatcggaaccgctgatgcgatcatttgtagagaataatggatccgcgacttgtaagaataaacatgtagccagatgtttgatggtgatctccatgagaactctgccactggctgccttagctggtagtggtagcaagtcattttctcaaacattgccttctctttctctgtatcactgttgtcgtcatgatcacaactttctttgttagccgggttggttaggtgctctaggtaacactccttaagtttgagttcagttcaattcttaattcgactgaatttcaggctgagttttaaaaataatacctttttttttggtgttgttcacgcactagcctcagctagccgtcgtagtctcggacggcgattaggaggtcagatcgtgaacactgtcatttccatcatgtacgacgaatgaggttttcgcga

SEQ ID NO: 21642 - DNA, 1940 bp, Zea Mays
ctaaaaattagtccttaccaaacactgcctaaccgcctaaggattccgccgccggcaccttgccagctgacgccaccaatcaacgcttccctttatggccggagcaatagttggcagactcggccgccatcccacctccttgctcctcctaacactgccccgtcacgccgccgcacaccaccggctgcactctccttcctcctcccaagttgcaagagccggattgccaggtcagtattcaaaaatgggtgatccaagtgagaggaatggacacggcgctcttacccgggtgctattctgtggtccatattggcctgcttctactaactacaccagggagtatttgcaggactatccattcattcaggttgatgaagtaggtcttgagcaggtacctgatgttattcacagctatcatatatgtgtagtaaaaaataagcgtatagattcagatattattgccaaggcaactcagatgaagattataatgcagtatggtgttgggttagaaggtgttgatgtaaatgctgctacagaacacaaaatcaaagttgcacgaatacctggaagtacgacaggaaatgctgtctcttgcgcagaaatggcaatctatcttactctaggcattctgcgtaagcaaaaggagatggatactgctgtgaaccggaaagaccttggtgttccagttggagatacattatttggcaaaacaatccttatccttggatttggggccattggcatcgaggttgccaagaggctaagaccctttggggtaaaaattcttgctaccaaaagaaattggtcatcggacacattgccatcttatgttgatgagctagttgacaagaaaggtgggccggaagatatgtatgagtttgctggtgaagctaacattgttatagcatgcatgaccttaaccagcgagacaattggaattgtggatcataagtttgtttcatcaatgaaaaaggtacatgcttgtttctgtcatactggtctccatgttatcagatctgtgggctcatttcgctgactccatccttttggttttagtgttgtgcataaataatagagaaggaatgatccatgagtcatggtatcagttgagaacatttttactagaaaacattttctggagaataatgttattgggttaacttgaattgcttcaatcttaagtaggggtcatatctggtcaacattgctcggggacgcctgctggactacaaggctgtgtttgatcacctggaatcgggccatctagctggtctggggattgatgttgcttggatggagccatttgatcctgaggaccctgttctgaaattcccaaacgtcattctaacgccccatgtggccggcgtcaccgagtattcctacagaactatggcaaagtctgttggtgacaccgcccttcagcttcatttaggcgaggcgttcacggaggtagagttcgtcaactaaaaaaccgtccaggcggcagccgtagacgcatgccattcgtgggctatcggaaccgctgatgcgatcatttgtagagaataatggatccgcgacttgtaagaataaacatgtagccagatgtttgatggtgatctccatgagaactctgccactggctgccttagctggtagtggtagcaagtcattttctcaaacattgccttctctttctctgtatcactgttgtcgtcatgatcacaactttctttgttagccgggttggttaggtgctctaggtaacactccttaagtttgagttcagttcaattcttaattcgactgaatttcaggctgagttttaaaaataatacctttttttttggtgttgttcacgcactagcctcagctagccgtcgtagtctcggacggcgattaggaggtcagatcgtgaacactgtcatttccatcatgtacgacgaatgaggttttcgcga

SEQ ID NO: 21643 - DNA, 1750 bp, Zea Mays
ctaaaaattagtccttaccaaacactgcctaaccgcctaaggattccgccgccggcaccttgccagctgacgccaccaatcaacgcttccctttatggccggagcaatagttggcagactcggccgccatcccacctccttgctcctcctaacactgccccgtcacgccgccgcacaccaccggctgcactctccttcctcctcccaaggtcagtattcaaaaatgggtgatccaagtgagaggaatggacacggcgctcttacccgggtgctattctgtggtccatattggcctgcttctactaactacaccagggagtatttgcaggactatccattcattcaggttgatgaagtaggtcttgagcaggtacctgatgttattcacagctatcatatatgtgtagtaaaaaataagcgtatagattcagatattattgccaaggcaactcagatgaagattataatgcagtatggtgttgggttagaaggtgttgatgtaaatgctgctacagaacacaaaatcaaagttgcacgaatacctggaagtacgacaggaaatgctgtctcttgcgcagaaatggcaatctatcttactctaggcattctgcgtaagcaaaaggagatggatactgctgtgaaccggaaagaccttggtgttccagttggagatacattatttggcaaaacaatccttatccttggatttggggccattggcatcgaggttgccaagaggctaagaccctttggggtaaaaattcttgctaccaaaagaaattggtcatcggacacattgccatcttatgttgatgagctagttgacaagaaaggtgggccggaagatatgtatgagtttgctggtgaagctaacattgttatagcatgcatgaccttaaccagcgagacaattggaattgtggatcataagtttgtttcatcaatgaaaaagtgttgtgcataaataatagagaaggaatgatccatgagtcatggggtcatatctggtcaacattgctcggggacgcctgctggactacaaggctgtgtttgatcacctggaatcgggccatctagctggtctggggattgatgttgcttggatggagccatttgatcctgaggaccctgttctgaaattcccaaacgtcattctaacgccccatgtggccggcgtcaccgagtattcctacagaactatggcaaagtctgttggtgacaccgcccttcagcttcatttaggcgaggcgttcacggaggtagagttcgtcaactaaaaaaccgtccaggcggcagccgtagacgcatgccattcgtgggctatcggaaccgctgatgcgatcatttgtagagaataatggatccgcgacttgtaagaataaacatgtagccagatgtttgatggtgatctccatgagaactctgccactggctgccttagctggtagtggtagcaagtcattttctcaaacattgccttctctttctctgtatcactgttgtcgtcatgatcacaactttctttgttagccgggttggttaggtgctctaggtaacactccttaagtttgagttcagttcaattcttaattcgactgaatttcaggctgagttttaaaaataatacctttttttttggtgttgttcacgcactagcctcagctagccgtcgtagtctcggacggcgattaggaggtcagatcgtgaacactgtcatttccatcatgtacgacgaatgaggttttcgcga

SEQ ID NO: 21644 - DNA, 1532 bp, Zea Mays
ctttttttgagacaaattctgttctaatatagcagtttgatagttgatgaagtaggtcttgagcaggtacctgatgttattcacagctatcatatatgtgtagtaaaaaataagcgtatagattcagatattattgccaaggcaactcagatgaagattataatgcagtatggtgttgggttagaaggtgttgatgtaaatgctgctacagaacacaaaatcaaagttgcacgaatacctggaagtacgacaggaaatgctgtctcttgcgcagaaatggcaatctatcttactctaggcattctgcgtaagcaaaaggagatggatactgctgtgaaccggaaagaccttggtgttccagttggagatacattatttggcaaaacaatccttatccttggatttggggccattggcatcgaggttgccaagaggctaagaccctttggggtaaaaattcttgctaccaaaagaaattggtcatcggacacattgccatcttatgttgatgagctagttgacaagaaaggtgggccggaagatatgtatgagtttgctggtgaagctaacattgttatagcatgcatgaccttaaccagcgagacaattggaattgtggatcataagtttgtttcatcaatgaaaaagtgttgtgcataaataatagagaaggaatgatccatgagtcatggtatcagttgagaacatttttactagaaaacattttctggagaataatgttattgggttaacttgaattgcttcaatcttaagtaggggtcatatctggtcaacattgctcggggacgcctgctggactacaaggctgtgtttgatcacctggaatcgggccatctagctggtctggggattgatgttgcttggatggagccatttgatcctgaggaccctgttctgaaattcccaaacgtcattctaacgccccatgtggccggcgtcaccgagtattcctacagaactatggcaaagtctgttggtgacaccgcccttcagcttcatttaggcgaggcgttcacggaggtagagttcgtcaactaaaaaaccgtccaggcggcagccgtagacgcatgccattcgtgggctatcggaaccgctgatgcgatcatttgtagagaataatggatccgcgacttgtaagaataaacatgtagccagatgtttgatggtgatctccatgagaactctgccactggctgccttagctggtagtggtagcaagtcattttctcaaacattgccttctctttctctgtatcactgttgtcgtcatgatcacaactttctttgttagccgggttggttaggtgctctaggtaacactccttaagtttgagttcagttcaattcttaattcgactgaatttcaggctgagttttaaaaataatacctttttttttggtgttgttcacgcactagcctcagctagccgtcgtagtctcggacggcgattaggaggtcagatcgtgaacactgtcatttccatcatgtacgacgaatgaggttttcgcga

SEQ ID NO: 21645 - DNA, 2599 bp, Zea Mays
caaaactaaaataatcgtactgtagaagccgagcgcaggagatccaacaacgaaactccccttcgttccttcctcgtgttcttctccctcctgccgccgcggcccgctccgctcccgagccccgttgcacctccacccgccgcttccgtcccgtctcctgccaccttcctctcaccgcaatcgagtcgctgcgcctcctcccgcccgccacctcccgcagccgcagcaggacgagctcgtcgccgccgtgtactagaagaacgggaggtcgctgtcggtctcccgcacaatcctgattcctggacctgcgccgcgtggtttcgcctcaggttggagtgtctcgatttgtcaggatagcttgtataactgaagctttcctttgtatgatgatgggggcatgccatggatcacaagtgagggggctagggtttagtatgtggtagtagctcctgcttcagcaaaagaagcaaggatcactacttttgctgtttgttccgtggaggatctgaatcctatcggcattgattcgggtggcgtcagctgttctgggtggggtagtatgatgaaacagatatttggacggcgcaaggcgtccaaaactgcaggcaaggagtgtggcgggaggacgttcaaccagctgctgtcaggttctggatttgctgacctgagtggccagctgccaattctgtctagtactggggacatctatgggaatggaaaccgtacggggttccaagactcgaggataaatgatactttgttctcttccaacttccgactgttgccgagctttaaggatgtgccaaatacagagaaacagaatctgctcatcaaaaagttgaacatgtgctgcactctgtttgactttgaggatgcggcaaagaacataaaggagaaggagataaagacgctaatgttgttggagatagatgaatatgttaggactgctaacgcgaagttccctgagatcattgtggaggcaatcacaaaaatgatttcagtgaacttgttcaggacactaatttccccacccagggagaagaaggtgcttcaagcttttgatctagaagaggatgaaccattgatggaccctgcgtggccacacttgtaccatgtgtatgagttgctcttgacatttgttcagtctccagaaaatgatgctaaactggctaagaagtatattgaccattcctttattctaaggctgcttgagctctttgactctgaggatgctagggagagggatcgccttaagacggtacttcaccgtatctatgggaagttcatggtgtaccggccatttatccggaaagctataaataacatattctaccagttcatatatgaaactgaaaagcacaatggaattgcagagctcttggagatttttggaagtattatcaacgggtttgctttgccactcaaggaagagcacaaactgttccttggaaggaccttaattccacttcacaagccaaggtgtacttcaatgtaccatcggcagttgtcttactgcattacacagtttgttgaaaaagattgcaaacttgcggatactgttattaggggcctcataaaatattggcctatcaccaacagcacaaaggaggtgctgttcttgggtgagctggaagaggtactagatgcaacacagcctgctgaatttcaaaaatgtatggttcctctttcccaccagatcgctcactgcttgaacagctctcacttccaggttgctgagagagtattatttttctggaacaatattcacttcgagaatttcgttaagcaaaacagtaaggtgatcctgcctatcatcctccctgcattggagaaaaatataaatgggcactggaatcaagtcgtgcaaagcctcagtctgaatgtccgaaagttactctccgatcgtgaccctcaaatgtttactgaatgcttgcgaaaatacgaggaagacaagggcagggagaaggaatttaaactgaagcaagagttggcatggaaacgtctggatgagattgcatcagcaaaagtcacaagtggtgaggctgtccttgtgtctccaaccttgcctcgtcaaccttcattcttgtagcaacctgcactgaatgagtgagtcgttagacattgtacaggattgggttgtagataaaagggggtatatgaagccttcaaggctggtgagcgaaattgaagaaagagatctgagaagccaattgtgcatcatttctgtaaatcccatgccatggcttcttttggcattctggtggttcagtctgcttctgtagtccgttgtttgggacaatgtattttttttcttgtaatggaaaatgttgagatgtcctgcaggcggcttaaatgataaaagttattaattttcatcacagagtgccatggcacgacagatggatacaggggcaccacaccacgtaagactttgttcgtttacaccaatcccgctctggattagtatggattggaattaaatccatgcctcaatccatgccccaaaataatccatgactacttaattttttttattcggttaaacccatcatggaatataacccaaatgtttgggaattttttaaactatggaagacat

SEQ ID NO: 21646 - DNA, 2546 bp, Zea Mays
aaaataatcgtactgtagaagccgagcgcaggagatccaacaacgaaactccccttcgttccttcctcgtgttcttctccctcctgccgccgcggcccgctccgctcccgagccccgttgcacctccacccgccgcttccgtcccgtctcctgccaccttcctctcaccgcaatcgagtcgctgcgcctcctcccgcccgccacctcccgcagccgcagcaggacgagctcgtcgccgccgtgtactagaagaacgggaggtcgctgtcggtctcccgcacaatcctgattcctggacctgcgccgcgtggtttcgcctcaggttggagtgtctcgatttgtcaggatagcttgtataactgaagctttcctttgtatgatgatgggggcatgccatggatcacaagtgagggggctagggtttagtatgtggtagtagctcctgcttcagcaaaagaagcaaggatcactacttttgctgtttgttccgtggaggatctgaatcctatcggcattgattcgggtggcgtcagctgttctgggtggggtagtatgatgaaacagatatttggacggcgcaaggcgtccaaaactgcaggcaaggagtgtggcgggaggacgttcaaccagctgctgtcaggttctggatttgctgacctgagtggccagctgccaattctgtctagtactggggacatctatgggaatggaaaccgtacggggttccaagactcgaggataaatgatactttgttctcttccaacttccgactgttgccgagctttaaggatgtgccaaatacagagaaacagaatctgctcatcaaaaagttgaacatgtgctgcactctgtttgactttgaggatgcggcaaagaacataaaggagaaggagataaagacgctaatgttgttggagatagatgaatatgttaggactgctaacgcgaagttccctgagatcattgtggaggcaatcacaaaaatgatttcagtgaacttgttcaggacactaatttccccacccagggagaagaaggtgcttcaagcttttgatctagaagaggatgaaccattgatggaccctgcgtggccacacttgtaccatgtgtatgagttgctcttgacatttgttcagtctccagaaaatgatgctaaactggctaagaagtatattgaccattcctttattctaaggctgcttgagctctttgactctgaggatgctagggagagggatcgccttaagacggtacttcaccgtatctatgggaagttcatggtgtaccggccatttatccggaaagctataaataacatattctaccagttcatatatgaaactgaaaagcacaatggaattgcagagctcttggagatttttggaagtattatcaacgggtttgctttgccactcaaggaagagcacaaactgttccttggaaggaccttaattccacttcacaagccaaggtgtacttcaatgtaccatcggcagttgtcttactgcattacacagtttgttgaaaaagattgcaaacttgcggatactgttattaggggcctcataaaatattggcctatcaccaacagcacaaaggaggtgctgttcttgggtgagctggaagaggtactagatgcaacacagcctgctgaatttcaaaaatgttgctgagagagtattatttttctggaacaatattcacttcgagaatttcgttaagcaaaacagtaaggtgatcctgcctatcatcctccctgcattggagaaaaatataaatgggcactggaatcaagtcgtgcaaagcctcagtctgaatgtccgaaagttactctccgatcgtgaccctcaaatgtttactgaatgcttgcgaaaatacgaggaagacaagggcagggagaaggaatttaaactgaagcaagagttggcatggaaacgtctggatgagattgcatcagcaaaagtcacaagtggtgaggctgtccttgtgtctccaaccttgcctcgtcaaccttcattcttgtagcaacctgcactgaatgagtggtccttgcagagtcgttagacattgtacaggattgggttgtagataaaagggggtatatgaagccttcaaggctggtgagcgaaattgaagaaagagatctgagaagccaattgtgcatcatttctgtaaatcccatgccatggcttcttttggcattctggtggttcagtctgcttctgtagtccgttgtttgggacaatgtattttttttcttgtaatggaaaatgttgagatgtcctgcaggcggcttaaatgataaaagttattaattttcatcacagagtgccatggcacgacagatggatacaggggcaccacaccacgtaagactttgttcgtttacaccaatcccgctctggattagtatggattggaattaaatccatgcctcaatccatgccccaaaataatccatgactacttaattttttttattcggttaaacccatcatggaatataacccaaatgtttgggaattttttaaactatggaagacat

SEQ ID NO: 21647 - DNA, 2515 bp, Zea Mays
aaaataatcgtactgtagaagccgagcgcaggagatccaacaacgaaactccccttcgttccttcctcgtgttcttctccctcctgccgccgcggcccgctccgctcccgagccccgttgcacctccacccgccgcttccgtcccgtctcctgccaccttcctctcaccgcaatcgagtcgctgcgcctcctcccgcccgccacctcccgcagccgcagcaggacgagctcgtcgccgccgtgtactagaagaacgggaggtcgctgtcggtctcccgcacaatcctgattcctggacctgcgccgcgtggtttcgcctcaggttggagtgtctcgatttgtcaggatagcttgtataactgaagctttcctttgtatgatgatgggggcatgccatggatcacaagtgagggggctagggtttagtatgtggtagtagctcctgcttcagcaaaagaagcaaggatcactacttttgctgtttgttccgtggaggatctgaatcctatcggcattgattcgggtggcgtcagctgttctgggtggggtagtatgatgaaacagatatttggacggcgcaaggcgtccaaaactgcaggcaaggagtgtggcgggaggacgttcaaccagctgctgtcaggttctggatttgctgacctgagtggccagctgccaattctgtctagtactggggacatctatgggaatggaaaccgtacggggttccaagactcgaggataaatgatactttgttctcttccaacttccgactgttgccgagctttaaggatgtgccaaatacagagaaacagaatctgctcatcaaaaagttgaacatgtgctgcactctgtttgactttgaggatgcggcaaagaacataaaggagaaggagataaagacgctaatgttgttggagatagatgaatatgttaggactgctaacgcgaagttccctgagatcattgtggaggcaatcacaaaaatgatttcagtgaacttgttcaggacactaatttccccacccagggagaagaaggtgcttcaagcttttgatctagaagaggatgaaccattgatggaccctgcgtggccacacttgtaccatgtgtatgagttgctcttgacatttgttcagtctccagaaaatgatgctaaactggctaagaagtatattgaccattcctttattctaaggctgcttgagctctttgactctgaggatgctagggagagggatcgccttaagacggtacttcaccgtatctatgggaagttcatggtgtaccggccatttatccggaaagctataaataacatattctaccagttcatatatgaaactgaaaagcacaatggaattgcagagctcttggagatttttggaagtattatcaacgggtttgctttgccactcaaggaagagcacaaactgttccttggaaggaccttaattccacttcacaagccaaggggcctcataaaatattggcctatcaccaacagcacaaaggaggtgctgttcttgggtgagctggaagaggtactagatgcaacacagcctgctgaatttcaaaaatgtatggttcctctttcccaccagatcgctcactgcttgaacagctctcacttccaggttgctgagagagtattatttttctggaacaatattcacttcgagaatttcgttaagcaaaacagtaaggtgatcctgcctatcatcctccctgcattggagaaaaatataaatgggcactggaatcaagtcgtgcaaagcctcagtctgaatgtccgaaagttactctccgatcgtgaccctcaaatgtttactgaatgcttgcgaaaatacgaggaagacaagggcagggagaaggaatttaaactgaagcaagagttggcatggaaacgtctggatgagattgcatcagcaaaagtcacaagtggtgaggctgtccttgtgtctccaaccttgcctcgtcaaccttcattcttgtagcaacctgcactgaatgagtggtccttgcagagtcgttagacattgtacaggattgggttgtagataaaagggggtatatgaagccttcaaggctggtgagcgaaattgaagaaagagatctgagaagccaattgtgcatcatttctgtaaatcccatgccatggcttcttttggcattctggtggttcagtctgcttctgtagtccgttgtttgggacaatgtattttttttcttgtaatggaaaatgttgagatgtcctgcaggcggcttaaatgataaaagttattaattttcatcacagagtgccatggcacgacagatggatacaggggcaccacaccacgtaagactttgttcgtttacaccaatcccgctctggattagtatggattggaattaaatccatgcctcaatccatgccccaaaataatccatgactacttaattttttttattcggttaaacccatcatggaatataacccaaatgtttgggaattttttaaactatggaagacat

SEQ ID NO: 21648 - DNA, 4022 bp, Zea Mays
tttataatgacaaaaagttaaatttctccgtcgccgagggagtccaatcccaacacggcgacgacgacaaacaaacaaggaaatcgcctcctcctcctcctcctcctcttcctctttccctcgctctgccatctgcccccaaattcccctccccactcgctcgcgtcgcgatagcaagcaacgcgcaggtgctgaaactcgtgtactgttgatggatgatgactgttcccatggatagtgctagcgcagccccatcctccacgcgggaccttgccgagcgtctccttactaggaataatgaacttgaagaccagcttcgtaagtccgcacaatccaaagtcccatcagatcccaacatatggcttcagatgcgtgacaactttgagaagataattctcatagatcacgacctctctgaacagagagatgtagagtatctcctatggcagttgcattacaaaagaattgaggacttcaggaggaacattagtgcagctagctcacttgcatctcagagtgggaagagcaacactaacccagatcgagtcaagagaattaaatcagccttcaaaagcttcctttcagaagcaactggcttctatcatgacttgatgttaaagatcaaatcaaattggggccttccactcaattactttccagacagccttgacaatgcaaacaactctgtgcgagatgacatgaaaacagttcaattgaagaaagcggcttctagttactacaaggaggcagcttctatctatccttccagtggcaaccctcatcatcagcttgctatactagcttcttactccggcaacgaggtggtggctgtttataggtacttccgaagcttagctgcagacactccttttgccactgcacgggacaacttgattattctttttgaaaagaatcgccaaagctatggacagctgccagacaacagcaaagttcctagcactaagacattacccccacggccatctgggtggggccgaggacggggagaagtaaggtttcaaccaaaagatgttaatgcagaaacagctgaaagggaacgcgagtgcaataatggtgatacattgaagaccttctatataagattcgtcaggctcaatggaattcttttcacgaggaccagtttggaaacattcggggagctgttttcttcagttagcaatgatttgcagattcttctttcttctggtcttgaagaggaccttaatttcggttctgatgctgcagaaaatgcattggctgctgttagacttactgtcatccttatattcacagtgcacaatgtaaataaagagcctgataggcagtcttatgctgaaattgtgcaacgcagagtactgctccaaagtgcgtttacggctgcttttgactttgttggacgaattctcagaaggtgttcagagctccatgatattgcatcaagcttctatctgccagccattttggtctatattgaatggctggcgtcccatccagagttggctgttgattcagagatggaggaaaagcatgcaaatgccaggtctttcttctggagccaatgcatctcatttatgaataagttgatccttaccaaccttgcatctgtgaatgatgatgatgacgaggcttgcttttctaatatgagcatttatgaggagggtgaaactggcaacaggtttgccctttgggaagatcttgaattgagaggttttctgcccttgcttcctgcacataccattttggatttctcaagcaaacacacatttggaagcaccaaggagaagaaagcacgggttcagcgaatttttgctgcaggaaagtcactgcttaactttgttcagattgatcagttgagaatttattttgattcatcatcgaagaagtttgttatggccaagaaccctcctgtttctaaaactaacacccctcttcacgaatctcctgatgcacttaaaacaagtggcactgaaatggattatgaggctgctagaagatttgattcagtttcttctaatatgggcacactgcagtctaaagtgcagttttgtcctgatggtgacgatgatgaagaaattgttttcaagccaacagcttccgaaaagtttccgaaagctccttcagatctgttggttaatggatacactcatcctgtacctatgtctactgctggctggccaaccaatgctagtttagtgcctgttcagagcactggatcaatgactgcaactggttggccacccaatggtgggtcaaatgcttttccaagtactgcatctctatcagctgctggtaattacaacattaaccagtcgcttcccaggtcttccgttggttgggctgtcaatggtgagcaaagtgttattcctagcattgctccaagatttgaactcgtgcagcctgttgaagagcctgtttccagctggacaagcagtggtgcacagcatgttggtactcagcacaagcacacaggtttaactttcccagatgttgtgtctgaaccacttgtatctgcatcaatggttcaacgtttcagtagcactgattattcgaaatttctcagtgaacaagaaatgctcttagtgaatggactgaatactgtcaacttaactggaaatggctatttaaagcagagactgcagcctggattgagtggtttacagtctatggggtattcatctcagacacctattgaacctggtggtaccactgcaaactcgatgcataatcatctgaaaattactggagagaatgtgccctctacacttgattcagttgtaccttcaatagctccattaggtggcatgccaatgaaattcacagaagcgccactaactgcttcaaagaagaaccctgttagtcgtccatcaaagcctgttgggccacctccaggatttgatcatgtagccccaaagcgccaagatgattctattccagttgaaaaactgcagatcccacaggttgatgattacagctggctagatggttatcagcaatcgattgatcatgttcacaacttaagaactgtttattctggtgtcagtgacagcactgcatttgccactccattccccttccctgggaaacaacagttatctgggatgcatgcacaaggggctacaaatgaaaagacatggcaagatttccgtctttttgagccttcaaaacagaacatgctccaaaattaccaccaaagaaatcagcaaaatggtcaaatagctgaacaagagccagcaaattctgtctggtctagcagttaccatgtgtgattcagtaacttgtaccaggatgattgctggagttgctggggactattggattaagtggcacagcctgatctattgagcttggcccgtacctgcagcactctgttaaatttcttttgagcatggtggtctttgaagcatgacaatggctgctcttaggtttgggattgccaccatcttctgggacaaagagggagtggaggatgattgatctgtcggcagtctgatggggatgaattatacgaggtcttcaacgctgacacaaagggttaatgaaacaaactcgaatccagtgattataggcgctccgcacggaccatatgattcatctctcgttggacatgtagctacaagaatggtgtcagtgggcggttgctgccgcaactaaaagtccattcagtgtggatgtcagttgggctacgctatctaagaataaaaagtttgaggaacaacgagcatgttgccaagtagtttcttaagtataagttactgcgtctagttatattgttcctttcctttcggaaacaatgtgtcatgttgctgtcgcgctagttgcaagttgcaattaaacgtttggaacagtttgtcatgttatttgtgtggcttctatatggctatatgtttgctggaactgtatggaccaaccctcggtgctacctacaaaagtctatgatttgactgaatatcttgtatgtttctattatgctcattgattttggaacaatagtcaatttagcctaccccaacttgcaaattggc

SEQ ID NO: 21649 - DNA, 4047 bp, Zea Mays
tctccgtcgccgagggagtccaatcccaacacggcgacgacgacaaacaaacaaggaaatcgcctcctcctcctcctcctcctcttcctctttccctcgctctgccatctgcccccaaattcccctccccactcgctcgcgtcgcgatagcaagcaacgcgcaggtgctgaaactcgtgtactgttgatggatgatgactgttcccatggatagtgctagcgcagccccatcctccacgcgggaccttgccgagcgtctccttactaggaataatgaacttgaagaccagcttcgtaagtccgcacaatccaaagtcccatcagatcccaacatatggcttcagatgcgtgacaactttgagaagataattctcatagatcacgacctctctgaacagagagatgtagagtatctcctatggcagttgcattacaaaagaattgaggacttcaggaggaacattagtgcagctagctcacttgcatctcagagtgggaagagcaacactaacccagatcgagtcaagagaattaaatcagccttcaaaagcttcctttcagaagcaactggcttctatcatgacttgatgttaaagatcaaatcaaattggggccttccactcaattactttccagacagccttgacaatgcaaacaactctgtgcgagatgacatgaaaacagttcaattgaagaaaggtttgatttcatgccatcggtgtctgatatatttgggagatcttgctcgttacaagagtttgaatggtgatggtgattctgctagtcgtgaatacacagcggcttctagttactacaaggaggcagcttctatctatccttccagtggcaaccctcatcatcaggtacttccgaagcttagctgcagacactccttttgccactgcacgggacaacttgattattctttttgaaaagaatcgccaaagctatggacagctgccagacaacagcaaagttcctagcactaagacattacccccacggccatctgggtggggccgaggacggggagaagtaaggtttcaaccaaaagatgttaatgcagaaacagctgaaagggaacgcgagtgcaataatggtgatacattgaagaccttctatataagattcgtcaggctcaatggaattcttttcacgaggaccagtttggaaacattcggggagctgttttcttcagttagcaatgatttgcagattcttctttcttctggtcttgaagaggaccttaatttcggttctgatgctgcagaaaatgcattggctgctgttagacttactgtcatccttatattcacagtgcacaatgtaaataaagagcctgataggcagtcttatgctgaaattgtgcaacgcagagtactgctccaaagtgcgtttacggctgcttttgactttgttggacgaattctcagaaggtgttcagagctccatgatattgcatcaagcttctatctgccagccattttggtctatattgaatggctggcgtcccatccagagttggctgttgattcagagatggaggaaaagcatgcaaatgccaggtctttcttctggagccaatgcatctcatttatgaataagttgatccttaccaaccttgcatctgtgaatgatgatgatgacgaggcttgcttttctaatatgagcatttatgaggagggtgaaactggcaacaggtttgccctttgggaagatcttgaattgagaggttttctgcccttgcttcctgcacataccattttggatttctcaagcaaacacacatttggaagcaccaaggagaagaaagcacgggttcagcgaatttttgctgcaggaaagtcactgcttaactttgttcagattgatcagttgagaatttattttgattcatcatcgaagaagtttgttatggccaagaaccctcctgtttctaaaactaacacccctcttcacgaatctcctgatgcacttaaaacaagtggcactgaaatggattatgaggctgctagaagatttgattcagtttcttctaatatgggcacactgcagtctaaagtgcagttttgtcctgatggtgacgatgatgaagaaattgttttcaagccaacagcttccgaaaagtttccgaaagctccttcagatctgttggttaatggatacactcatcctgtacctatgtctactgctggctggccaaccaatgctagtttagtgcctgttcagagcactggatcaatgactgcaactggttggccacccaatggtgggtcaaatgcttttccaagtactgcatctctatcagctgctggtaattacaacattaaccagtcgcttcccaggtcttccgttggttgggctgtcaatggtgagcaaagtgttattcctagcattgctccaagatttgaactcgtgcagcctgttgaagagcctgtttccagctggacaagcagtggtgcacagcatgttggtactcagcacaagcacacaggtttaactttcccagatgttgtgtctgaaccacttgtatctgcatcaatggttcaacgtttcagtagcactgattattcgaaatttctcagtgaacaagaaatgctcttagtgaatggactgaatactgtcaacttaactggaaatggctatttaaagcagagactgcagcctggattgagtggtttacagtctatggggtattcatctcagacacctattgaacctggtggtaccactgcaaactcgatgcataatcatctgaaaattactggagagaatgtgccctctacacttgattcagttgtaccttcaatagctccattaggtggcatgccaatgaaattcacagaagcgccactaactgcttcaaagaagaaccctgttagtcgtccatcaaagcctgttgggccacctccaggatttgatcatgtagccccaaagcgccaagatgattctattccagttgaaaaactgcagatcccacaggttgatgattacagctggctagatggttatcagcaatcgattgatcatgttcacaacttaagaactgtttattctggtgtcagtgacagcactgcatttgccactccattccccttccctgggaaacaacagttatctgggatgcatgcacaaggggctacaaatgaaaagacatggcaagatttccgtctttttgagccttcaaaacagaacatgctccaaaattaccaccaaagaaatcagcaaaatggtcaaatagctgaacaagagccagcaaattctgtctggtctagcagttaccatgtgtgattcagtaacttgtaccaggatgattgctggagttgctggggactattggattaagtggcacagcctgatctattgagcttggcccgtacctgcagcactctgttaaatttcttttgagcatggtggtctttgaagcatgacaatggctgctcttaggtttgggattgccaccatcttctgggacaaagagggagtggaggatgattgatctgtcggcagtctgatggggatgaattatacgaggtcttcaacgctgacacaaagggttaatgaaacaaactcgaatccagtgattataggcgctccgcacggaccatatgattcatctctcgttggacatgtagctacaagaatggtgtcagtgggcggttgctgccgcaactaaaagtccattcagtgtggatgtcagttgggctacgctatctaagaataaaaagtttgaggaacaacgagcatgttgccaagtagtttcttaagtataagttactgcgtctagttatattgttcctttcctttcggaaacaatgtgtcatgttgctgtcgcgctagttgcaagttgcaattaaacgtttggaacagtttgtcatgttatttgtgtggcttctatatggctatatgtttgctggaactgtatggaccaaccctcggtgctacctacaaaagtctatgatttgactgaatatcttgtatgtttctattatgctcattgattttggaacaatagtcaatttagcctaccccaacttgcaaattggc

SEQ ID NO: 21650 - DNA, 864 bp, Zea Mays
tctccgtcgccgagggagtccaatcccaacacggcgacgacgacaaacaaacaaggaaatcgcctcctcctcctcctcctcctcttcctctttccctcgctctgccatctgcccccaaattcccctccccactcgctcgcgtcgcgatagcaagcaacgcgcaggtgctgaaactcgtgtactgttgatggatgatgactgttcccatggatagtgctagcgcagccccatcctccacgcgggaccttgccgagcgtctccttactaggggattgccaccatcttctgggacaaagagggagtggaggatgattgatctgtcggcagtctgatggggatgaattatacgaggtcttcaacgctgacacaaagggttaatgaaacaaactcgaatccagtgattataggcgctccgcacggaccatatgattcatctctcgttggacatgtagctacaagaatggtgtcagtgggcggttgctgccgcaactaaaagtccattcagtgtggatgtcagttgggctacgctatctaagaataaaaagtttgaggaacaacgagcatgttgccaagtagtttcttaagtataagttactgcgtctagttatattgttcctttcctttcggaaacaatgtgtcatgttgctgtcgcgctagttgcaagttgcaattaaacgtttggaacagtttgtcatgttatttgtgtggcttctatatggctatatgtttgctggaactgtatggaccaaccctcggtgctacctacaaaagtctatgatttgactgaatatcttgtatgtttctattatgctcattgattttggaacaatagtcaatttagcctaccccaacttgcaaattggc

SEQ ID NO: 21651 - DNA, 3957 bp, Zea Mays
gggattagggtttcgtttgctcgggtgctgaaactcgtgtactgttgatggatgatgactgttcccatggatagtgctagcgcagccccatcctccacgcgggaccttgccgagcgtctccttactaggaataatgaacttgaagaccagcttcgtaagtccgcacaatccaaagtcccatcagatcccaacatatggcttcagatgcgtgacaactttgagaagataattctcatagatcacgacctctctgaacagagagatgtagagtatctcctatggcagttgcattacaaaagaattgaggacttcaggaggaacattagtgcagctagctcacttgcatctcagagtgggaagagcaacactaacccagatcgagtcaagagaattaaatcagccttcaaaagcttcctttcagaagcaactggcttctatcatgacttgatgttaaagatcaaatcaaattggggccttccactcaattactttccagacagccttgacaatgcaaacaactctgtgcgagatgacatgaaaacagttcaattgaagaaaggtttgatttcatgccatcggtgtctgatatatttgggagatcttgctcgttacaagagtttgaatggtgatggtgattctgctagtcgtgaatacacagcggcttctagttactacaaggaggcagcttctatctatccttccagtggcaaccctcatcatcagcttgctatactagcttcttactccggcaacgaggtggtggctgtttataggtacttccgaagcttagctgcagacactccttttgccactgcacgggacaacttgattattctttttgaaaagaatcgccaaagctatggacagctgccagacaacagcaaagttcctagcactaagacattacccccacggccatctgggtggggccgaggacggggagaagtaaggtttcaaccaaaagatgttaatgcagaaacagctgaaagggaacgcgagtgcaataatggtgatacattgaagaccttctatataagattcgtcaggctcaatggaattcttttcacgaggaccagtttggaaacattcggggagctgttttcttcagttagcaatgatttgcagattcttctttcttctggtcttgaagaggaccttaatttcggttctgatgctgcagaaaatgcattggctgctgttagacttactgtcatccttatattcacagtgcacaatgtaaataaagagcctgataggcagtcttatgctgaaattgtgcaacgcagagtactgctccaaagtgcgtttacggctgcttttgactttgttggacgaattctcagaaggtgttcagagctccatgatattgcatcaagcttctatctgccagccattttggtctatattgaatggctggcgtcccatccagagttggctgttgattcagagatggaggaaaagcatgcaaatgccaggtctttcttctggagccaatgcatctcatttatgaataagttgatccttaccaaccttgcatctgtgaatgatgatgatgacgaggcttgcttttctaatatgagcatttatgaggagggtgaaactggcaacaggtttgccctttgggaagatcttgaattgagaggttttctgcccttgcttcctgcacataccattttggatttctcaagcaaacacacatttggaagcaccaaggagaagaaagcacgggttcagcgaatttttgctgcaggaaagtcactgcttaactttgttcagattgatcagttgagaatttattttgattcatcatcgaagaagtttgttatggccaagaaccctcctgtttctaaaactaacacccctcttcacgaatctcctgatgcacttaaaacaagtggcactgaaatggattatgaggctgctagaagatttgattcagtttcttctaatatgggcacactgcagtctaaagtgcagttttgtcctgatggtgacgatgatgaagaaattgttttcaagccaacagcttccgaaaagtttccgaaagctccttcagatctgttggttaatggatacactcatcctgtacctatgtctactgctggctggccaaccaatgctagtttagtgcctgttcagagcactggatcaatgactgcaactggttggccacccaatggtgggtcaaatgcttttccaagtactgcatctctatcagctgctggtaattacaacattaaccagtcgcttcccaggtcttccgttggttgggctgtcaatggtgagcaaagtgttattcctagcattgctccaagatttgaactcgtgcagcctgttgaagagcctgtttccagctggacaagcagtggtgcacagcatgttggtactcagcacaagcacacaggtttaactttcccagatgttgtgtctgaaccacttgtatctgcatcaatggttcaacgtttcagtagcactgattattcgaaatttctcagtgaacaagaaatgctcttagtgaatggactgaatactgtcaacttaactggaaatggctatttaaagcagagactgcagcctggattgagtggtttacagtctatggggtattcatctcagacacctattgaacctggtggtaccactgcaaactcgatgcataatcatctgaaaattactggagagaatgtgccctctacacttgattcagttgtaccttcaatagctccattaggtggcatgccaatgaaattcacagaagcgccactaactgcttcaaagaagaaccctgttagtcgtccatcaaagcctgttgggccacctccaggatttgatcatgtagccccaaagcgccaagatgattctattccagttgaaaaactgcagatcccacaggttgatgattacagctggctagatggttatcagcaatcgattgatcatgttcacaacttaagaactgtttattctggtgtcagtgacagcactgcatttgccactccattccccttccctgggaaacaacagttatctgggatgcatgcacaaggggctacaaatgaaaagacatggcaagatttccgtctttttgagccttcaaaacagaacatgctccaaaattaccaccaaagaaatcagcaaaatggtcaaatagctgaacaagagccagcaaattctgtctggtctagcagttaccatgtgtgattcagtaacttgtaccaggatgattgctggagttgctggggactattggattaagtggcacagcctgatctattgagcttggcccgtacctgcagcactctgttaaatttcttttgagcatggtggtctttgaagcatgacaatggctgctcttaggtttgggattgccaccatcttctgggacaaagagggagtggaggatgattgatctgtcggcagtctgatggggatgaattatacgaggtcttcaacgctgacacaaagggttaatgaaacaaactcgaatccagtgattataggcgctccgcacggaccatatgattcatctctcgttggacatgtagctacaagaatggtgtcagtgggcggttgctgccgcaactaaaagtccattcagtgtggatgtcagttgggctacgctatctaagaataaaaagtttgaggaacaacgagcatgttgccaagtagtttcttaagtataagttactgcgtctagttatattgttcctttcctttcggaaacaatgtgtcatgttgctgtcgcgctagttgcaagttgcaattaaacgtttggaacagtttgtcatgttatttgtgtggcttctatatggctatatgtttgctggaactgtatggaccaaccctcggtgctacctacaaaagtctatgatttgactgaatatcttgtatgtttctattatgctcattgattttggaacaatagtcaatttagcctaccccaacttgcaaattggc

SEQ ID NO: 21652 - DNA, 926 bp, Zea Mays
atacgttccctttttacatatctcgacggctcgccacctctcttctctcctcggccctcgccactctcactccgccacgccggagcacgtcgctgcggcgcgcctgcgcccgccacacacgaggggactatggacacggtggctccccgcctgagtcgctcctcgacgcgatacgggcccatcagcagcagtgctgcctccttcagtgggcccgtccggaagtggcgcaaggcctgggtgcccctcaccggtaccggcaccggcaccgccgggtccgggggagggagctcacgaggagacaacaaggtggttctgtttagatggacgccggtgaatggttgctcaggaggagggggaggcaccgacgggggcatggagctcgctgctgcgggggcctccacctgcaggcggcgctacgctgcaggggaggcgcaaagcaccaccaaaaagggcaccagcagcgagctcaacttgaacctcgagctggaagacccagacgacgacactgatgccgacatgagcaccgacgagccacgcgatgtagaagataacagcgcccgtctagaaagccgcttgaagcggaaagcattttagccgctggtcacctagagatgcggatcggcctgaatcgtctgccctagctaggcggattttgtgtaacataatgtagcagcatgtaacttgtatccgccacctcgtcgtccttcgtctgttccagtttagaacaatggcattgtccatgactgttcaagtccaagtgctcatgttatatttcatagctgttggttatgacttgccactttgtcctgtacgaaatattgtcatggactttgttctagtgtgtaatgctacatggcaacgtctcaagcaagatgttataagttgtggtaaagacctagttaaaagtcaaatacatcgtagatgcg

SEQ ID NO: 21653 - DNA, 1176 bp, Zea Mays
aaacactccgtctgttgaatgttgatcccttcaacatttcccctattttaacatttattattattattaaccaatcgaatcaactgcacctcttgaccgcttctactccaccgcctgctgctccgctagtcttcttcaaccttgtgatgcttcagcccccccgcccctggtattgatcgctcagcacaaagcatcgtacttggataggagaaaacaattctagacagtcgtcagagagagagagagagaaaccaaattagagaactgagagatcggggacaaagggggagaggagatgtctcggggcggtagccacggggagctgggccagaggatcgattacgtcttcaaggtggtgctcatcggtgactccgctgtgggcaagtcgcagctgctcgcgcgcttcgcccgcaaccagttcaacctcgactccaaggccaccatcggagtcgagttccagacccgcaccctcaacatcgacgcccgcaacgtcaaggcacagatctgggacaccgcaggccaggaaaggtggcttgaggaactacgtggccatgctgataagaacattgttatcatgcttatgggtaacaaatctgatctgggcacacttcgtgccgtcccaattgaggatgcgaaggagtttgctgagcgcgagaacctcttcttcatggagacctctgcacttgaggctatcaacgttgaaaacgctttcatgactgtactgactgagatttaccggaccgtcagcaagaaaaaccttgttgccaatgaggagcctgattctagcggaaactcgagtttactgaaaggaacaaagattgttgtccctggtcaagagccaccctctacattgaaagcaacatgttgtatgtcctcttaagcatgatattgtaccataataccatgttctttctggtcgtcggggtttctgattacccctgacatatctgcgtgatgaatggctgtgaatcttggaggtaaagatgagaaggtctacaggaacagttaactcatatacgctaactatctggaaacagccttctttttgtatctgattttgtgatatagtacagtcattaagaagccttctcttcaaactcttaaaaaggtttgttccaagtattgtttgcaagaacatgaaccaccgaccttgtttggaccaaaacctaggaaaca

SEQ ID NO: 21654 - DNA, 518 bp, Zea Mays
agctccaccgtctgctgccccagctcccctgccatccccgcacgcacgcccgtcccgaacagctagggtttcagcgcccaccacctacacattctccagttccttctcctaattaactccgcaaagcgccggagacgaaactctagccctgtatcgccaacgtgcgcacgcgtgggccgggaggaatctcgcaggattcgccgcgcctccccgtgaatagtggtggaagagggagtggaactgaaattggaaaccactcagtcaagggtaaggctcagggaggggaccgagggtggccgcgagagagggtgaaaaggagagagatggtggaagcgagagacggaggtcggcggcggcgaagcggcggcgtgggtacggcctcctctctctctctctctcgcttctgcgatcgatgagttcaggaccggcggagggtgcgagtgcgccctagtcgacgggcccacgcggaaccggaggcctgggctagtagcctaagggcatgtacaatgagtatctta

SEQ ID NO: 21655 - DNA, 491 bp, Zea Mays
tatgaaaataagagcttccgttcgtaaaatttgtacaaaatgtcgactgattcgcaggcgtgggcgaattagagtcatttgttccaatccgaagcataaacaaagacaggggtaatctttcgaaaaagaagcttttctttctaatagcttttctttctaattaaagtaaaaagtacccacggaaatgcccaaattgcaaataaaaaaatgaaagtaaaggatatattttaacctgaaacggatatctttgtatcttttttctttttgttatttctaactcatatttatgagataataaaatatgacaaaagctataccaaaaataggttcacgtaagaaagtgcgtattggtttgcgtaggaatgcccgttttagtttacggaagagtgcacgtagaataacaaaagggattattcatgttcaagctagtttcaacaataccattataaccgttacagacccacaaggtcgggtcgttttctggtcctccg

SEQ ID NO: 21656 - DNA, 1755 bp, Zea Mays
atgagaaatggtgggagtctccctttgctaaaatcactggacatgtctttcaatcaaataaacaccctgcccgaagagattggcctggctactactttagtcaaggattcccctggcactgctgatccctgcaaagttgccttcctacgtaaaggcgacagtgttgttattacccagttctacacaaaattagaggagaaacataaagctttagaagtagagaaggacgaggctgaggccaggaaaaaggaagaccatgacgttgctttaaaacaactaaggaagtcgttggtgattagagcaaaacccatgccatgcttctatcaagaagggccgctaccaaatgctgaactgaagaaggaagagcatgacgttgctttaaaacaactaaggaagtcgttggtgattagagcaaaacccatgccaagcttctatcaagaagggccgctaccaaatgctgaactgaagaaggtggttcaagtcagaacagtccaaaaaattccagtggccactctttcatcatcaaaatttttgactggtaagcctggggacacagatgctgaagcgaagttgaaccctggggtgtctaccttgtcaaattcacaacacgtgcatttaaacagaatcaggtatttcttgttctgttcattatatatctattattcacatatgaaaaatcttaaggtggttcaagtcagaacagtccaaaaaattccagtggccactctttcatcatcaaaatttttgactggtaagcctggggacacagatgctggagcgaagttgaaccctggggtgtctaccttgtcaaattcacaacacgtgcaaccaacaaatgttactaccaatttgaaggaccagccctgcaaatcaactggtgggactggtcctaaactgctgactgtaaaataggataaaaccagcagttgaagccaatcaccgaataacaggcagtcaatatccagtgaggcatcgaaggatgcaagaagttcaactgatgcttcttgtggtgctagtaaaactaaaatttgctggcagaataacctatggcaaggtcaagctttgcagacatcgagaacactaagaagaagattaagaccagaggtctgtaggcgagcaaacctggatgcgcggagggatgtcagaagacctcgccgaacgccatcagcggcaaagcgagggagccgtaaggacggtgtttggcgagaacctcgaaagaaagagagcaggactgaggacgacggtagatgtggtctctaaaaagcgaggagaggacgggcgtgtaggagaagcacttagtaaaatgggagaagtactgaccaagaacacggacgacgcccatgccgcggctctgttgaactgtggacgacgtgcgcagctgtgaggcgacggtatcgacgggccgcatcctctactcgctgcagctgcgcgtgggtccacgcggagccgctccccaccacagcagcggtagtttaatctgcgcagtgggtgaagacagcggtactcccgtgcgtcccccgacggcactgtgaacgaagcagagggggccccatctacagaccgcgaccaccggcctcaccggagggatggccacgcccatgctccgcgcgacgagacaactctgccactggtcagatccgaaggcggagcgcagacgcggggcgacgggttgctcgctgcagctacaagtgggtctgcgcggagcggagcccaccgcagctcgcgacggtcggcctcaccggaggggcggcgacg

SEQ ID NO: 21657 - DNA, 9833 bp, Zea Mays
cccaattcctctgtatccctctcttcctcttctccagtttgtgtgcgtatccctgttagcagactggttgctaacaactggtatcaaaggtcccacgatcgctgagcctggagccagtgcaccactacacgagaggagcacggatggcaggggtggcggatccgagcatcgccaccgcgttggaagaacagtccaagtcgttgaaagctcaggccaaatcgctcgactccacccaaaaaatcctgcagcgcatctgcgaccgcttcgacgccaggatgcgcgctaccgcgtcctggaagcatccgtggccagccaggcggcggatctggcggcactccgcgccggggaaggcgacgccgtgtccaacctgcgggcggatctggagcatcaagtggcgtcgcgggtgacggagatcgagtcctccgtgtgggaccgcgtcgacgccatcgccgcggacgccagcacccgggtggcggcgctggagaacgtccacgcggtgttcgaaagctggcggcccaggatcgagaactccgttgactcgttgcgcgccgaactctccaaggtcgccaagctgctcgagcgcggggcgatgacggagtcagaagcctcgccgggcatccttggtgtccatcaagcggcggcggggcgccagccggcatccgcgacgaacgccgcaggccctaatgggcaccgcgctgcacaaccggcacgggaggtgggtgttgggtatgtctacgcccatacccaacaccaactcccggacaatggtacgcccagtgatccctacgcccagttcattccacatactcatgcgcttggggaaaacagggtccataatcactacactccttaccacaccgagggtactgttggtgaccatttacccactccttcctccctgggtcacctgcccaagctcaacttccctccattcgacggagacaaccccaaattatggcaggctaggtgtgtcgactacttttacatgtatgctgtccaccctagtgtatggattactgtttctaccatgaccttttctggccccgcagcgcggtggttacaatctgttaaacccacactgttctctatgtcttgggagcagttctgtcaacttcttctggaccgctttggcaaacaagagcacgaaattcttatccgtaggttattccacatcaagcaaaccaccactgtcactgcatacattgatcagtttgcccaattgctagaccaactccgtgcctatcagactatcacagacccctatattatactatgaaatttcttgatggcttgaaagatgacattaagtctgttgtaatgattcaacgccccaaagatttggatactgccttcgttctcgctcaattgcaggaggaggtgggggatacgaccaagaagaaggagttacgcaagtgggatctgtcttcgccatttagaccttattccaagggccccatgcccctgccactgccaccaaacaagctatcgtcgtcaccagcagctgtcaatgataagttggggctggttcctgccaagcagcattcaacaactgacgaacgattgtccaacctgtatgcttatcgcaaggctcagggactctgttacaaatgtgggttgtcttattccagaggtcacaagtgcccagatgttgtgcaactacatttggtcgaggaactgtggcaacagttggatctgggtgactccgatgatcaacaggtcgctgacgaagctgagctccacaaccttctgctttctcagtctgctgcaggcctaaaagtctcttccaagacgatgaagttcagaggttctatacagggtctggaattattaatcctactggattcaggcagttcacatacctttctgagtgcttcagtggcagcccaacttatgggttgctcgccggtcgatgtcccaatgccggtacaggtggccaatggtcataacttgctctgttcttctgaattacgggagacagtatggttcctcaacgagtatcagttccagtctacactgaaaattttaccactgaccacgtacgatatggtggtcgacatggattggttggagttgcatagtcctatgtctgttcactggttggataagtggcttactattccctaccgagggtccataatcaagctcttgggacttcaagcaagttcatcacagtgtgctgtcatggagctttgccacattgccactctaccagacaaagacaatcagctcgttcaagatttacctgaagcattgcaacaccttattgctcgtttctcccatgtgtttgctctgctgcaaggacttccacccgcaagagactgtgatcaccacattcctcttctgccaggcgtccgacctgtacaaatcagaccataccgatacgccccagccctcaaaactgaaatagaaaaacaggtagctgagatgctccaatctggtattattgaacgcagcaaaagtgatttttccagctcagtgatcctagtgaggaagaaggataacacataccggttctgcgtcgattacaggcaccttaatgctatcacggcaaagacaaaattcccagttcccatcatagatgaatttctggatgaattgcatggggcagcgtggttctccaccttagacctccgagccggtttccaccaaattcggcttgccccggaagaccaacacaagtcagcgttccaaacccatcatggacactttgagttcagggtgatggcctttggtctgtctggagctccagctaccttccaaggcgcaatgaaccgaaccttgggtccactactgcgttcatgtgtgcttgtgttcttcgacgacatcctcgtatatagtcctacttgggaggatcatcttcaccacctggaacaagtcctgcagttgttgtccacagaccagtggcaagtgaagctctccaagtgttcattcgccaagcaacaaatccattatttgggccacgtcatatccaacaggggtgtggccaccgacccctctaaggttgctgctgtcaccacttggccccaacccactgattgcaaacaattacgcggcttcctgggacttgctggttactaccgtaagtttgtacgacattttggagtcatcgccaaaacacttaccggccttctcaagaagaacacgccgtttgtctggacgggagaacacgagcaatcctttcaggcactgaaaactgctttgtccacggcaccggttctcgctctcccagatttttccaaacagtttgctatcgagactgacgcttctggcaagggcataggtgcagttcttacacaggaaggacatcctcttgcgttcgtcagtaaggcactcagcaccaagactcaaggcctctcaacttacgaaaaggaataccttgcagttctattggcagtgaaccagtggagaccttatcttcaacactcggaattcattattttctcggaccaacgcagtctatcgcacctgtccgaacaacggctccataccccttggcagcagcgcgtcttcaccaagctgctcggtcttcagtacagaattgtgtacaaaaaaggggtagataacggtgcagcagatgcattgtctcgccgcccccaagaaggtctcgaagtattccatgtgtcggctgctagtccacaatggctgtccaaggtggttcagggttacagtcaggacaacaaggcccagtctttgctaactgaattgtcactccacccaacgactgagggaccctactcgctgcatcaaggattgatccgctacaagggtcgtgtctggctgggcaacaatttgtctctccagcagcaggccctgtctgccctccacgatagtgctctaggcggtcattcaggttttccggtcacatatcgccgcgtcaagcagttgttttcctggcctggtctcaagaaaacagtaaaggactatgtgacctcatgctccatttgccagcaggccaagtcagatagagccaagtatcctggccttctccaacccttaccagtaccggaacacgcctggcaggtagtttccttggatttcattgagggtcttccgcgttctggtaatgctgattgtattctagcggtggtggataccttcagtaaatatgcccactttattggcttgctccatccgttcacagctcttaaagtggcacaaatcttcatcgctcacgtgtacaaattgcacgggttgcccaaggcgcttgtgtcagacagagaaaggatttttacaagtactctctggcaggaactgtttcgcctttcagacacacaactccaaatgagcacagcatatcatcctcaaagtgatggacaaaccgagagggtcaaccaatgtcttgaaacatttctccgcagttttgttcattcctgtccgaacaagtggagcgcctggttaccacaggctgaattctgatgcgatcaccagctctgacctgtccgaatggctgtctcaacgcgaggtaatcctacgcgtcatcaagcacaacctgttgagggccaagcaacgcatgaaacatcaagctgacaagggccgttcagagcgagaatttgcagtgggcgacctcgtgttcgtcaagctacagccgtatgtgcaaggatcggttgcgcctcgtgcttgccataaactcagcttcaagttctttggtccctttgagatcctgcagcgtgtgggtccagtcgcttataagctgaagctcccagaagattcaaatattcatcctgtattccatgtttctcaattgaaaaagtacatcagtccttcaacaccagttagtgctcatgtccctacaacagacctgactctgcaatttccagcgcagattctagaccgtcgctctgtctctagagggggatcttcagtggcacaggtgctggtccgttggtctggcatggacacatctatggcgtcctgggaagatgaagccccgatgaggatgaagtttccggccgcggccgcttgggggcaagcgccgttttaaggaggggggatgtcagcccccgtactcaggataccagtgagcacgagcaagacatgcagaaggggcgagcgccaaggaagatgggccgccgcgccaggaggcccagcgttcgctttgccggcccagagtggcgtagttaactgtaacgttcttatatgctgtaaggggagagagttagacttgtcatgtaagaaacatctatctgaataccctaatctatctcgggggaaggttcccaattcctccgtatccctctcttcctcttctccagttcgtgtgcgtatccctgttagcagactggttgctaacagaccccaacacccagaaccctcctccactcagcttgccaggcgcgatgaaatcgcaacaaccaccgtcgtcttcctcctgtgaagtcgcatgcatcaatggaatttgttggtgaagatcgcgcctgcaactatctgaccgagaatctcgggcctgggaagggataaataaaccggccgcccccttgctctgccacctaaacgcggcgccgtcagccatgcctctctgctctggctctagctctctggcagtactccctctcctcatcacctgtagcagatcgcgtgagggtacacctgaagctcctgtgcataccatcccctcccgctgtgacgctcgcccctcctgtgttcggtacttggccatcgggtccgctgagtgccgctgccgtcgaagttcatcgtcgccgccgttttggctctcggtgtgtggcacgcgatcctcaccatcgcgtgtgggttcctctcggcgtgtggctattgcgggtcgcctgggcacgccaggcatgagcacggtctcacctttggagatcgaagtcattggagctggggaatttctcctaggggtgttcgtgatgtggagccgtcgcgcgggcggagtgcttccctactgctttaaatctccggtaataatgcctctctcgagttatgcattgcctgcgcctagtttttctcgcccagtagtgaccgatggggagctcggcctcgatgggtgtttctcgtcgatgccgccgtcgtggtctgcgtggccaccagtcccgcgccgccgtctggtggggttgtgaggtagaagaaggctgctagccgtcggatctgtgatctgcgatggagatgggtgtgtgccgatgcgtgcttggcgacgtggatccggtattgggcggtccagattagaagtagaaaaactcttcgggctgatggattcgcgtccgtagatgggagatcgtgcgtccaccagtgcacctcccattcgcatagcagggttataatcctgatcgttagattctaatctgacggacagacatcctagataccccttcggtcggattctttcgcatttaagtccctgtaaaacatggaaaccaacccgcaatcctatcagtgggattctgagtcttagaacgttttgcgcagtggaccctgaactttctaattatagcagcgcagtccggtcagagaataaactatggaaattcgtttagaaaatgactattagtgcaaaattaattctataaacttatttaattcctagaatattcatattaagtccaaatcgatccattccagtttctgtaattttgtaatcttattgttaatcacctagtaccactgttttcacatgaaagtcaaattaaaaatttatatcttatttaatcttatacaaaacacataaaatcattagaaattcataacttgaaatctatgattatgatttgatccattcaagccgcattagtctcgtacaagtatttactacgcagtaacaacatttattataccatgtctcattcttttataactagacttttatttaacttatgttggttagtctcgttaaactgcttatcattataatatactagaatatgatctatggtcaattcataacttagattaaagttgaggtaattatttatagaataatctctcatataatttatattaaccaattgataatatagtttaatattttaatcacacagatcttctataagatcataaccctttaattgtaactccgatcttagtagttcttgatcccacgatctcgtagtgacgcgtagatcgttattatgcagtatgttcttatgcttgatgtgatgttaattttgtctatatcctgtttgtttgtaactttgtattgctacgactagcgtgaggtcacgaggatctgaagaatcatcctagtaactggaagtctgtaatctcaagtgtcaggcaagttgtgcccttgatccacttttgttacccagtaatattctttattatcaccattcaatgcataggtttaattttgatgagactcaatatgtcaccctagtctgtttatcctttttaccttgttacccctgaatcaattgggtagtttttgctattgctttatatgattttgggattaatatttcattatattcatgttccaattattttgttatgttatttatgttcatgtcaagatcattaattttaattggaacatggagcttaacttgagaaacacgtgacaccacaagggtggaatgggacgcccttggtagactaattaggaaagctagtggaagactaccttacccgaaaggggcaagagcagtaggggagttgcatgcaaggaggttctcgggttgattttgctgcgatggtgtcacacccgggtttcgggggcactaagacccgggcgtgaacataatcaccaggtgtgctgggaccaagtctcacacatatgatgaatcatggcataggatcgaatgtcacatcattactatataatcggagttttgtacaaaataaataaataattacattatatggagacaacggtccagcaacccaaagttgactgggagacgacggcctagacctctcacgaactcgtcacagcatcctccaagcgcctcatcctgcggtacctgttcttgacttgtgggggggtgtgagacagcaagagtgagctcacatacgttcatcgctcaacaagttgtggggaataatgtgcatgaactcgccaaaggtgggagctcatgtgaagtgtaaggcttaccaaagaggatgattagagctgagcattgcttttaaggttggtcaaaattttattagcagttactaagtataagtaaacaccaacccaattaagtagtagaacaaaagtaacaacatcacctgcgatgcaatgcatatgacaaattgaatttagtttcataaattaatcatcagagagtcctgagctgctcatgaccgtgagctcggctagtataccagttttacactctgcagaggttgtaccctttacccacaagtcgtgtatcccatgtcgccagggttagctagacccttagacactaccgagctgaatggctagggatccactacgaggcctttacaaagttccactagcttccgaaaacccgctacagtttatgggaagagcacttgcaagaatcccccgtctgaccgccatcgcagcaaaatcaacccgagaacctccttgcatgcaatcccctactgcccttgcccctttcaggtaaggtagtcttccactagctttcctagttagttggccaagggcgtccattaaacccttgtggtggcacgtgtttctcaagttaagctccatgttccaattaacatttaatgatcttgacatgaacataaataaaataacaacataattggaacatatatataatgaaatattatcccaaaaccatgtaaagaaatagcaaaactacccaagtgattcagggataacaaggtaaagagataaacaatctagggtgacctatcgggtcccatcaaaattaaacctatgcatggtagatgattataaagaacattattgggtaacaaaagtggtcaagggcacaacttgccttcaatgagctcctgctcagctacttctatctgctggtcaccaggatcctcagtcacatgctcttctactcgcatcaatacaaaatacatagtatatagagaaaatttaacatcacaccaaatatgtaaacaaattacataataaaaatctacacattaaaataaaaccctaggaataagaatcataatttttggagttatagattttaaattatgaatttccaaaggttttatgtgcttaatatatgattgagtgagaaattagttttactaatgttttcatgtaaaaacagaggctctaagtgataaacaataatattacaaaattttaggaactggaatggatcgatttgaagttcatttgaattttctatgaattatacaaattctatgattttttatattaaaactcattttctaattcattttcctgattttataactctctggatggggcctcaaattccagaaagcgcaggggctcaagcgtaaaagaaaccgagacacagagtgttgtacagggtggactgcgggttcattagtggttttcccagggacccttatgcaaaagaggccagcgaagggatatcatgaagtcctggccgctcgatccgcaacggacgtgcccgattagatccagacgcgcaacacacccgcgcatgcccctggccgtccgatccagaatccacggccttggtttaatgaatcgaaggggtacgccaagattcgatccaggccgtccatctaatatctacggctcccacactctcaaccatccatctaatcgtcaccgttgaagacgagatcaacgatccaccggccttcttcaacccctggctgcccaggcacagatgtcgcgtcctctcccgcgttctctctctcccgttgatccaccgacgctggccaagacccgatagaggtacccggcggctcgccagcccctaggaccgccccgtgac

SEQ ID NO: 21658 - DNA, 3313 bp, Zea Mays
cacgagaggagcacggatggcaggggtggcggatccgagcatcgccaccgcgttggaagaacagtccaagtcgttgaaagctcaggccaaatcgctcgactccacccaaaaaatcctgcagcgcatctgcgaccgcttcgacgccaggatgcgcgctaccgcgtcctggaagcatccgtggccagccaggcggcggatctggcggcactccgcgccggggaaggcgacgccgtgtccaacctgcgggcggatctggagcatcaagtggcgtcgcgggtgacggagatcgagtcctccgtgtgggaccgcgtcgacgccatcgccgcggacgccagcacccgggtggcggcgctggagaacgtccacgcggtgttcgaaagctggcggcccaggatcgagaactccgttgactcgttgcgcgccgaactctccaaggtcgccaagctgctcgagcgcggggcgatgacggagtcagaagcctcgccgggcatccttggtgtccatcaagcggcggcggggcgccagccggcatccgcgacgaacgccgcaggccctaatgggcaccgcgctgcacaaccggcacgggaggtgggtgttgggtatgtctacgcccatacccaacaccaactcccggacaatgcgtgaggtcacgaggatctgaagaatcatcctagtaactggaagtctgtaatctcaagtgtcaggcaagttgtgcccttgatccacttttgttacccagtaatattctttattatcaccattcaatgcataggtttaattttgatgagactcaatatgtcaccctagtctgtttatcctttttaccttgttacccctgaatcaattgggtagtttttgctattgctttatatgattttgggattaatatttcattatattcatgttccaattattttgttatgttatttatgttcatgtcaagatcattaattttaattggaacatggagcttaacttgagaaacacgtgacaccacaagggtggaatgggacgcccttggtagactaattaggaaagctagtggaagactaccttacccgaaaggggcaagagcagtaggggagttgcatgcaaggaggttctcgggttgattttgctgcgatggtgtcacacccgggtttcgggggcactaagacccgggcgtgaacataatcaccaggtgtgctgggaccaagtctcacacatatgatgaatcatggcataggatcgaatgtcacatcattactatataatcggagttttgtacaaaataaataaataattacattatatggagacaacggtccagcaacccaaagttgactgggagacgacggcctagacctctcacgaactcgtcacagcatcctccaagcgcctcatcctgcggtacctgttcttgacttgtgggggggtgtgagacagcaagagtgagctcacatacgttcatcgctcaacaagttgtggggaataatgtgcatgaactcgccaaaggtgggagctcatgtgaagtgtaaggcttaccaaagaggatgattagagctgagcattgcttttaaggttggtcaaaattttattagcagttactaagtataagtaaacaccaacccaattaagtagtagaacaaaagtaacaacatcacctgcgatgcaatgcatatgacaaattgaatttagtttcataaattaatcatcagagagtcctgagctgctcatgaccgtgagctcggctagtataccagttttacactctgcagaggttgtaccctttacccacaagtcgtgtatcccatgtcgccagggttagctagacccttagacactaccgagctgaatggctagggatccactacgaggcctttacaaagttccactagcttccgaaaacccgctacagtttatgggaagagcacttgcaagaatcccccgtctgaccgccatcgcagcaaaatcaacccgagaacctccttgcatgcaatcccctactgcccttgcccctttcaggtaaggtagtcttccactagctttcctagttagttggccaagggcgtccattaaacccttgtggtggcacgtgtttctcaagttaagctccatgttccaattaacatttaatgatcttgacatgaacataaataaaataacaacataattggaacatatatataatgaaatattatcccaaaaccatgtaaagaaatagcaaaactacccaagtgattcagggataacaaggtaaagagataaacaatctagggtgacctatcgggtcccatcaaaattaaacctatgcatggtagatgattataaagaacattattgggtaacaaaagtggtcaagggcacaacttgccttcaatgagctcctgctcagctacttctatctgctggtcaccaggatcctcagtcacatgctcttctactcgcatcaatacaaaatacatagtatatagagaaaatttaacatcacaccaaatatgtaaacaaattacataataaaaatctacacattaaaataaaaccctaggaataagaatcataatttttggagttatagattttaaattatgaatttccaaaggttttatgtgcttaatatatgattgagtgagaaattagttttactaatgttttcatgtaaaaacagaggctctaagtgataaacaataatattacaaaattttaggaactggaatggatcgatttgaagttcatttgaattttctatgaattatacaaattctatgattttttatattaaaactcattttctaattcattttcctgattttataactctctggatggggcctcaaattccagaaagcgcaggggctcaagcgtaaaagaaaccgagacacagagtgttgtacagggtggactgcgggttcattagtggttttcccagggacccttatgcaaaagaggccagcgaagggatatcatgaagtcctggccgctcgatccgcaacggacgtgcccgattagatccagacgcgcaacacacccgcgcatgcccctggccgtccgatccagaatccacggccttggtttaatgaatcgaaggggtacgccaagattcgatccaggccgtccatctaatatctacggctcccacactctcaaccatccatctaatcgtcaccgttgaagacgagatcaacgatccaccggccttcttcaacccctggctgcccaggcacagatgtcgcgtcctctcccgcgttctctctctcccgttgatccaccgacgctggccaagacccgatagaggtacccggcggctcgccagcccctaggaccgccccgtgac

SEQ ID NO: 21659 - DNA, 467 bp, Zea Mays
tactgtcaactgaccagggaaaagcgcaaggttttattgcaaccgtgcagtctgtagctatattgttggcaccactatttatgagtccactgacctcttacttcatttcagaggaagcgcccttcgactgcaaaggtttcagctttattgtggcgagtttcttcttggaatgaaggacaagggcacaaaagctgccgtttcagacagcgctgatgaggaagcagcgcaagcaccactactggcaaaatggaccagaccatgactccagctccaggaaactgagctataaagctcagctggagtgtgcgtaaaattgtaggatatgtgaattagagtgccaacaacatagggcttgcttgtacctgtagtatagtgtctgtacatacctcagaacgagaaagccgataaagctcggtgttttgtgccatccagccttcactgtttcaggcaaatggatctttatgtta

SEQ ID NO: 21660 - DNA, 1428 bp, Zea Mays
ctccctaccccgatcccaaatcgatgcccagacaccaacccgtcccaccgacgctgcgaagctggaggaaggggagcatgagctaagcatcgtcgacatgctcctcgaggtgttgtcgggccgctgcgagctgcgacgaacctccttcggctcttggcgcctgtaccggcgctttagcttcacctccatgggggcgccgccacggggaagacgcgtgcgctcctcctcgctctccaccaagtgataaattttctcaaatttgttttcaaatgtatctatagatttgttttttccctgagggttagagtattctaggttgtgaatatggtggaatttcttgattaatgtcttggcatggggattcagttgcctgggtaccagatatagcgatgagcgaaatttaaggcgtgaatcccaggtagcagattcacaggaaacttttggggccttgatatcgattccctaatgtttgttgggattgctttcattggatttttctttgttggatcagtcactaccttggcgtatctaggccctagagaatcgattttgcaggttacatctgatttgactcaagatttcttcatggcttttcagtcctagacacagcaacccctgtacttttcttgaactaagtttggaaggtattctacaaaagtagtaagaggattaggttccttaataccttcagattcatgcaccgcactcatatttcatgttcgagagtggaaactgctcctttggctggtcttggaacatattctaacaaaaatgttcctacattgtatgaggttatatatgctgggctgctggcaacctttcaggttatgttattcctttcatacttctgttatagtattcattagaacaacagtcactcaaaatcattacttcattttcatttatcatttgttactctgatctcatatgggctgccttcttggaaataatgcgggtgagtttcaggcctcattggaatctattcagaattaactagcagatgagttgtcaaaactgacagaacaagtaacttctgacaatcggagtattgcatctttatctatatgtatgcacattgggttgaaattctatgcagtgtcaaaaggtgttgctaacacagctgagagacgattcaggcatgtgaagctccatagcaaccctaaaaacccatatagcggaagcatcacaatgttgttggcaggtttcatccatcaaaactgtacacagtttacaagattacattttcattacaagatgcttgattacaaccaatattttcatttctttggtgcttgtgtagaagtatcgccttgcaaagtatataccaaactctcatgctgaaggtttcaaggacgacaagaaagttcgagtgattccctctcgaacatggattatgtaccaggattgcaaatcaatgaggcactaaag

SEQ ID NO: 21661 - DNA, 2700 bp, Zea Mays
gtttcctcgtctctttcttctattttccacgctgttccgttgctgtctgcctccagcctcctgccgttacgagcgcgtcagggtttttccttggccagccggcggcggccgttgcacctcctccatccacccctagtcgaaggtcgccagttcattcatccaggctgctgcgcccgagtccctggccaccgtcgctgggcacctgccgtcctcggaagtcgcaaccggaggtgggatttattaaatttctgagatggcagaatgtcggatacaagactggaagcgcgcttcaactccagagtcagtttctagacatgaaacatcaataccaagaacaaagcaaagaaacatttttagtctattagctcagcgggagctctcacctcgaacaaaaaaccaagcaaaaaatctttggaccaaacctccaagacttgatgcttgtcctattgaatcgaaattttggggcacctatgctcagcatgatctcctttcttgggctgaagcagagttcttgcattggtggattcccaaatattgccctctcacgccttcttcgaaggcaactattgcagctgcatttagtacagatgggagagtacttgcatctacacagtagtggtgaccatactgtcaaaataattgattggcaaactgggaaatgcttgaatgtactgcttggacatcaccgcactccatgggtggttagattccatcctcagcgttctgatattcttgctagtggaagtttggattgtgaagttcgtctctgggatgctaaaacatctcgctgcacagcagaactggtcttctgtaattatccttgacaagccaattgtcatgatcactttttctctatttctaaagcaacacactttaattttttattaacatttcttccacagataggccagttgcatcaattgcatttcatgcaactggggagcttctggcagttgcatcaggtcacaaattgtttttatgggactgcaataaacgatgggaaactttggaacttccaatcatactagaaacccgccgttcactgagagctgtgcagtttcacccccatggtgccccatatctacttacaggagaggttcacaaccttgattctgaagattcaacgatgacccctgcacttctgagcaattattccttcagagacacacctctccttggtggttctggggtagataacttgattagtgaactacaatacatgcagaattttgagcagtgttgggaggccccttctgggtactcatgctgctgaagctcctgccatctcattaagtgtcgggtcagaacaaactacgtctctgcttggtggtggcaccgaattaccttgtacggtgaagctaagaatatggcgccacgaaatgaagaatccatttatcacattagggcctgaggcatgcctcttgacaattcctcatgctgtactttgcagcgaaatgggtacccatgtttcaccctgtgggcgatttttggttgcttgtgttgcatgtgtgctgccacacagttatggtggccatggaagtcagttgcatgaacattatgactctactggggctggaacatcaccaactcgccaagcatttccgtctcgccaaattatatatgagcttcgggtttattctcttgaggacgcaacatttggaacagttcttgcaactagagcaataaaggctgctcactgtttaacttccatccagttttcacccacatcagaacacatactattggcatatggtcggcaacatagttcactgttgaggaccattttgatcaatggggagaccagagttcctgtgtacacagtcttggaggtgtatcgagtttcagacatggagcttgtaagagttcttcctagtgtaggagaggaagtcaatgttgcatgttttcatccttcccctggatcaggtcttgtttatgggactaagcaagggaaggttaggtttcttcggcaccatggtgcatcattcacttgctggggagaacgttcatgagatttagaggcatgtgctacaaatgcagttctggacataataactgaatttgagcatcgcattcttgtgctgctgaatcttatcttgattatggcttcggcaacatcctggaagaggaatttatggtcaactgagatcatctccaagaccgagagggctaacagaaaacatcagatttcagcatccaattactcttgactaacgttccactctttgcaaaaccattgtgccggcaaggagggctactattttaggtccggttaacgtgtgtaagtagccccgtctatgagaaaatggacaaggaatcgcagcctcattcagcatgaattaccaacgatggttgactactactagtacaaggagacctcaagggatacggtcgcctgtacgaatatggatgcgagccatatactgacggccggcctcccaaagatgcgatgtgttccttagttcgatgattttttttttgaaactgtatagaagcctgcgaagaaatgtagtggttggctgagtgaagtgagggaagggataggcattatttcccttgggtgacattgaccctgtttggatcagattctagccgcgagaatctgattttcgtaataaaaaaatcgaaatcgaagtggtttacggtctatttgttttggccgaataattctttccatttggcattaaatcgccaaaaaccaag

SEQ ID NO: 21662 - DNA, 2604 bp, Zea Mays
gtttcctcgtctctttcttctattttccacgctgttccgttgctgtctgcctccagcctcctgccgttacgagcgcgtcagggtttttccttggccagccggcggcggccgttgcacctcctccatccacccctagtcgaaggtcgccagttcattcatccaggctgctgcgcccgagtccctggccaccgtcgctgggcacctgccgtcctcggaagtcgcaaccggaggtgggatttattaaatttctgagatggcagaatgtcggatacaagactggaagcgcgcttcaactccagagtcagtttctagacatgaaacatcaataccaagaacaaagcaaagaaacatttttagtctattagctcagcgggagctctcacctcgaacaaaaaaccaagcaaaaaatctttggaccaaacctccaagacttgatgcttgtcctattgaatcgaaattttggggcacctatgctcagcatgatctcctttcttgggctgaagcagagttcttgcattggtggattcccaaatattgccctctcacgccttcttcgaaggcaactattgcagctgcatttagtacagatgggagagtacttgcatctacacatggtgaccatactgtcaaaataattgattggcaaactgggaaatgcttgaatgtactgcttggacatcaccgcactccatgggtggttagattccatcctcagcgttctgatattcttgctagtggaagtttggattgtgaagttcgtctctgggatgctaaaacatctcgctgcacagcagaactggtcttctataggccagttgcatcaattgcatttcatgcaactggggagcttctggcagttgcatcaggtcacaaattgtttttatgggactgcaataaacgatgggaaactttggaacttccaatcatactagaaacccgccgttcactgagagctgtgcagtttcacccccatggtgccccatatctacttacaggagaggttcacaaccttgattctgaagattcaacgatgacccctgcacttctgagcaattattccttcagagacacacctctccttggtggttctggggtagataacttgattagtgaactacaatacatgcagaattttgagcagtgttgggaggccccttctgggtactcatgctgctgaagctcctgccatctcattaagtgtcgggtcagaacaaactacgtctctgcttggtggtggcaccgaattaccttgtacggtgaagctaagaatatggcgccacgaaatgaagaatccatttatcacattagggcctgaggcatgcctcttgacaattcctcatgctgtactttgcagcgaaatgggtacccatgtttcaccctgtgggcgatttttggttgcttgtgttgcatgtgtgctgccacacagttatggtggccatggaagtcagttgcatgaacattatgactctactggggctggaacatcaccaactcgccaagcatttccgtctcgccaaattatatatgagcttcgggtttattctcttgaggacgcaacatttggaacagttcttgcaactagagcaataaaggctgctcactgtttaacttccatccagttttcacccacatcagaacacatactattggcatatggtcggcaacatagttcactgttgaggaccattttgatcaatggggagaccagagttcctgtgtacacagtcttggaggtgtatcgagtttcagacatggagcttgtaagagttcttcctagtgtaggagaggaagtcaatgttgcatgttttcatccttcccctggatcaggtcttgtttatgggactaagcaagggaaggttaggtttcttcggcaccatggtgcatcattcacttgctggggagaacgttcatgagatttagaggcatgtgctacaaatgcagttctggacataataactgaatttgagcatcgcattcttgtgctgctgaatcttatcttgattatggcttcggcaacatcctggaagaggaatttatggtcaactgagatcatctccaagaccgagagggctaacagaaaacatcagatttcagcatccaattactcttgactaacgttccactctttgcaaaaccattgtgccggcaaggagggctactattttaggtccggttaacgtgtgtaagtagccccgtctatgagaaaatggacaaggaatcgcagcctcattcagcatgaattaccaacgatggttgactactactagtacaaggagacctcaagggatacggtcgcctgtacgaatatggatgcgagccatatactgacggccggcctcccaaagatgcgatgtgttccttagttcgatgattttttttttgaaactgtatagaagcctgcgaagaaatgtagtggttggctgagtgaagtgagggaagggataggcattatttcccttgggtgacattgaccctgtttggatcagattctagccgcgagaatctgattttcgtaataaaaaaatcgaaatcgaagtggtttacggtctatttgttttggccgaataattctttccatttggcattaaatcgccaaaaaccaag

SEQ ID NO: 21663 - DNA, 2843 bp, Zea Mays
cctcgtctctttcttctattttccacgctgttccgttgctgtctgcctccagcctcctgccgttacgagcgcgtcagggtttttccttggccagccggcggcggccgttgcacctcctccatccacccctagtcgaaggtcgccagttcattcatccaggctgctgcgcccgagtccctggccaccgtcgctgggcacctgccgtcctcggaagtcgcaaccggaggtgggatttattaaatttctgagatggcagaatgtcggatacaagactggaagcgcgcttcaactccagagtcagtttctagacatgaaacatcaataccaagaacaaagcaaagaaacatttttagtctattagctcagcgggagctctcacctcgaacaaaaaaccaagcaaaaaatctttggaccaaacctccaagacttgatgcttgtcctattgaatcgaaattttggggcacctatgctcagcatgatctcctttcttgggctgaagcagagttcttgcattggtggattcccaaatattgccctctcacgccttcttcgaaggcaactattgcagctgcatttagtacagatgggagagtacttgcatctacacatggtgaccatactgtcaaaataattgattggcaaactgggaaatgcttgaatgtactgcttggacatcaccgcactccatgggtggttagattccatcctcagcgttctgatattcttgctagtggaagtttggattgtgaagttcgtctctgggatgctaaaacatctcgctgcacagcagaactggtcttctataggccagttgcatcaattgcatttcatgcaactggggagcttctggcagttgcatcaggtcacaaattgtttttatgggactgcaataaacgatgggaaactttggaacttccaatcatactagaaacccgccgttcactgagagctgtgcagtttcacccccatggtgccccatatctacttacaggagaggttcacaaccttgattctgaagattcaacgatgacccctgcacttctgagcaattattccttcagagacacacctctccttggtggttctggggtagataacttgattagtgaactacaatacatgcagaattttgagcaggttggtgcctcatcatcagttccagtcactactggcagttttgatgggtcaaggctacatgatacctctggccatcatctgatgacctctttacctagtgttgggaggccccttctgggtactcatgctgctgaagctcctgccatctcattaagtgtcgggtcagaacaaactacgtctctgcttggtggtggcaccgaattaccttgtacggtgaagctaagaatatggcgccacgaaatgaagaatccatttatcacattagggcctgaggcatgcctcttgacaattcctcatgctgtactttgcagcgaaatgggtacccatgtttcaccctgtgggcgatttttggttgcttgtgttgcatgtgtgctgccacacagttatggtggccatggaagtcagttgcatgaacattatgactctactggggctggaacatcaccaactcgccaagcatttccgtctcgccaaattatatatgagcttcgggtttattctcttgaggacgcaacatttggaacagttcttgcaactagagcaataaaggctgctcactgtttaacttccatccagttttcacccacatcagaacacatactattggcatatggtcggcaacatagttcactgttgaggaccattttgatcaatggggagaccagagttcctgtgtacacagtcttggaggtgtatcgagtttcagacatggagcttgtaagagttcttcctagtgtaggagaggaagtcaatgttgcatgttttcatccttcccctggatcaggtcttgtttatgggactaagcaagggaaggttaggtttcttcggcaccatggtgcatcattcacttgctggggagaacgttcatgaggtattactttcctaccattgaaggcttgtatggattaactattccacatgttttttttggggggggggtgtggacggattgaggggataattagttggagtccaatggccattggagttggatttatccaaacgagcctagagagatttagaggcatgtgctacaaatgcagttctggacataataactgaatttgagcatcgcattcttgtgctgctgaatcttatcttgattatggcttcggcaacatcctggaagaggaatttatggtcaactgagatcatctccaagaccgagagggctaacagaaaacatcagatttcagcatccaattactcttgactaacgttccactctttgcaaaaccattgtgccggcaaggagggctactattttaggtccggttaacgtgtgtaagtagccccgtctatgagaaaatggacaaggaatcgcagcctcattcagcatgaattaccaacgatggttgactactactagtacaaggagacctcaagggatacggtcgcctgtacgaatatggatgcgagccatatactgacggccggcctcccaaagatgcgatgtgttccttagttcgatgattttttttttgaaactgtatagaagcctgcgaagaaatgtagtggttggctgagtgaagtgagggaagggataggcattatttcccttgggtgacattgaccctgtttggatcagattctagccgcgagaatctgattttcgtaataaaaaaatcgaaatcgaagtggtttacggtctatttgttttggccgaataattctttccatttggcattaaatcgccaaaaaccaag

SEQ ID NO: 21664 - DNA, 1997 bp, Zea Mays
cgctgttccgttgctgtctgcctccagcctcctgccgttacgagcgcgtcagggtttttccttggccagccggcggcggccgttgcacctcctccatccacccctagtcgaaggtcgccagttcattcatccaggctgctgcgcccgagtccctggccaccgtcgctgggcacctgccgtcctcggaagtcgcaaccggaggtgggatttattaaatttctgagatggcagaatgtcggatacaagactggaagcgcgcttcaactccagagtcagtttctagacatgaaacatcaataccaagaacaaagcaaagaaacatttttagtctattagctcagcgggagctctcacctcgaacaaaaaaccaagcaaaaaatctttggaccaaacctccaagacttgatgcttgtcctattgaatcgaaattttggggcacctatgctcagcatgatctcctttcttgggctgaagcagagttcttgcattggtggattcccaaatattgccctctcacgccttcttcgaaggcaactattgcagctgcatttagtacagatgggagagtacttgcatctacacatggtgaccatactgtcaaaataattgattggcaaactgggaaatgcttgaatgtactgcttggacatcaccgcactccatgggtggttagattccatcctcagcgttctgatattcttgctagtggaagtttggattgtgaagttcgtctctgggatgctaaaacatctcgctgcacagcagaactggtcttctgccagttgcatcaattgcatttcatgcaactggggagcttctggcagttgcatcaggtcacaaattgtttttatgggactgcaataaacgatgggaaactttggaacttccaatcatactagaaacccgccgttcactgagagctgtgcagtttcacccccatggtgccccatatctacttacaggagaggttcacaaccttgattctgaagattcaacgatgacccctgcacttctgagcaattattccttcagagacacacctctccttggtggttctggggtagataacttgattagtgaactacaatacatgcagaattttgagcagtgttgggaggccccttctgggtactcatgctgctgaagctcctgccatctcattaagtgtcgggtcagaacaaactacgtctctgcttggtggtggcaccgaattaccttgtacggtgaagctaagaatatggcgccacgaaatgaagaatccatttatcacattagggcctgaggcatgcctcttgacaattcctcatgctgtactttgcagcgaaatgggtacccatgtttcaccctgtgggcgatttttggttgcttgtgttgcatgtgtgctgccacacagttatggtggccatggaagtcagttgcatgaacattatgactctactggggctggaacatcaccaactcgccaagcatttccgtctcgccaaattatatatgagcttcgggtttattctcttgaggacgcaacatttggaacagttcttgcaactagagcaataaaggctgctcactgtttaacttccatccagttttcacccacatcagaacacatactattggcatatggtcggcaacatagttcactgttgaggaccattttgatcaatggggagaccagagttcctgtgtacacagtcttggaggtgtatcgagtttcagacatggagcttgtaagagttcttcctagtgtaggagaggaagtcaatgttgcatgttttcatccttcccctggatcaggtcttgtttatgggactaaggtgagtagcaagttaagatcagcgacaaaaatggaataaatatatgctctgctgatgcttctggtgtacaacagcaagggaaggttaggtttcttcggcaccatggtgcatcattcacttgctggggagaacgttcatgaggggttctaaggtatgcatcaaagctcgtcaggagggggttcc

SEQ ID NO: 21665 - DNA, 2995 bp, Zea Mays
cgctgttccgttgctgtctgcctccagcctcctgccgttacgagcgcgtcagggtttttccttggccagccggcggcggccgttgcacctcctccatccacccctagtcgaaggtcgccagttcattcatccaggctgctgcgcccgagtccctggccaccgtcgctgggcacctgccgtcctcggaagtcgcaaccggaggtgggatttattaaatttctgagatggcagaatgtcggatacaagactggaagcgcgcttcaactccagagtcagtttctagacatgaaacatcaataccaagaacaaagcaaagaaacatttttagtctattagctcagcgggagctctcacctcgaacaaaaaaccaagcaaaaaatctttggaccaaacctccaagacttgatgcttgtcctattgaatcgaaattttggggcacctatgctcagcatgatctcctttcttgggctgaagcagagttcttgcattggtggattcccaaatattgccctctcacgccttcttcgaaggcaactattgcagctgcatttagtacagatgggagagtacttgcatctacacatggtgaccatactgtcaaaataattgattggcaaactgggaaatgcttgaatgtactgcttggacatcaccgcactccatgggtggttagattccatcctcagcgttctgatattcttgctagtggaagtttggattgtgaagttcgtctctgggatgctaaaacatctcgctgcacagcagaactggtcttctgtaattatccttgacaagccaattgtcatgatcactttttctctatttctaaagcaacacactttaattttttattaacatttcttccacagataggccagttgcatcaattgcatttcatgcaactggggagcttctggcagttgcatcaggtcacaaattgtttttatgggactgcaataaacgatgggaaactttggaacttccaatcatactagaaacccgccgttcactgagagctgtgcagtttcacccccatggtgccccatatctacttacaggagaggttcacaaccttgattctgaagattcaacgatgacccctgcacttctgagcaattattccttcagagacacacctctccttggtggttctggggtagataacttgattagtgaactacaatacatgcagaattttgagcagtgttgggaggccccttctgggtactcatgctgctgaagctcctgccatctcattaagtgtcgggtcagaacaaactacgtctctgcttggtggtggcaccgaattaccttgtacggtgaagctaagaatatggcgccacgaaatgaagaatccatttatcacattagggcctgaggcatgcctcttgacaattcctcatgctgtactttgcaggtgcccaatgttccttctttcccctaagtgttcctgtgtgtcaccaccactaactagatcttgtgctgccgcttcttaatgtatttaatgcacgacatgcaaaagtcttgttctttactctttttcatgctaattctgaactgctacaaaactgttggcaatcaacttctatatgtttggttacagcagaaaaacagtaacatctacaatttgtaccatctggatgtattggtaatattgagtagcacttatatcatctttgctagatttctatcgcacctgaagtttgagactcatttacttgaagtttctgttaaattttctgcagcgaaatgggtacccatgtttcaccctgtgggcgatttttggttgcttgtgttgcatgtgtgctgccacacagttatggtggccatggaagtcagttgcatgaacattatgactctactggggctggaacatcaccaactcgccaagcatttccgtctcgccaaattatatatgagcttcgggtttattctcttgaggacgcaacatttggaacagttcttgcaactagagcaataaaggctgctcactgtttaacttccatccagttttcacccacatcagaacacatactattggcatatggtcggcaacatagttcactgttgaggaccattttgatcaatggggagaccagagttcctgtgtacacagtcttggaggtgtatcgagtttcagacatggagcttgtaagagttcttcctagtgtaggagaggaagtcaatgttgcatgttttcatccttcccctggatcaggtcttgtttatgggactaagcaagggaaggttaggtttcttcggcaccatggtgcatcattcacttgctggggagaacgttcatgagatttagaggcatgtgctacaaatgcagttctggacataataactgaatttgagcatcgcattcttgtgctgctgaatcttatcttgattatggcttcggcaacatcctggaagaggaatttatggtcaactgagatcatctccaagaccgagagggctaacagaaaacatcagatttcagcatccaattactcttgactaacgttccactctttgcaaaaccattgtgccggcaaggagggctactattttaggtccggttaacgtgtgtaagtagccccgtctatgagaaaatggacaaggaatcgcagcctcattcagcatgaattaccaacgatggttgactactactagtacaaggagacctcaagggatacggtcgcctgtacgaatatggatgcgagccatatactgacggccggcctcccaaagatgcgatgtgttccttagttcgatgattttttttttgaaactgtatagaagcctgcgaagaaatgtagtggttggctgagtgaagtgagggaagggataggcattatttcccttgggtgacattgaccctgtttggatcagattctagccgcgagaatctgattttcgtaataaaaaaatcgaaatcgaagtggtttacggtctatttgttttggccgaataattctttccatttggcattaaatcgccaaaaaccaag

SEQ ID NO: 21666 - DNA, 2330 bp, Zea Mays
cgctgttccgttgctgtctgcctccagcctcctgccgttacgagcgcgtcagggtttttccttggccagccggcggcggccgttgcacctcctccatccacccctagtcgaaggtcgccagttcattcatccaggctgctgcgcccgagtccctggccaccgtcgctgggcacctgccgtcctcggaagtcgcaaccggagggctgaagcagagttcttgcattggtggattcccaaatattgccctctcacgccttcttcgaaggcaactattgcagctgcatttagtacagatgggagagtacttgcatctacacatggtgaccatactgtcaaaataattgattggcaaactgggaaatgcttgaatgtactgcttggacatcaccgcactccatgggtggttagattccatcctcagcgttctgatattcttgctagtggaagtttggattgtgaagttcgtctctgggatgctaaaacatctcgctgcacagcagaactggtcttctgtaattatccttgacaagccaattgtcatgatcactttttctctatttctaaagcaacacactttaattttttattaacatttcttccacagataggccagttgcatcaattgcatttcatgcaactggggagcttctggcagttgcatcaggtcacaaattgtttttatgggactgcaataaacgatgggaaactttggaacttccaatcatactagaaacccgccgttcactgagagctgtgcagtttcacccccatggtgccccatatctacttacaggagaggttcacaaccttgattctgaagattcaacgatgacccctgcacttctgagcaattattccttcagagacacacctctccttggtggttctggggtagataacttgattagtgaactacaatacatgcagaattttgagcagtgttgggaggccccttctgggtactcatgctgctgaagctcctgccatctcattaagtgtcgggtcagaacaaactacgtctctgcttggtggtggcaccgaattaccttgtacggtgaagctaagaatatggcgccacgaaatgaagaatccatttatcacattagggcctgaggcatgcctcttgacaattcctcatgctgtactttgcagttatggtggccatggaagtcagttgcatgaacattatgactctactggggctggaacatcaccaactcgccaagcatttccgtctcgccaaattatatatgagcttcgggtttattctcttgaggacgcaacatttggaacagttcttgcaactagagcaataaaggctgctcactgtttaacttccatccagttttcacccacatcagaacacatactattggcatatggtcggcaacatagttcactgttgaggaccattttgatcaatggggagaccagagttcctgtgtacacagtcttggaggtgtatcgagtttcagacatggagcttgtaagagttcttcctagtgtaggagaggaagtcaatgttgcatgttttcatccttcccctggatcaggtcttgtttatgggactaagcaagggaaggttaggtttcttcggcaccatggtgcatcattcacttgctggggagaacgttcatgagatttagaggcatgtgctacaaatgcagttctggacataataactgaatttgagcatcgcattcttgtgctgctgaatcttatcttgattatggcttcggcaacatcctggaagaggaatttatggtcaactgagatcatctccaagaccgagagggctaacagaaaacatcagatttcagcatccaattactcttgactaacgttccactctttgcaaaaccattgtgccggcaaggagggctactattttaggtccggttaacgtgtgtaagtagccccgtctatgagaaaatggacaaggaatcgcagcctcattcagcatgaattaccaacgatggttgactactactagtacaaggagacctcaagggatacggtcgcctgtacgaatatggatgcgagccatatactgacggccggcctcccaaagatgcgatgtgttccttagttcgatgattttttttttgaaactgtatagaagcctgcgaagaaatgtagtggttggctgagtgaagtgagggaagggataggcattatttcccttgggtgacattgaccctgtttggatcagattctagccgcgagaatctgattttcgtaataaaaaaatcgaaatcgaagtggtttacggtctatttgttttggccgaataattctttccatttggcattaaatcgccaaaaaccaag

SEQ ID NO: 21667 - DNA, 2488 bp, Zea Mays
cgctgttccgttgctgtctgcctccagcctcctgccgttacgagcgcgtcagggtttttccttggccagccggcggcggccgttgcacctcctccatccacccctagtcgaaggtcgccagttcattcatccaggctgctgcgcccgagtccctggccaccgtcgctgggcacctgccgtcctcggaagtcgcaaccggaggtgggatttattaaatttctgagatggcagaatgtcggatacaagactggaagcgcgcttcaactccagagtcagtttctagacatgaaacatcaataccaagaacaaagcaaagaaacatttttagtctattagctcagcgggagctctcacctcgaacaaaaaaccaagcaaaaaatctttggaccaaacctccaagacttgatgcttgtcctattgaatcgaaattttggggcacctatgctcagcatgatctcctttcttgggctgaagcagagttcttgcattggtggattcccaaatattgccctctcacgccttcttcgaaggcaactattgcagctgcatttagtacagatgggagagtacttgcatctacacatggtgaccatactgtcaaaataattgattggcaaactgggaaatgcttgaatgtactgcttggacatcaccgcactccatgggtggttagattccatcctcagcgttctgatattcttgctagtggaagtttggattgtgaagttcgtctctgggatgctaaaacatctcgctgcacagcagaactggtcttctgccagttgcatcaattgcatttcatgcaactggggagcttctggcagttgcatcaggtcacaaattgtttttatgggactgcaataaacgatgggaaactttggaacttccaatcatactagaaacccgccgttcactgagagctgtgcagtttcacccccatggtgccccatatctacttacaggagaggttcacaaccttgattctgaagattcaacgatgacccctgcacttctgagcaattattccttcagagacacacctctccttggtggttctggggtagataacttgattagtgaactacaatacatgcagaattttgagcagtgttgggaggccccttctgggtactcatgctgctgaagctcctgccatctcattaagtgtcgggtcagaacaaactacgtctctgcttggtggtggcaccgaattaccttgtacggtgaagctaagaatatggcgccacgaaatgaagaatccatttatcacattagggcctgaggcatgcctcttgacaattcctcatgctgtactttgcagttatggtggccatggaagtcagttgcatgaacattatgactctactggggctggaacatcaccaactcgccaagcatttccgtctcgccaaattatatatgagcttcgggtttattctcttgaggacgcaacttcttgcaactagagcaataaaggctgctcactgtttaacttccatccagttttcacccacatcagaacacatactattggcatatggtcggcaacatagttcactgttgaggaccattttgatcaatggggagaccagagttcctgtgtacacagtcttggaggtgtatcgagtttcagacatggagcttgtaagagttcttcctagtgtaggagaggaagtcaatgttgcatgttttcatccttcccctggatcaggtcttgtttatgggactaagcaagggaaggttaggtttcttcggcaccatggtgcatcattcacttgctggggagaacgttcatgagatttagaggcatgtgctacaaatgcagttctggacataataactgaatttgagcatcgcattcttgtgctgctgaatcttatcttgattatggcttcggcaacatcctggaagaggaatttatggtcaactgagatcatctccaagaccgagagggctaacagaaaacatcagatttcagcatccaattactcttgactaacgttccactctttgcaaaaccattgtgccggcaaggagggctactattttaggtccggttaacgtgtgtaagtagccccgtctatgagaaaatggacaaggaatcgcagcctcattcagcatgaattaccaacgatggttgactactactagtacaaggagacctcaagggatacggtcgcctgtacgaatatggatgcgagccatatactgacggccggcctcccaaagatgcgatgtgttccttagttcgatgattttttttttgaaactgtatagaagcctgcgaagaaatgtagtggttggctgagtgaagtgagggaagggataggcattatttcccttgggtgacattgaccctgtttggatcagattctagccgcgagaatctgattttcgtaataaaaaaatcgaaatcgaagtggtttacggtctatttgttttggccgaataattctttccatttggcattaaatcgccaaaaaccaag

SEQ ID NO: 21668 - DNA, 2713 bp, Zea Mays
cgctgttccgttgctgtctgcctccagcctcctgccgttacgagcgcgtcagggtttttccttggccagccggcggcggccgttgcacctcctccatccacccctagtcgaaggtcgccagttcattcatccaggctgctgcgcccgagtccctggccaccgtcgctgggcacctgccgtcctcggaagtcgcaaccggaggtgggatttattaaatttctgagatggcagaatgtcggatacaagactggaagcgcgcttcaactccagagtcagtttctagacatgaaacatcaataccaagaacaaagcaaagaaacatttttagtctattagctcagcgggagctctcacctcgaacaaaaaaccaagcaaaaaatctttggaccaaacctccaagacttgatgcttgtcctattgaatcgaaattttggggcacctatgctcagcatgatctcctttcttgggctgaagcagagttcttgcattggtggattcccaaatattgccctctcacgccttcttcgaaggcaactattgcagctgcatttagtacagatgggagagtacttgcatctacacatggtgaccatactgtcaaaataattgattggcaaactgggaaatgcttgaatgtactgcttggacatcaccgcactccatgggtggttagattccatcctcagcgttctgatattcttgctagtggaagtttggattgtgaagttcgtctctgggatgctaaaacatctcgctgcacagcagaactgataggccagttgcatcaattgcatttcatgcaactggggagcttctggcagttgcatcaggtcacaaattgtttttatgggactgcaataaacgatgggaaactttggaacttccaatcatactagaaacccgccgttcactgagagctgtgcagtttcacccccatggtgccccatatctacttacaggagaggttcacaaccttgattctgaagattcaacgatgacccctgcacttctgagcaattattccttcagagacacacctctccttggtggttctggggtagataacttgattagtgaactacaatacatgcagaattttgagcagtgttgggaggccccttctgggtactcatgctgctgaagctcctgccatctcattaagtgtcgggtcagaacaaactacgtctctgcttggtggtggcaccgaattaccttgtacggtgaagctaagaatatggcgccacgaaatgaagaatccatttatcacattagggcctgaggcatgcctcttgacaattcctcatgctgtactttgcagcgaaatgggtacccatgtttcaccctgtgggcgatttttggttgcttgtgttgcatgtgtgctgccacacagttatggtggccatggaagtcagttgcatgaacattatgactctactggggctggaacatcaccaactcgccaagcatttccgtctcgccaaattatatatgagcttcgggtttattctcttgaggacgcaacatttggaacagttcttgcaactagagcaataaaggctgctcactgtttaacttccatccagttttcacccacatcagaacacatactattggcatatggtcggcaacatagttcactgttgaggaccattttgatcaatggggagaccagagttcctgtgtacacagtcttggaggtgtatcgagtttcagacatggagcttgtaagagttcttcctagtgtaggagaggaagtcaatgttgcatgttttcatccttcccctggatcaggtcttgtttatgggactaagcaagggaaggttaggtttcttcggcaccatggtgcatcattcacttgctggggagaacgttcatgaggtattactttcctaccattgaaggcttgtatggattaactattccacatgttttttttggggggggggtgtggacggattgaggggataattagttggagtccaatggccattggagttggatttatccaaacgagcctagagagatttagaggcatgtgctacaaatgcagttctggacataataactgaatttgagcatcgcattcttgtgctgctgaatcttatcttgattatggcttcggcaacatcctggaagaggaatttatggtcaactgagatcatctccaagaccgagagggctaacagaaaacatcagatttcagcatccaattactcttgactaacgttccactctttgcaaaaccattgtgccggcaaggagggctactattttaggtccggttaacgtgtgtaagtagccccgtctatgagaaaatggacaaggaatcgcagcctcattcagcatgaattaccaacgatggttgactactactagtacaaggagacctcaagggatacggtcgcctgtacgaatatggatgcgagccatatactgacggccggcctcccaaagatgcgatgtgttccttagttcgatgattttttttttgaaactgtatagaagcctgcgaagaaatgtagtggttggctgagtgaagtgagggaagggataggcattatttcccttgggtgacattgaccctgtttggatcagattctagccgcgagaatctgattttcgtaataaaaaaatcgaaatcgaagtggtttacggtctatttgttttggccgaataattctttccatttggcattaaatcgccaaaaaccaag

SEQ ID NO: 21669 - DNA, 2625 bp, Zea Mays
cgctgttccgttgctgtctgcctccagcctcctgccgttacgagcgcgtcagggtttttccttggccagccggcggcggccgttgcacctcctccatccacccctagtcgaaggtcgccagttcattcatccaggctgctgcgcccgagtccctggccaccgtcgctgggcacctgccgtcctcggaagtcgcaaccggagaaacatttttagtctattagctcagcgggagctctcacctcgaacaaaaaaccaagcaaaaaatctttggaccaaacctccaagacttgatgcttgtcctattgaatcgaaattttggggcacctatgctcagcatgatctcctttcttgggctgaagcagagttcttgcattggtggattcccaaatattgccctctcacgccttcttcgaaggcaactattgcagctgcatttagtacagatgggagagtacttgcatctacacatggtgaccatactgtcaaaataattgattggcaaactgggaaatgcttgaatgtactgcttggacatcaccgcactccatgggtggttagattccatcctcagcgttctgatattcttgctagtggaagtttggattgtgaagttcgtctctgggatgctaaaacatctcgctgcacagcagaactggtcttctgtaattatccttgacaagccaattgtcatgatcactttttctctatttctaaagcaacacactttaattttttattaacatttcttccacagataggccagttgcatcaattgcatttcatgcaactggggagcttctggcagttgcatcaggtcacaaattgtttttatgggactgcaataaacgatgggaaactttggaacttccaatcatactagaaacccgccgttcactgagagctgtgcagtttcacccccatggtgccccatatctacttacaggagaggttcacaaccttgattctgaagattcaacgatgacccctgcacttctgagcaattattccttcagagacacacctctccttggtggttctggggtagataacttgattagtgaactacaatacatgcagaattttgagcagtgttgggaggccccttctgggtactcatgctgctgaagctcctgccatctcattaagtgtcgggtcagaacaaactacgtctctgcttggtggtggcaccgaattaccttgtacggtgaagctaagaatatggcgccacgaaatgaagaatccatttatcacattagggcctgaggcatgcctcttgacaattcctcatgctgtactttgcagttatggtggccatggaagtcagttgcatgaacattatgactctactggggctggaacatcaccaactcgccaagcatttccgtctcgccaaattatatatgagcttcgggtttattctcttgaggacgcaacatttggaacagttcttgcaactagagcaataaaggctgctcactgtttaacttccatccagttttcacccacatcagaacacatactattggcatatggtcggcaacatagttcactgttgaggaccattttgatcaatggggagaccagagttcctgtgtacacagtcttggaggtgtatcgagtttcagacatggagcttgtaagagttcttcctagtgtaggagaggaagtcaatgttgcatgttttcatccttcccctggatcaggtcttgtttatgggactaagcaagggaaggttaggtttcttcggcaccatggtgcatcattcacttgctggggagaacgttcatgaggtattactttcctaccattgaaggcttgtatggattaactattccacatgttttttttggggggggggtgtggacggattgaggggataattagttggagtccaatggccattggagttggatttatccaaacgagcctagagagatttagaggcatgtgctacaaatgcagttctggacataataactgaatttgagcatcgcattcttgtgctgctgaatcttatcttgattatggcttcggcaacatcctggaagaggaatttatggtcaactgagatcatctccaagaccgagagggctaacagaaaacatcagatttcagcatccaattactcttgactaacgttccactctttgcaaaaccattgtgccggcaaggagggctactattttaggtccggttaacgtgtgtaagtagccccgtctatgagaaaatggacaaggaatcgcagcctcattcagcatgaattaccaacgatggttgactactactagtacaaggagacctcaagggatacggtcgcctgtacgaatatggatgcgagccatatactgacggccggcctcccaaagatgcgatgtgttccttagttcgatgattttttttttgaaactgtatagaagcctgcgaagaaatgtagtggttggctgagtgaagtgagggaagggataggcattatttcccttgggtgacattgaccctgtttggatcagattctagccgcgagaatctgattttcgtaataaaaaaatcgaaatcgaagtggtttacggtctatttgttttggccgaataattctttccatttggcattaaatcgccaaaaaccaag

SEQ ID NO: 21670 - DNA, 2670 bp, Zea Mays
cgctgttccgttgctgtctgcctccagcctcctgccgttacgagcgcgtcagggtttttccttggccagccggcggcggccgttgcacctcctccatccacccctagtcgaaggtcgccagttcattcatccaggctgctgcgcccgagtccctggccaccgtcgctgggcacctgccgtcctcggaagtcgcaaccggaggtgggatttattaaatttctgagatggcagaatgtcggatacaagactggaagcgcgcttcaactccagagtcagtttctagacatgaaacatcaataccaagaacaaagcaaagaaacatttttagtctattagctcagcgggagctctcacctcgaacaaaaaaccaagcaaaaaatctttggaccaaacctccaagacttgatgcttgtcctattgaatcgaaattttggggcacctatgctcagcatgatctcctttcttgggctgaagcagagttcttgcattggtggattcccaaatattgccctctcacgccttcttcgaaggcaactattgcagctgcatttagtacagatgggagagtacttgcatctacacatggtgaccatactgtcaaaataattgattggcaaactgggaaatgcttgaatgtactgcttggacatcaccgcactccatgggttagattccatcctcagcgttctgatattcttgctagtggaagtttggattgtgaagttcgtctctgggatgctaaaacatctcgctgcacagcagaactggtcttctataggccagttgcatcaattgcatttcatgcaactggggagcttctggcagttgcatcaggtcacaaattgtttttatgggactgcaataaacgatgggaaactttggaacttccaatcatactagaaacccgccgttcactgagagctgtgcagtttcacccccatggtgccccatatctacttacaggagaggttcacaaccttgattctgaagattcaacgatgacccctgcacttctgagcaattattccttcagagacacacctctccttggtggttctggggtagataacttgattagtgaactacaatacatgcagaattttgagcaggttggtgcctcatcatcagttccagtcactactggcagttttgatgggtcaaggctacatgatacctctggccatcatctgatgacctctttacctagtgttgggaggccccttctgggtactcatgctgctgaagctcctgccatctcattaagtgtcgggtcagaacaaactacgtctctgcttggtggtggcaccgaattaccttgtacggtgaagctaagaatatggcgccacgaaatgaagaatccatttatcacattagggcctgaggcatgcctcttgacaattcctcatgctgtactttgcagcgaaatgggtacccatgtttcaccctgtgggcgatttttggttgcttgtgttgcatgtgtgctgccacacagttatggtggccatggaagtcagttgcatgaacattatgactctactggggctggaacatcaccaactcgccaagcatttccgtctcgccaaattatatatgagcttcgggtttattctcttgaggacgcaacatttggaacagttcttgcaactagagcaataaaggctgctcactgtttaacttccatccagttttcacccacatcagaacacatactattggcatatggtcggcaacatagttcactgttgaggaccattttgatcaatggggagaccagagttcctgtgtacacagtcttggaggtgtatcgagtttcagacatggagcttgtaagagttcttcctagtgtaggagaggaagtcaatgttgcatgttttcatccttcccctggatcaggtcttgtttatgggactaagcaagggaaggttaggtttcttcggcaccatggtgcatcattcacttgctggggagaacgttcatgagatttagaggcatgtgctacaaatgcagttctggacataataactgaatttgagcatcgcattcttgtgctgctgaatcttatcttgattatggcttcggcaacatcctggaagaggaatttatggtcaactgagatcatctccaagaccgagagggctaacagaaaacatcagatttcagcatccaattactcttgactaacgttccactctttgcaaaaccattgtgccggcaaggagggctactattttaggtccggttaacgtgtgtaagtagccccgtctatgagaaaatggacaaggaatcgcagcctcattcagcatgaattaccaacgatggttgactactactagtacaaggagacctcaagggatacggtcgcctgtacgaatatggatgcgagccatatactgacggccggcctcccaaagatgcgatgtgttccttagttcgatgattttttttttgaaactgtatagaagcctgcgaagaaatgtagtggttggctgagtgaagtgagggaagggataggcattatttcccttgggtgacattgaccctgtttggatcagattctagccgcgagaatctgattttcgtaataaaaaaatcgaaatcgaagtggtttacggtctatttgttttggccgaataattctttccatttggcattaaatcgccaaaaaccaag

SEQ ID NO: 21671 - DNA, 2601 bp, Zea Mays
cgctgttccgttgctgtctgcctccagcctcctgccgttacgagcgcgtcagggtttttccttggccagccggcggcggccgttgcacctcctccatccacccctagtcgaaggtcgccagttcattcatccaggctgctgcgcccgagtccctggccaccgtcgctgggcacctgccgtcctcggaagtcgcaaccggaggtgggatttattaaatttctgagatggcagaatgtcggatacaagactggaagcgcgcttcaactccagagtcagtttctagacatgaaacatcaataccaagaacaaagcaaagaaacatttttagtctattagctcagcgggagctctcacctcgaacaaaaaaccaagcaaaaaatctttggaccaaacctccaagacttgatgcttgtcctattgaatcgaaattttggggcacctatgctcagcatgatctcctttcttgggctgaagcagagttcttgcattggtggattcccaaatattgccctctcacgccttcttcgaaggcaactattgcagctgcatttagtacagatgggagagtacttgcatctacacatggtgaccatactgtcaaaataattgattggcaaactgggaaatgcttgaatgtactgcttggacatcaccgcactccatgggtggttagattccatcctcagcgttctgatattcttgctagtggaagtttggattgtgaagttcgtctctgggatgctaaaacatctcgctgcacagcagaactggtcttctataggccagttgcatcaattgcatttcatgcaactggggagcttctggcagttgcatcaggtcacaaattgtttttatgggactgcaataaacgatgggaaactttggaacttccaatcatactagaaacccgccgttcactgagagctgtgcagtttcacccccatggtgccccatatctacttacaggagaggttcacaaccttgattctgaagattcaacgatgacccctgcacttctgagcaattattccttcagagacacacctctccttggtggttctggggtagataacttgattagtgaactacaatacatgcagaattttgagcaggttggtgcctcatcatcagttccagtcactactggcagttttgatgggtcaaggctacatgatacctctggccatcatctgatgacctctttacctagtgttgggaggccccttctgggtactcatgctgctgaagctcctgccatctcattaagtgtcgggtcagaacaaactacgtctctgcttggtggtggcaccgaattaccttgtacggtgaagctaagaatatggcgccacgaaatgaagaatccatttatcacattagggcctgaggcatgcctcttgacaattcctcatgctgtactttgcagttatggtggccatggaagtcagttgcatgaacattatgactctactggggctggaacatcaccaactcgccaagcatttccgtctcgccaaattatatatgagcttcgggtttattctcttgaggacgcaacatttggaacagttcttgcaactagagcaataaaggctgctcactgtttaacttccatccagttttcacccacatcagaacacatactattggcatatggtcggcaacatagttcactgttgaggaccattttgatcaatggggagaccagagttcctgtgtacacagtcttggaggtgtatcgagtttcagacatggagcttgtaagagttcttcctagtgtaggagaggaagtcaatgttgcatgttttcatccttcccctggatcaggtcttgtttatgggactaagcaagggaaggttaggtttcttcggcaccatggtgcatcattcacttgctggggagaacgttcatgagatttagaggcatgtgctacaaatgcagttctggacataataactgaatttgagcatcgcattcttgtgctgctgaatcttatcttgattatggcttcggcaacatcctggaagaggaatttatggtcaactgagatcatctccaagaccgagagggctaacagaaaacatcagatttcagcatccaattactcttgactaacgttccactctttgcaaaaccattgtgccggcaaggagggctactattttaggtccggttaacgtgtgtaagtagccccgtctatgagaaaatggacaaggaatcgcagcctcattcagcatgaattaccaacgatggttgactactactagtacaaggagacctcaagggatacggtcgcctgtacgaatatggatgcgagccatatactgacggccggcctcccaaagatgcgatgtgttccttagttcgatgattttttttttgaaactgtatagaagcctgcgaagaaatgtagtggttggctgagtgaagtgagggaagggataggcattatttcccttgggtgacattgaccctgtttggatcagattctagccgcgagaatctgattttcgtaataaaaaaatcgaaatcgaagtggtttacggtctatttgttttggccgaataattctttccatttggcattaaatcgccaaaaaccaag

SEQ ID NO: 21672 - DNA, 2758 bp, Zea Mays
cgctgttccgttgctgtctgcctccagcctcctgccgttacgagcgcgtcagggtttttccttggccagccggcggcggccgttgcacctcctccatccacccctagtcgaaggtcgccagttcattcatccaggctgctgcgcccgagtccctggccaccgtcgctgggcacctgccgtcctcggaagtcgcaaccggaggtgggatttattaaatttctgagatggcagaatgtcggatacaagactggaagcgcgcttcaactccagagtcagtttctagacatgaaacatcaataccaagaacaaagcaaagaaacatttttagtctattagctcagcgggagctctcacctcgaacaaaaaaccaagcaaaaaatctttggaccaaacctccaagacttgatgcttgtcctattgaatcgaaattttggggcacctatgctcagcatgatctcctttcttgggctgaagcagagttcttgcattggtggattcccaaatattgccctctcacgccttcttcgaaggcaactattgcagctgcatttagtacagatgggagagtacttgcatctacacagtaggttaattaacttgctgaatgtatggtctataaataccaaaggacttatagactaacttggctttatccccagtggtgaccatactgtcaaaataattgattggcaaactgggaaatgcttgaatgtactgcttggacatcaccgcactccatgggtggtacattacgttagattccatcctcagcgttctgatattcttgctagtggaagtttggattgtgaagttcgtctctgggatgctaaaacatctcgctgcacagcagaactggtcttctataggccagttgcatcaattgcatttcatgcaactggggagcttctggcagttgcatcaggtcacaaattgtttttatgggactgcaataaacgatgggaaactttggaacttccaatcatactagaaacccgccgttcactgagagctgtgcagtttcacccccatggtgccccatatctacttacaggagaggttcacaaccttgattctgaagattcaacgatgacccctgcacttctgagcaattattccttcagagacacacctctccttggtggttctggggtagataacttgattagtgaactacaatacatgcagaattttgagcaggttggtgcctcatcatcagttccagtcactactggcagttttgatgggtcaaggctacatgatacctctggccatcatctgatgacctctttacctagtgttgggaggccccttctgggtactcatgctgctgaagctcctgccatctcattaagtgtcgggtcagaacaaactacgtctctgcttggtggtggcaccgaattaccttgtacggtgaagctaagaatatggcgccacgaaatgaagaatccatttatcacattagggcctgaggcatgcctcttgacaattcctcatgctgtactttgcagcgaaatgggtacccatgtttcaccctgtgggcgatttttggttgcttgtgttgcatgtgtgctgccacacagttatggtggccatggaagtcagttgcatgaacattatgactctactggggctggaacatcaccaactcgccaagcatttccgtctcgccaaattatatatgagcttcgggtttattctcttgaggacgcaacatttggaacagttcttgcaactagagcaataaaggctgctcactgtttaacttccatccagttttcacccacatcagaacacatactattggcatatggtcggcaacatagttcactgttgaggaccattttgatcaatggggagaccagagttcctgtgtacacagtcttggaggtgtatcgagtttcagacatggagcttgtaagagttcttcctagtgtaggagaggaagtcaatgttgcatgttttcatccttcccctggatcaggtcttgtttatgggactaagcaagggaaggttaggtttcttcggcaccatggtgcatcattcacttgctggggagaacgttcatgagatttagaggcatgtgctacaaatgcagttctggacataataactgaatttgagcatcgcattcttgtgctgctgaatcttatcttgattatggcttcggcaacatcctggaagaggaatttatggtcaactgagatcatctccaagaccgagagggctaacagaaaacatcagatttcagcatccaattactcttgactaacgttccactctttgcaaaaccattgtgccggcaaggagggctactattttaggtccggttaacgtgtgtaagtagccccgtctatgagaaaatggacaaggaatcgcagcctcattcagcatgaattaccaacgatggttgactactactagtacaaggagacctcaagggatacggtcgcctgtacgaatatggatgcgagccatatactgacggccggcctcccaaagatgcgatgtgttccttagttcgatgattttttttttgaaactgtatagaagcctgcgaagaaatgtagtggttggctgagtgaagtgagggaagggataggcattatttcccttgggtgacattgaccctgtttggatcagattctagccgcgagaatctgattttcgtaataaaaaaatcgaaatcgaagtggtttacggtctatttgttttggccgaataattctttccatttggcattaaatcgccaaaaaccaag

SEQ ID NO: 21673 - DNA, 2659 bp, Zea Mays
cgctgttccgttgctgtctgcctccagcctcctgccgttacgagcgcgtcagggtttttccttggccagccggcggcggccgttgcacctcctccatccacccctagtcgaaggtcgccagttcattcatccaggctgctgcgcccgagtccctggccaccgtcgctgggcacctgccgtcctcggaagtcgcaaccggaggtgggatttattaaatttctgagatggcagaatgtcggatacaagactggaagcgcgcttcaactccagagtcagtttctagacatgaaacatcaataccaagaacaaagcaaagaaacatttttagtctattagctcagcgggagctctcacctcgaacaaaaaaccaagcaaaaaatctttggaccaaacctccaagacttgatgcttgtcctattgaatcgaaattttggggcacctatgctcagcatgatctcctttcttgggctgaagcagagttcttgcattggtggattcccaaatattgccctctcacgccttcttcgaaggcaactattgcagctgcatttagtacagatgggagagtacttgcatctacacatggtgaccatactgtcaaaataattgattggcaaactgggaaatgcttgaatgtactgcttggacatcaccgcactccatgggtggttagattccatcctcagcgttctgatattcttgctagtggaagtttggattgtgaagttcgtctctgggatgctaaaacatctcgctgcacagcagaactggtcttctgtaattatccttgacaagccaattgtcatgatcactttttctctatttctaaagcaacacactttaattttttattaacatttcttccacagataggccagttgcatcaattgcatttcatgcaactggggagcttctggcagttgcatcagttgtttttatgggactgcaataaacgatgggaaactttggaacttccaatcatactagaaacccgccgttcactgagagctgtgcagtttcacccccatggtgccccatatctacttacaggagaggttcacaaccttgattctgaagattcaacgatgacccctgcacttctgagcaattattccttcagagacacacctctccttggtggttctggggtagataacttgattagtgaactacaatacatgcagaattttgagcagtgttgggaggccccttctgggtactcatgctgctgaagctcctgccatctcattaagtgtcgggtcagaacaaactacgtctctgcttggtggtggcaccgaattaccttgtacggtgaagctaagaatatggcgccacgaaatgaagaatccatttatcacattagggcctgaggcatgcctcttgacaattcctcatgctgtactttgcagcgaaatgggtacccatgtttcaccctgtgggcgatttttggttgcttgtgttgcatgtgtgctgccacacagttatggtggccatggaagtcagttgcatgaacattatgactctactggggctggaacatcaccaactcgccaagcatttccgtctcgccaaattatatatgagcttcgggtttattctcttgaggacgcaacatttggaacagttcttgcaactagagcaataaaggctgctcactgtttaacttccatccagttttcacccacatcagaacacatactattggcatatggtcggcaacatagttcactgttgaggaccattttgatcaatggggagaccagagttcctgtgtacacagtcttggaggtgtatcgagtttcagacatggagcttgtaagagttcttcctagtgtaggagaggaagtcaatgttgcatgttttcatccttcccctggatcaggtcttgtttatgggactaagcaagggaaggttaggtttcttcggcaccatggtgcatcattcacttgctggggagaacgttcatgagatttagaggcatgtgctacaaatgcagttctggacataataactgaatttgagcatcgcattcttgtgctgctgaatcttatcttgattatggcttcggcaacatcctggaagaggaatttatggtcaactgagatcatctccaagaccgagagggctaacagaaaacatcagatttcagcatccaattactcttgactaacgttccactctttgcaaaaccattgtgccggcaaggagggctactattttaggtccggttaacgtgtgtaagtagccccgtctatgagaaaatggacaaggaatcgcagcctcattcagcatgaattaccaacgatggttgactactactagtacaaggagacctcaagggatacggtcgcctgtacgaatatggatgcgagccatatactgacggccggcctcccaaagatgcgatgtgttccttagttcgatgattttttttttgaaactgtatagaagcctgcgaagaaatgtagtggttggctgagtgaagtgagggaagggataggcattatttcccttgggtgacattgaccctgtttggatcagattctagccgcgagaatctgattttcgtaataaaaaaatcgaaatcgaagtggtttacggtctatttgttttggccgaataattctttccatttggcattaaatcgccaaaaaccaag

SEQ ID NO: 21674 - DNA, 2500 bp, Zea Mays
gttttttgggcaaacccatcattttgcaaatttctcagtttttacaatttgtattaagaatgtcggatacaagactggaagcgcgcttcaactccagagtcagtttctagacatgaaacatcaataccaagaacaaagcaaagaaacatttttagtctattagctcagcgggagctctcacctcgaacaaaaaaccaagcaaaaaatctttggaccaaacctccaagacttgatgcttgtcctattgaatcgaaattttggggcacctatgctcagcatgatctcctttcttgggctgaagcagagttcttgcattggtggattcccaaatattgccctctcacgccttcttcgaaggcaactattgcagctgcatttagtacagatgggagagtacttgcatctacacatggtgaccatactgtcaaaataattgattggcaaactgggaaatgcttgaatgtactgcttggacatcaccgcactccatgggtggttagattccatcctcagcgttctgatattcttgctagtggaagtttggattgtgaagttcgtctctgggatgctaaaacatctcgctgcacagcagaactggtcttctataggccagttgcatcaattgcatttcatgcaactggggagcttctggcagttgcatcaggtcacaaattgtttttatgggactgcaataaacgatgggaaactttggaacttccaatcatactagaaacccgccgttcactgagagctgtgcagtttcacccccatggtgccccatatctacttacaggagaggttcacaaccttgattctgaagattcaacgatgacccctgcacttctgagcaattattccttcagagacacacctctccttggtggttctggggtagataacttgattagtgaactacaatacatgcagaattttgagcaggttggtgcctcatcatcagttccagtcactactggcagttttgatgggtcaaggctacatgatacctctggccatcatctgatgacctctttacctagtgttgggaggccccttctgggtactcatgctgctgaagctcctgccatctcattaagtgtcgggtcagaacaaactacgtctctgcttggtggtggcaccgaattaccttgtacggtgaagctaagaatatggcgccacgaaatgaagaatccatttatcacattagggcctgaggcatgcctcttgacaattcctcatgctgtactttgcagcgaaatgggtacccatgtttcaccctgtgggcgatttttggttgcttgtgttgcatgtgtgctgccacacagttatggtggccatggaagtcagttgcatgaacattatgactctactggggctggaacatcaccaactcgccaagcatttccgtctcgccaaattatatatgagcttcgggtttattctcttgaggacgcaacatttggaacagttcttgcaactagagcaataaaggctgctcactgtttaacttccatccagttttcacccacatcagaacacatactattggcatatggtcggcaacatagttcactgttgaggaccattttgatcaatggggagaccagagttcctgtgtacacagtcttggaggtgtatcgagtttcagacatggagcttgtaagagttcttcctagtgtaggagaggaagtcaatgttgcatgttttcatccttcccctggatcaggtcttgtttatgggactaagcaagggaaggttaggtttcttcggcaccatggtgcatcattcacttgctggggagaacgttcatgagatttagaggcatgtgctacaaatgcagttctggacataataactgaatttgagcatcgcattcttgtgctgctgaatcttatcttgattatggcttcggcaacatcctggaagaggaatttatggtcaactgagatcatctccaagaccgagagggctaacagaaaacatcagatttcagcatccaattactcttgactaacgttccactctttgcaaaaccattgtgccggcaaggagggctactattttaggtccggttaacgtgtgtaagtagccccgtctatgagaaaatggacaaggaatcgcagcctcattcagcatgaattaccaacgatggttgactactactagtacaaggagacctcaagggatacggtcgcctgtacgaatatggatgcgagccatatactgacggccggcctcccaaagatgcgatgtgttccttagttcgatgattttttttttgaaactgtatagaagcctgcgaagaaatgtagtggttggctgagtgaagtgagggaagggataggcattatttcccttgggtgacattgaccctgtttggatcagattctagccgcgagaatctgattttcgtaataaaaaaatcgaaatcgaagtggtttacggtctatttgttttggccgaataattctttccatttggcattaaatcgccaaaaaccaag

SEQ ID NO: 21675 - DNA, 1971 bp, Zea Mays
ctccagttcaccggtgcacagcgggtctagttcacatgcgcgtgcatgagttcatcgtctggaggttagattccatcctcagcgttctgatattcttgctagtggaagtttggattgtgaagttcgtctctgggatgctaaaacatctcgctgcacagcagaactggtcttctataggccagttgcatcaattgcatttcatgcaactggggagcttctggcagttgcatcaggtcacaaattgtttttatgggactgcaataaacgatgggaaactttggaacttccaatcatactagaaacccgccgttcactgagagctgtgcagtttcacccccatggtgccccatatctacttacaggagaggttcacaaccttgattctgaagattcaacgatgacccctgcacttctgagcaattattccttcagagacacacctctccttggtggttctggggtagataacttgattagtgaactacaatacatgcagaattttgagcagtgttgggaggccccttctgggtactcatgctgctgaagctcctgccatctcattaagtgtcgggtcagaacaaactacgtctctgcttggtggtggcaccgaattaccttgtacggtgaagctaagaatatggcgccacgaaatgaagaatccatttatcacattagggcctgaggcatgcctcttgacaattcctcatgctgtactttgcagcgaaatgggtacccatgtttcaccctgtgggcgatttttggttgcttgtgttgcatgtgtgctgccacacagttatggtggccatggaagtcagttgcatgaacattatgactctactggggctggaacatcaccaactcgccaagcatttccgtctcgccaaattatatatgagcttcgggtttattctcttgaggacgcaacatttggaacagttcttgcaactagagcaataaaggctgctcactgtttaacttccatccagttttcacccacatcagaacacatactattggcatatggtcggcaacatagttcactgttgaggaccattttgatcaatggggagaccagagttcctgtgtacacagtcttggaggtgtatcgagtttcagacatggagcttgtaagagttcttcctagtgtaggagaggaagtcaatgttgcatgttttcatccttcccctggatcaggtcttgtttatgggactaagcaagggaaggttaggtttcttcggcaccatggtgcatcattcacttgctggggagaacgttcatgagatttagaggcatgtgctacaaatgcagttctggacataataactgaatttgagcatcgcattcttgtgctgctgaatcttatcttgattatggcttcggcaacatcctggaagaggaatttatggtcaactgagatcatctccaagaccgagagggctaacagaaaacatcagatttcagcatccaattactcttgactaacgttccactctttgcaaaaccattgtgccggcaaggagggctactattttaggtccggttaacgtgtgtaagtagccccgtctatgagaaaatggacaaggaatcgcagcctcattcagcatgaattaccaacgatggttgactactactagtacaaggagacctcaagggatacggtcgcctgtacgaatatggatgcgagccatatactgacggccggcctcccaaagatgcgatgtgttccttagttcgatgattttttttttgaaactgtatagaagcctgcgaagaaatgtagtggttggctgagtgaagtgagggaagggataggcattatttcccttgggtgacattgaccctgtttggatcagattctagccgcgagaatctgattttcgtaataaaaaaatcgaaatcgaagtggtttacggtctatttgttttggccgaataattctttccatttggcattaaatcgccaaaaaccaag

SEQ ID NO: 21676 - DNA, 2027 bp, Zea Mays
tggaaggataaatggttaaatggttagattccatcctcagcgttctgatattcttgctagtggaagtttggattgtgaagttcgtctctgggatgctaaaacatctcgctgcacagcagaactggtcttctataggccagttgcatcaattgcatttcatgcaactggggagcttctggcagttgcatcaggtcacaaattgtttttatgggactgcaataaacgatgggaaactttggaacttccaatcatactagaaacccgccgttcactgagagctgtgcagtttcacccccatggtgccccatatctacttacaggagaggttcacaaccttgattctgaagattcaacgatgacccctgcacttctgagcaattattccttcagagacacacctctccttggtggttctggggtagataacttgattagtgaactacaatacatgcagaattttgagcaggttggtgcctcatcatcagttccagtcactactggcagttttgatgggtcaaggctacatgatacctctggccatcatctgatgacctctttacctagtgttgggaggccccttctgggtactcatgctgctgaagctcctgccatctcattaagtgtcgggtcagaacaaactacgtctctgcttggtggtggcaccgaattaccttgtacggtgaagctaagaatatggcgccacgaaatgaagaatccatttatcacattagggcctgaggcatgcctcttgacaattcctcatgctgtactttgcagcgaaatgggtacccatgtttcaccctgtgggcgatttttggttgcttgtgttgcatgtgtgctgccacacagttatggtggccatggaagtcagttgcatgaacattatgactctactggggctggaacatcaccaactcgccaagcatttccgtctcgccaaattatatatgagcttcgggtttattctcttgaggacgcaacatttggaacagttcttgcaactagagcaataaaggctgctcactgtttaacttccatccagttttcacccacatcagaacacatactattggcatatggtcggcaacatagttcactgttgaggaccattttgatcaatggggagaccagagttcctgtgtacacagtcttggaggtgtatcgagtttcagacatggagcttgtaagagttcttcctagtgtaggagaggaagtcaatgttgcatgttttcatccttcccctggatcaggtcttgtttatgggactaagcaagggaaggttaggtttcttcggcaccatggtgcatcattcacttgctggggagaacgttcatgagatttagaggcatgtgctacaaatgcagttctggacataataactgaatttgagcatcgcattcttgtgctgctgaatcttatcttgattatggcttcggcaacatcctggaagaggaatttatggtcaactgagatcatctccaagaccgagagggctaacagaaaacatcagatttcagcatccaattactcttgactaacgttccactctttgcaaaaccattgtgccggcaaggagggctactattttaggtccggttaacgtgtgtaagtagccccgtctatgagaaaatggacaaggaatcgcagcctcattcagcatgaattaccaacgatggttgactactactagtacaaggagacctcaagggatacggtcgcctgtacgaatatggatgcgagccatatactgacggccggcctcccaaagatgcgatgtgttccttagttcgatgattttttttttgaaactgtatagaagcctgcgaagaaatgtagtggttggctgagtgaagtgagggaagggataggcattatttcccttgggtgacattgaccctgtttggatcagattctagccgcgagaatctgattttcgtaataaaaaaatcgaaatcgaagtggtttacggtctatttgttttggccgaataattctttccatttggcattaaatcgccaaaaaccaag

SEQ ID NO: 21677 - DNA, 1669 bp, Zea Mays
tcttcgtcttctcgttcacgcaatcacgcccccgccaaacccaaaccgaccgaaagcggaaagcaaatagcagacggcagacaacagtcgaggggacacaggaaggcgcgaagaagaccgagatcctcgcccaacgccatcacgccactcccccaatactcaggtgtcaggacagcgagcaggcacaagcagatctcactccacgttgctccttccgcccttcctctccgccgctccccggaaggatcatggagcgcgggattcttggctccaggggcgccgtccaaatcttggggtcgaagaccggggccgcgatgtcatgtggcaaaacaacctctacaagttttacttgttctaccaaacacgagctgaacttgcatgtgaatgttaagccgttgcaattgttttgctgaagaaaagatcggagtactgttattaaatcttggtggtccagaaaccctagacgatgttcaaccattcttgttcaacctatttgctgatccagatatcattcgactgcctaggctcttcaggttccttcaaagaccactggccaaacttatttctacttttagagctcctaagagtaaagaagggtatgcttcaatcggtggtgggtcaccattgaggaaaattactgatgagcaggcaaatgctttgaagattgctctggaaaagaaaaaattgaacgcaaatatatatgttgggatgcggtattggtatcctttcacagaagaagccattgatcagattaagaaggataatatttccaagctcgttgttcttccactctaccctcagtactccatatcaacaagtgggtcaagcattcgtgttctccaaaatgttgtcaaggaagattcatatttttctggcttgccaatctccattatcgaatcatggtaccaacgtgatggctatgtgaaatcaatggctgacctaattgaaaaagagctatctgccttttccaatcctgaagaggtaatgatattcttcagtgcacatggtgtgccacttacctatgttcaggatgctggagatccttacagagatcagatggaggattgtatttctttgatcatgggggagctgagatccagaggaatcttaaatggtcacactttggcgtatcagagtcgggtgggaccagttcaatggctgaagccatatactgatgaagttttagtagaacttggtcagaacggtgtgaagagcctcctggctgttccagtaagcttcgtgagcgagcacattgagacactggaagaaatagacatggagtacaaggagttggctctggaatcaggcattgagaactggggccgggtccctgctcttggatgcacttcgactttcatctccgaccttgcagatgcggttgtcgaagccctcccatctgcctcggcgctgggaaccagaaagcctgaagacaccgattccagcatggatctgatgcattacctgaccaagatgttcttcggctcaatcttggcatttatcctgctgttgtcaccaagactggtttctgctttccggaacaccatgctttaggtggttaggtaggtaagcaaaaagggaatggtgtgataggaaacattggtctcataaatgaatctgtgaaagcacataacgttacaaatcaaaggtctctgtgggcccttctctcttt

SEQ ID NO: 21678 - DNA, 1634 bp, Zea Mays
tcttcgtcttctcgttcacgcaatcacgcccccgccaaacccaaaccgaccgaaagcggaaagcaaatagcagacggcagacaacagtcgaggggacacaggaaggcgcgaagaagaccgagatcctcgcccaacgccatcacgccactcccccaatactcaggtgtcaggacagcgagcaggcacaagcagatctcactccacgttgctccttccgcccttcctctccgccgctccccggatcatggagcgcgggattcttggctccaggggcgccgtccaaatcttggggtcgaagaccggggccgcgatgtcatgtggcaaaacaacctctacaagttttacttgttctaccaaacacgagctgaacttgcatgtgaatgttaagccgttgcaattgttttgctgaagaaaagatcggagtactgttattaaatcttggtggtccagaaaccctagacgatgttcaaccattcttgttcaacctatttgctgatccagatatcattcgactgcctaggctcttcaggttccttcaaagaccactggccaaacttatttctacttttagagctcctaagagtaaagaagggtatgcttcaatcggtggtgggtcaccattgaggaaaattactgatgagcaggcaaatgctttgaagattgctctggaaaagaaaaaattgaacgcaaatatatatgttgggatgcggtattggtatcctttcacagaagaagccattgatcagattaagaaggataatatttccaagctcgttgttcttccactctaccctcagtactccatatcaacaagtgggtcaagcattcgtgttctccaaaatgttgtcaaggaagattcatatttttctggcttgccaatctccattatcgaatcatggtaccaacgtgatggctatgtgaaatcaatggctgacctaattgaaaaagagctatctgccttttccaatcctgaagaggtaatgatattcttcagtgcacatggtgtgccacttacctatgttcaggatgctggagatccttacagagatcagatggaggattgtatttctttgatcatgggggagctgagatccagaggaatcttaaatggtcacactttggcgtatcagagtcgggtgggaccagttcaatggctgaagccatatactgatgaagttttagtagaacttggtcagaacggtgtgaagagcctcctggctgttccagtaagcttcgtgagcgagcacattgagacactggaagaaatagacatggagtacaaggagttggctctggaatcaggcattgagaactggggccgggtccctgctcttggatgcacttcgactttcatctccgaccttgcagatgcggttgtcgaagccctcccatctgcctcggcgctgggaaccagaaagcctgaagacaccgattccagcatggatctgatgcattacctgaccaagatgttcttcggctcaatcttggcatttatcctgctgttgtcaccaagactggtttctgctttccggaacaccatgctttaggtggttaggaaacattggtctcataaatgaatctgtgaaagcacataacgttacaaatcaaaggtctctgtgggcccttctctcttt

SEQ ID NO: 21679 - DNA, 1927 bp, Zea Mays
tcttcgtcttctcgttcacgcaatcacgcccccgccaaacccaaaccgaccgaaagcggaaagcaaatagcagacggcagacaacagtcgaggggacacaggaaggcgcgaagaagaccgagatcctcgcccaacgccatcacgccactcccccaatactcaggtgtcaggacagcgagcaggcacaagcagatctcactccacgttgctccttccgcccttcctctccgccgctccccggaaggatcatggagcgcgggattcttggctccaggggcgccgtccaaatcttggggtcgaagaccggggccgcgatgtcatgtggcaaaacaacctctacaagttttacttgttctaccaaacacgagctgaacttgcatgtgaatgttaagccgttgcaattgttttgctgaagaaaagatcggagtactgttattaaatcttggtggtccagaaaccctagacgatgttcaaccattcttgttcaacctatttgctgatccagatatcattcgactgcctaggctcttcaggttccttcaaagaccactggccaaacttatttctacttttagagctcctaagagtaaagaagggtatgcttcaatcggtggtgggtcaccattgaggaaaattactgatgagcaggcaaatgctttgaagattgctctggaaaagaaaaaattgaacgcaaatatatatgttgggatgcggtattggtatcctttcacagaagaagccattgatcagattaagaaggataatatttccaagctcgttgttcttccactctaccctcagtactccatatcaacaagtgggtcaagcattcgtgttctccaaaatgttgtcaaattcatatttttctggcttgccaatctccattatcgaatcatggtaccaacgtgatggctatgtgaaatcaatggctgacctaattgaaaaagagctatctgccttttccaatcctgaagaggtaatgatattcttcagtgcacatggtgtgccacttacctatgttcaggatgctggagatccttacagagatcagatggaggattgtatttctttgatcatgggggagctgagatccagaggaatcttaaatggtcacactttggcgtatcagagtcgggtgggaccagttcaatggctgaagccatatactgatgaagttttagtagaacttggtcagaacggtgtgaagagcctcctggctgttccagtaagcttcgtgagcgagcacattgagacactggaagaaatagacatggagtacaaggagttggctctggaatcaggcattgagaactggggccgggtccctgctcttggatgcacttcgactttcatctccgaccttgcagatgcggttgtcgaagccctcccatctgcctcggcgctgggaaccagaaagcctgaagacaccgattccagcatggatctgatgcattacctgaccaagatgttcttcggctcaatcttggcatttatcctgctgttgtcaccaagactggtttctgctttccggaacaccatgctttaggtggttaggtaggtaagcaaaaagggaatggtgtgataggtaattcttaaaaatttgagattaataatggaaaaactggagagagcttggtgatagtaactagagatcctttaggctttgtttgggtactctagtattgaccctaatccgtgtgttgagatagattgaggtgtaaattagtttaagttatacctcaattcagctcagtacatatagattgagctcaatactagaatactcaaactaggccttagtgcacgaggtagcagcttgtaatttgctgtttttgatattgttcacaggaaacattggtctcataaatgaatctgtgaaagcacataacgttacaaatcaaaggtctctgtgggcccttctctcttt

SEQ ID NO: 21680 - DNA, 1708 bp, Zea Mays
tcttcgtcttctcgttcacgcaatcacgcccccgccaaacccaaaccgaccgaaagcggaaagcaaatagcagacggcagacaacagtcgaggggacacaggaaggcgcgaagaagaccgagatcctcgcccaacgccatcacgccactcccccaatactcaggtgtcaggacagcgagcaggcacaagcagatctcactccacgttgctccttccgcccttcctctccgccgctccccggatcatggagcgcgggattcttggctccaggggcgccgtccaaatcttggggtcgaagaccggggccgcgatgtcatgtggcaaaacaacctctacaagttttacttgttctaccaaacacgagctgaacttgcatgtgaatgttaagccgttgcaattggcaacagatggatcctctcgtttggcatacaaaactccagtgcttaaaaatcagtggaatctttctgctagttcttcctctgcaaatgtggttaccacttttgatgatgacaaaggtgtaccttccagttttgctgaagaaaagatcggagtactgttattaaatcttggtggtccagaaaccctagacgatgttcaaccattcttgttcaacctatttgctgatccagatatcattcgactgcctaggctcttcaggttccttcaaagaccactggccaaacttatttctacttttagagctcctaagagtaaagaagggtatgcttcaatcggtggtgggtcaccattgaggaaaattactgatgagcaggcaaatgctttgaagattgctctggaaaagaaaaaattgaacgcaaatatatatgttgggatgcggtattggtatcctttcacagaagaagccattgatcagattaagaaggataatatttccaagctcgttgttcttccactctaccctcagtactccatatcaacaagtgggtcaagcattcgtgttctccaaaatgttgtcaaggaagattcatatttttctggcttgccaatctccattatcgaatcatggtaccaacgtgatggctatgtgaaatcaatggctgacctaattgaaaaagagctatctgccttttccaatcctgaagaggtaatgatattcttcagtgcacatggtgtgccacttacctatgttcaggatgctggagatccttacagagatcagatggaggattgtatttctttgatcatgggggagctgagatccagaggaatcttaaatggtcacactttggcgtatcagagtcgggtgggaccagttcaatggctgaagccatatactgatgaagttttagtagaacttggtcagaacggtgtgaagagcctcctggctgttccagtaagcttcgtgagcgagcacattgagacactggaagaaatagacatggagtacaaggagttggctctggaatcaggcattgagaactggggccgggtccctgctcttggatgcacttcgactttcatctccgaccttgcagatgcggttgtcgaagccctcccatctgcctcggcgctgggaaccagaaagcctgaagacaccgattccagcatggatctgatgcattacctgaccaagatgttcttcggctcaatcttggcatttatcctgctgttgtcaccaagactggtttctgctttccggaacaccatgctttaggtggttaggtgatgtaatgttgacccttgaggg

SEQ ID NO: 21681 - DNA, 2057 bp, Zea Mays
tcttcgtcttctcgttcacgcaatcacgcccccgccaaacccaaaccgaccgaaagcggaaagcaaatagcagacggcagacaacagtcgaggggacacaggaaggcgcgaagaagaccgagatcctcgcccaacgccatcacgccactcccccaatactcaggtgtcaggacagcgagcaggcacaagcagatctcactccacgttgctccttccgcccttcctctccgccgctccccggatcatggagcgcgggattcttggctccaggggcgccgtccaaatcttggggtcgaagaccggggccgcgatgtcatgtggcaaaacaacctctacaagttttacttgttctaccaaacacgagctgaacttgcatgtgaatgttaagccgttgcaattggcaacagatggatcctctcgtttggcatacaaaactccagtgcttaaaaatcagtggaatctttctgctagttcttcctctgcaaatgtggttaccacttttgatgatgacaaaggtgtaccttccagttttgctgaagaaaagatcggagtactgttattaaatcttggtggtccagaaaccctagacgatgttcaaccattcttgttcaacctatttgctgatccagatatcattcgactgcctaggctcttcaggttccttcaaagaccactggccaaacttatttctacttttagagctcctaagagtaaagaagggtatgcttcaatcggtggtgggtcaccattgaggaaaattactgatgagcaggcaaatgctttgaagattgctctggaaaagaaaaaattgaacgcaaatatatatgttgggatgcggtattggtatcctttcacagaagaagccattgatcagattaagaaggataatatttccaagctcgttgttcttccactctaccctcagtactccatatcaacaagtgggtcaagcattcgtgttctccaaaatgttgtcaaggaagattcatatttttctggcttgccaatctccattatcgaatcatggtaccaacgtgatggctatgtgaaatcaatggctgacctaattgaaaaagagctatctgccttttccaatcctgaagaggtaatgatattcttcagtgcacatggtgtgccacttacctatgttcaggatgctggagatccttacagagatcagatggaggattgtatttctttgatcatgggggagctgagatccagaggaatcttaaatggtcacactttggcgtatcagagtcgggtgggaccagttcaatggctgaagccatatactgatgaagttttagtagaacttggtcagaacggtgtgaagagcctcctggctgttccagtaagcttcgtgagcgagcacattgagacactggaagaaatagacatggagtacaaggagttggctctggaatcaggcattgagaactggggccgggtccctgctcttggatgcacttcgactttcatctccgaccttgcagatgcggttgtcgaagccctcccatctgcctcggcgctgggaaccagaaagcctgaagacaccgattccagcatggatctgatgcattacctgaccaagatgttcttcggctcaatcttggcatttatcctgctgttgtcaccaagactggtttctgctttccggaacaccatgctttaggtggttaggtaggtaagcaaaaagggaatggtgtgataggtaattcttaaaaatttgagattaataatggaaaaactggagagagcttggtgatagtaactagagatcctttaggctttgtttgggtactctagtattgaccctaatccgtgtgttgagatagattgaggtgtaaattagtttaagttatacctcaattcagctcagtacatatagattgagctcaatactagaatactcaaactaggccttagtgcacgaggtagcagcttgtaatttgctgtttttgatattgttcacaggaaacattggtctcataaatgaatctgtgaaagcacataacgttacaaatcaaaggtgatgtaatgttgacccttgaggg

SEQ ID NO: 21682 - DNA, 2461 bp, Zea Mays
tcttcgtcttctcgttcacgcaatcacgcccccgccaaacccaaaccgaccgaaagcggaaagcaaatagcagacggcagacaacagtcgaggggacacaggaaggcgcgaagaagaccgagatcctcgcccaacgccatcacgccactcccccaatactcaggtgtcaggacagcgagcaggcacaagcagatctcactccacgttgctccttccgcccttcctctccgccgctccccggaaggatcatggagcgcgggattcttggctccaggggcgccgtccaaatcttggggtcgaagaccggggccgcgatgtcatgtggcaaaacaacctctacaagttttacttgttctaccaaacacgagctgaacttgcatgtgaatgttaagccgttgcaattgttttgctgaagaaaagatcggagtactgttattaaatcttggtggtccagaaaccctagacgatgttcaaccattcttgttcaacctatttgctgatccagatatcattcgactgcctaggctcttcaggttccttcaaagaccactggccaaacttatttctacttttagagctcctaagagtaaagaagggtatgcttcaatcggtggtgggtcaccattgaggaaaattactgatgagcaggcaaatgctttgaagattgctctggaaaagaaaaaattgaacgcaaatatatatgttgggatgcggtattggtatcctttcacagaagaagccattgatcagattaagaaggataatatttccaagctcgttgttcttccactctaccctcagtactccatatcaacaagtgggtcaagcattcgtgttctccaaaatgttgtcaaggaagattcatatttttctggcttgccaatctccattatcgaatcatggtaccaacgtgatggctatgtgaaatcaatggctgacctaattgaaaaagagctatctgccttttccaatcctgaagaggtaatgatattcttcagtgcacatggtgtgccacttacctatgttcaggatgctggagatccttacagagatcagatggaggattgtatttctttgatcatgggggagctgagatccagaggaatcttaaatggtcacactttggcgtatcagagtcgggtgggaccagttcaatggctgaagccatatactgatgaagttttagtagaacttggtcagaacggtgtgaagagcctcctggctgttccagtaagcttcgtgagcgagcacattgagacactggaagaaatagacatggagtacaaggagttggctctggaatcaggcattgagaactggggccgggtccctgctcttggatgcacttcgactttcatctccgaccttgcagatgcggttgtcgaagccctcccatctgcctcggcgctgggaaccagaaagcctgaagacaccgattccagcatggatctgatgcattacctgaccaagatgttcttcggctcaatcttggcatttatcctgctgttgtcaccaagactggtttctgctttccggaacaccatgctttaggtggttaggtaggtaagcaaaaagggaatggtgtgataggtaattcttaaaaatttgagattaataatggaaaaactggagagagcttggtgatagtaactagagatcctttaggctttgtttgggtactctagtattgaccctaatccgtgtgttgagatagattgaggtgtaaattagtttaagttatacctcaattcagctcagtacatatagattgagctcaatactagaatactcaaactaggccttagtgcacgaggtagcagcttgtaatttgctgtttttgatattgttcacaggaaacattggtctcataaatgaatctgtgaaagcacataacgttacaaatcaaaggtctctgtgggcccttctctctttgtttttggataatcttatttagcccatcggttatcggtaatactgaaggcggtgttggaggcagcagctgtctcccatgaccgtttctccatgctttggcatgcgtgtgctatgctgcattgctattgctacaactgttttatgactgtcaaggtgactgttattcctatacataggtgatgtaatgttgacccttgagggctttttcggtttcatcaaatctatatagatcggaggaaattaggcataggaataaccggacatgactgaggtggtgtttggttctacaatctacggcggcagcgagcaacgggaacggaatcattaccacgccttctaatttattctgtttgatccacgcctggcaatcgaaagacagctttgttttccacgcggacggtagcgtgagcgtaatcggcgcgctgggcggccctatttattcccgtaattttcctattgaacagtcgtctaaatctagacacgtttgtttaggcgacgtgtggttcaaccattatttttttaaactgat

SEQ ID NO: 21683 - DNA, 2275 bp, Zea Mays
ctcgaacctgatcctttcctcttcctcagctcctcacacgacgtggcgtggcgttgcctccccttcgcttcactccgatcccctatcgcggccatgacgggagccaagcaatctcgccgatgcaacctcctgacgtttttctccaccatattggccaccgttctgcttttgatcttccagcgattctcgccgacggcagctgcagtgccgcagtggagaaggggaggaactcaggaacatatcgacgttgcgcggggagccgaggcagtgggccacgggcaaggacgatgcgaagattctctccgaggcggaagctcgcgctggcggcggaggagagggtttgctgacggcggacgagggacgcgagttcgcctcgctctacagcatgctgcagtgggcaattgggaactctgatccggataagttgagagaaaaggctgcagaattggtgaaactatcggcagaggaattactcaagagacagatggagattaaggagttgatggagaagttcaaggcgccatcagatgctgagttgataaagattgctattgctgacttaaataattcctctctggaggaccgccaacgtgcactgcaagagctcttaattctcgttgagcccatcgacaatgctaatggtaaattatgtatttgtttgtcaatataaacatatgcctgaaacctcattttcagcaaatcaatgtattcatgaatgtgtaactggataatagatgcccccttttgacccttgtccataagagagagtatgtcagcttaattatttacctgttgtaatgggtgcatattaagatgacccatgtacatgttgcatagttgtttgttgtgaaagttaacactgtgttttcaagtctccattctctgtctcataaagatcagcagttcatttatagtcatgtttgccagtttgtgcaatccaagaattatactttttcctatacttgattcttatggtgacatgattttctcaatttattttcataccttgacaaacttggagggcttcttccgttaattcaggaacttggcaatgcagacgaaggaataagaactacttcagcatgggtgctgggcaaagccagtcaggacaatgttcttgttcaaaaccagatcaatggatatggagctttggacagattagtgaagatgggttattccagttctggaccagaagctgcaaaggcattgtacactatatcctctttgattagggacaacgaacatggtcaggagttgttcctttcagaaaatggttatgcaatgttgcagcacatattgtcaaccacaaacactagtgttcggcttcagaaaaaggttgtgtctttactggcatatatagctgactttcagctaaatacagggaagtcacaagctcaatccttactcaaccactttttcatataatcagtagttgagatgatatcagcagtgcctgaccttgacctccaggagaaggctttgttagctgttaggaatctgctgcaccttacgtcagctgatgctacagatcttcagaagttttcaggcctggatgattccctgaatgcactgaaggtgcaattggatgagttgacatctcatgaggaacaaagagagtatgctccggaaattgaaattctccggagagaagtccacactgtcttccagcggaaaactgaccaggcaagggtggtgacaaatgaaggcaaatataatggttagaaacatttgctgtccatataagcgtttgttcggttcttccccaaaccaagagggttgggggatttaatagtcccccctcaattctctccaaccccttggtttcgggaggaaactaacaagctctaaaggtgatcacataacaattcctcaactgaatgacaagttgtcaatagaacgagttgcatgggatcatagatacttcacagagataggatgtcacaaaatggtgattgtctatcaagttacagaacgaagaagtgcagtggaacagagttctcattctcactgatttctgcttcgtgtgaaactgtttcatagtacacttgtagcccattgaatgtcgatgttgttcatacgcaaggactcaaagttgttactgggcctgaactaaggctacaatcgcaatagccctgattcagttgcttcctgttcaaatgaaatgttgctcgagttctttcatacgtaggcattttgcgcaacttccactggaagtaaacttaatgtgctttagaaaaccataaagtttgtgaatatatatacagaggaagtagca

SEQ ID NO: 21684 - DNA, 1903 bp, Zea Mays
ctcgaacctgatcctttcctcttcctcagctcctcacacgacgtggcgtggcgttgcctccccttcgcttcactccgatcccctatcgcggccatgacgggagccaagcaatctcgccgatgcaacctcctgacgtttttctccaccatattggccaccgttctgcttttgatcttccagcgattctcgccgacggcagctgcagtgccgcagtggagaaggggaggaactcaggaacatatcgacgttgcgcggggagccgaggcagtgggccacgggcaaggacgatgcgaagattctctccgaggcggaagctcgcgctggcggcggaggagagggtttgctgacggcggacgagggacgcgagttcgcctcgctctacagcatgctgcagtgggcaattggtatgcagggaactctgatccggataagttgagagaaaaggctgcagaattggtgaaactatcggcagaggaattactcaagagacagatggagattaaggagttgatggagaagttcaaggcgccatcagatgctgagttgataaagattgctattgctgacttaaataattcctctctggaggaccgccaacgtgcactgcaagagctcttaattctcgttgagcccatcgacaatgctaatgggcttcttccgttaattcaggaacttggcaatgcagacgaaggaataagaactacttcagcatgggtgctgggcaaagccagtcaggacaatgttcttgttcaaaaccagatcaatggatatggagctttggacagattagtgaagatgggttattccagttctggaccagaagctgcaaaggcattgtacactatatcctctttgattagggacaacgaacatggtcaggagttgttcctttcagaaaatggttatgcaatgttgcagcacatattgtcaaccacaaacactagtgttcggcttcagaaaaaggttgtgtctttactggcatatatagctgactttcagctaaatacagggaagtcacaagctcaatccttactcaaccactttttcatataatcagtagttgagatgatatcagcagtgcctgaccttgacctccaggagaaggctttgttagctgttaggaatctgctgcaccttacgtcagctgatgctacagatcttcagaagttttcaggcctggatgattccctgaatgcactgaaggtgcaattggatgagttgacatctcatgaggaacaaagagagtatgctccggaaattgaaattctccggagagaagtccacactgtcttccagcggaaaactgaccaggcaagggtggtgacaaatgaaggcaaatataatggttagaaacatttgctgtccatataagcgtttgttcggttcttccccaaaccaagagggttgggggatttaatagtcccccctcaattctctccaaccccttggtttcgggaggaaactaacaagctctaaaggtgatcacataacaattcctcaactgaatgacaagttgtcaatagaacgagttgcatgggatcatagatacttcacagagataggatgtcacaaaatggtgattgtctatcaagttacagaacgaagaagtgcagtggaacagagttctcattctcactgatttctgcttcgtgtgaaactgtttcatagtacacttgtagcccattgaatgtcgatgttgttcatacgcaaggactcaaagttgttactgggcctgaactaaggctacaatcgcaatagccctgattcagttgcttcctgttcaaatgaaatgttgctcgagttctttcatacgtaggcattttgcgcaacttccactggaagtaaacttaatgtgctttagaaaaccataaagtttgtgaatatatatacagaggaagtagca

SEQ ID NO: 21685 - DNA, 1764 bp, Zea Mays
tgatcctttcctcttcctcagctcctcacacgacgtggcgtggcgttgcctccccttcgcttcactccgatcccctatcgcggccatgacgggagccaagcaatctcgccgatgcaacctcctgacgtttttctccaccatattggccaccgttctgcttttgatcttccagcgattctcgccgacggcagctgcagtgccgcagtggagaaggggaggaactcaggaacatatcgacgttgcgcggggagccgaggcagtgggccacgggcaaggacgatgcgaagattctctccgaggcggaagctcgcgctggcggcggaggagagggtttgctgacggcggacgagggacgcgagttcgcctcgctctacagcatgctgcagtgggcaattgggaactctgatccggataagttgagagaaaaggctgcagaattggtgaaactatcggcagaggaattactcaagagacagatggagattaaggagttgatggagaagttcaaggcgccatcagatgctgagttgataaagattgctattgctgacttaaataattcctctctggaggaccgccaacgtgcactgcaagagctcttaattctcgttgagcccatcgacaatgctaatgacgaaggaataagaactacttcagcatgggtgctgggcaaagccagtcaggacaatgttcttgttcaaaaccagatcaatggatatggagctttggacagattagtgaagatgggttattccagttctggaccagaagctgcaaagcacatattgtcaaccacaaacactagtgttcggcttcagaaaaaggttgtgtctttactggcatatatagctgactttcagctaaatacagggaagtcacaagctcaatccttactcaaccactttttcatataatcagtagttgagatgatatcagcagtgcctgaccttgacctccaggagaaggctttgttagctgttaggaatctgctgcaccttacgtcagctgatgctacagatcttcagaagttttcaggcctggatgattccctgaatgcactgaaggtgcaattggatgagttgacatctcatgaggaacaaagagagtatgctccggaaattgaaattctccggagagaagtccacactgtcttccagcggaaaactgaccaggcaagggtggtgacaaatgaaggcaaatataatggttagaaacatttgctgtccatataagcgtttgttcggttcttccccaaaccaagagggttgggggatttaatagtcccccctcaattctctccaaccccttggtttcgggaggaaactaacaagctctaaaggtgatcacataacaattcctcaactgaatgacaagttgtcaatagaacgagttgcatgggatcatagatacttcacagagataggatgtcacaaaatggtgattgtctatcaagttacagaacgaagaagtgcagtggaacagagttctcattctcactgatttctgcttcgtgtgaaactgtttcatagtacacttgtagcccattgaatgtcgatgttgttcatacgcaaggactcaaagttgttactgggcctgaactaaggctacaatcgcaatagccctgattcagttgcttcctgttcaaatgaaatgttgctcgagttctttcatacgtaggcattttgcgcaacttccactggaagtaaacttaatgtgctttagaaaaccataaagtttgtgaatatatatacagaggaagtagca

SEQ ID NO: 21686 - DNA, 1717 bp, Zea Mays
ctttcctcttcctcagctcctcacacgacgtggcgtggcgttgcctccccttcgcttcactccgatcccctatcgcggccatgacgggagccaagcaatctcgccgatgcaacctcctgacgtttttctccaccatattggccaccgttctgcttttgatcttccagcgattctcgccgacggcagctgcagtgccgcagtggagaaggggaggaactcaggaacatatcgacgttgcgcggggagccgaggcagtgggccacgggcaaggacgatgcgaagattctctccgaggcggaagctcgcgctggcggcggaggagagggtttgctgacggcggacgagggacgcgagttcgcctcgctctacagcatgctgcagtgggcaattggtataggcttgggactttgcgggtccttcctcatttgttggggaactctgatccggataagttgagagaaaaggctgcagaattggtgaaactatcggcagaggaattactcaagagacagatggagattaaggagttgatggagaagttcaaggcgccatcagatgctgagttgataaagattgctattgctgacttaaataattcctctctggaggaccgccaacgtgcactgcaagagctcttaattctcgttgagcccatcgacaatgctaatggaacttggcaatgcagacgaaggaataagaactacttcagcatgggtgctgggcaaagccagtcaggacaatgttcttgttcaaaaccagatcaatggatatggagctttggacagattagtgaagatgggttattccagttctggaccagaagctgcaaaggcattgtacactatatcctctttgattagggacaacgaacatggtcaggagttgttcctttcagaaaatggttatgcaatgttgcaggctttgttagctgttaggaatctgctgcaccttacgtcagctgatgctacagatcttcagaagttttcaggcctggatgattccctgaatgcactgaaggtgcaattggatgagttgacatctcatgaggaacaaagagagtatgctccggaaattgaaattctccggagagaagtccacactgtcttccagcggaaaactgaccaggcaagggtggtgacaaatgaaggcaaatataatggttagaaacatttgctgtccatataagcgtttgttcggttcttccccaaaccaagagggttgggggatttaatagtcccccctcaattctctccaaccccttggtttcgggaggaaactaacaagctctaaaggtgatcacataacaattcctcaactgaatgacaagttgtcaatagaacgagttgcatgggatcatagatacttcacagagataggatgtcacaaaatggtgattgtctatcaagttacagaacgaagaagtgcagtggaacagagttctcattctcactgatttctgcttcgtgtgaaactgtttcatagtacacttgtagcccattgaatgtcgatgttgttcatacgcaaggactcaaagttgttactgggcctgaactaaggctacaatcgcaatagccctgattcagttgcttcctgttcaaatgaaatgttgctcgagttctttcatacgtaggcattttgcgcaacttccactggaagtaaacttaatgtgctttagaaaaccataaagtttgtgaatatatatacagaggaagtagca

SEQ ID NO: 21687 - DNA, 1870 bp, Zea Mays
ctttcctcttcctcagctcctcacacgacgtggcgtggcgttgcctccccttcgcttcactccgatcccctatcgcggccatgacgggagccaagcaatctcgccgatgcaacctcctgacgtttttctccaccatattggccaccgttctgcttttgatcttccagcgattctcgccgacggcagctgcagtgccgcagtggagaaggggaggaactcaggaacatatcgacgttgcgcggggagccgaggcagtgggccacgggcaaggacgatgcgaagattctctccgaggcggaagctcgcgctggcggcggaggagagggtttgctgacggcggacgagggacgcgagttcgcctcgctctacagcatgctgcagtgggcaattggtatgcagggaactctgatccggataagttgagagaaaaggctgcagaattggtgaaactatcggcagaggaattactcaagagacagatggagattaaggagttgatggagaagttcaaggcgccatcagatgctgagttgataaagattgctattgctgacttaaataattcctctctggaggaccgccaacgtgcactgcaagagctcttaattctcgttgagcccatcgacaatgctaatggaacttggcaatgcagacgaaggaataagaactacttcagcatgggtgctgggcaaagccagtcaggacaatgttcttgttcaaaaccagatcaatggatatggagctttggacagattagtgaagatgggttattccagttctggaccagaagctgcaaaggcattgtacactatatcctctttgattagggacaacgaacatggtcaggagttgttcctttcagaaaatggttatgcaatgttgcagcacatattgtcaaccacaaacactagtgttcggcttcagaaaaaggttgtgtctttactggcatatatagctgactttcagctaaatacagggaagtcacaagctcaatccttactcaaccactttttcatataatcagtagttgagatgatatcagcagtgcctgaccttgacctccaggagaaggctttgttagctgttaggaatctgctgcaccttacgtcagctgatgctacagatcttcagaagttttcaggcctggatgattccctgaatgcactgaaggtgcaattggatgagttgacatctcatgaggaacaaagagagtatgctccggaaattgaaattctccggagagaagtccacactgtcttccagcggaaaactgaccaggcaagggtggtgacaaatgaaggcaaatataatggttagaaacatttgctgtccatataagcgtttgttcggttcttccccaaaccaagagggttgggggatttaatagtcccccctcaattctctccaaccccttggtttcgggaggaaactaacaagctctaaaggtgatcacataacaattcctcaactgaatgacaagttgtcaatagaacgagttgcatgggatcatagatacttcacagagataggatgtcacaaaatggtgattgtctatcaagttacagaacgaagaagtgcagtggaacagagttctcattctcactgatttctgcttcgtgtgaaactgtttcatagtacacttgtagcccattgaatgtcgatgttgttcatacgcaaggactcaaagttgttactgggcctgaactaaggctacaatcgcaatagccctgattcagttgcttcctgttcaaatgaaatgttgctcgagttctttcatacgtaggcattttgcgcaacttccactggaagtaaacttaatgtgctttagaaaaccataaagtttgtgaatatatatacagaggaagtagca

SEQ ID NO: 21688 - DNA, 1862 bp, Zea Mays
ctttcctcttcctcagctcctcacacgacgtggcgtggcgttgcctccccttcgcttcactccgatcccctatcgcggccatgacgggagccaagcaatctcgccgatgcaacctcctgacgtttttctccaccatattggccaccgttctgcttttgatcttccagcgattctcgccgacggcagctgcagtgccgcagtggagaaggggaggaactcaggaacatatcgacgttgcgcggggagccgaggcagtgggccacgggcaaggacgatgcgaagattctctccgaggcggaagctcgcgctggcggcggaggagagggtttgctgacggcggacgagggacgcgagttcgcctcgctctacagcatgctgcagtgggcaattgggaactctgatccggataagttgagagaaaaggctgcagaattggtgaaactatcggcagaggaattactcaagagacagatggagattaaggagttgatggagaagttcaaggcgccatcagatgctgagttgataaagattgctattgctgacttaaataattcctctctggaggaccgccaacgtgcactgcaagagctcttaattctcgttgagcccatcgacaatgctaatggaacttggcaatgcagacgaaggaataagaactacttcagcatgggtgctgggcaaagccagtcaggacaatgttcttgttcaaaaccagatcaatggatatggagctttggacagattagtgaagatgggttattccagttctggaccagaagctgcaaaggcattgtacactatatcctctttgattagggacaacgaacatggtcaggagttgttcctttcagaaaatggttatgcaatgttgcagcacatattgtcaaccacaaacactagtgttcggcttcagaaaaaggttgtgtctttactggcatatatagctgactttcagctaaatacagggaagtcacaagctcaatccttactcaaccactttttcatataatcagtagttgagatgatatcagcagtgcctgaccttgacctccaggagaaggctttgttagctgttaggaatctgctgcaccttacgtcagctgatgctacagatcttcagaagttttcaggcctggatgattccctgaatgcactgaaggtgcaattggatgagttgacatctcatgaggaacaaagagagtatgctccggaaattgaaattctccggagagaagtccacactgtcttccagcggaaaactgaccaggcaagggtggtgacaaatgaaggcaaatataatggttagaaacatttgctgtccatataagcgtttgttcggttcttccccaaaccaagagggttgggggatttaatagtcccccctcaattctctccaaccccttggtttcgggaggaaactaacaagctctaaaggtgatcacataacaattcctcaactgaatgacaagttgtcaatagaacgagttgcatgggatcatagatacttcacagagataggatgtcacaaaatggtgattgtctatcaagttacagaacgaagaagtgcagtggaacagagttctcattctcactgatttctgcttcgtgtgaaactgtttcatagtacacttgtagcccattgaatgtcgatgttgttcatacgcaaggactcaaagttgttactgggcctgaactaaggctacaatcgcaatagccctgattcagttgcttcctgttcaaatgaaatgttgctcgagttctttcatacgtaggcattttgcgcaacttccactggaagtaaacttaatgtgctttagaaaaccataaagtttgtgaatatatatacagaggaagtagca

SEQ ID NO: 21689 - DNA, 1672 bp, Zea Mays
cctcttcctcagctcctcacacgacgtggcgtggcgttgcctccccttcgcttcactccgatcccctatcgcggccatgacgggagccaagcaatctcgccgatgcaacctcctgacgtttttctccaccatattggccaccgttctgcttttgatcttccagcgattctcgccgacggcagctgcagtgccgcagtggagaaggggaggaactcaggaacatatcgacgttgcgcggggagccgaggcagtgggccacgggcaaggacgatgcgaagattctctccgaggcggaagctcgcgctggcggcggaggagagggtttgctgacggcggacgagggacgcgagttcgcctcgctctacagcatgctgcagtgggcaattgggaactctgatccggataagttgagagaaaaggctgcagaattggtgaaactatcggcagaggaattactcaagagacagatggagattaaggagttgatggagaagttcaaggcgccatcagatgctgagttgataaagattgctattgctgacttaaataattcctctctggaggaccgccaacgtgcactgcaagagctcttaattctcgttgagcccatcgacaatgctaatggaacttggcaatgcagacgaaggaataagaactacttcagcatgggtgctgggcaaagccagtcaggacaatgttcttgttcaaaaccagatcaatggatatggagctttggacagattagtgaagatgggttattccagttctggaccagaagctgcaaaggcattgtacactatatcctctttgattagggacaacgaacatggtcaggagttgttcctttcagaaaatggttatgcaatgttgcaggctttgttagctgttaggaatctgctgcaccttacgtcagctgatgctacagatcttcagaagttttcaggcctggatgattccctgaatgcactgaaggtgcaattggatgagttgacatctcatgaggaacaaagagagtatgctccggaaattgaaattctccggagagaagtccacactgtcttccagcggaaaactgaccaggcaagggtggtgacaaatgaaggcaaatataatggttagaaacatttgctgtccatataagcgtttgttcggttcttccccaaaccaagagggttgggggatttaatagtcccccctcaattctctccaaccccttggtttcgggaggaaactaacaagctctaaaggtgatcacataacaattcctcaactgaatgacaagttgtcaatagaacgagttgcatgggatcatagatacttcacagagataggatgtcacaaaatggtgattgtctatcaagttacagaacgaagaagtgcagtggaacagagttctcattctcactgatttctgcttcgtgtgaaactgtttcatagtacacttgtagcccattgaatgtcgatgttgttcatacgcaaggactcaaagttgttactgggcctgaactaaggctacaatcgcaatagccctgattcagttgcttcctgttcaaatgaaatgttgctcgagttctttcatacgtaggcattttgcgcaacttccactggaagtaaacttaatgtgctttagaaaaccataaagtttgtgaatatatatacagaggaagtagca

SEQ ID NO: 21690 - DNA, 1951 bp, Zea Mays
cagctcctcacacgacgtggcgtggcgttgcctccccttcgcttcactccgatcccctatcgcggccatgacgggagccaagcaatctcgccgatgcaacctcctgacgtttttctccaccatattggccaccgttctgcttttgatcttccagcgattctcgccgacggcagctgcagtgccgcagtggagaaggggaggaactcaggaacatatcgacgttgcgcggggagccgaggcagtgggccacgggcaaggacgatgcgaagattctctccgaggcggaagctcgcgctggcggcggaggagagggtttgctgacggcggacgagggacgcgagttcgcctcgctctacagcatgctgcagtgggcaattggtataggcttgggactttgcgggtccttcctcatttgttggggaactctgatccggataagttgagagaaaaggctgcagaattggtgaaactatcggcagaggaattactcaagagacagatggagattaaggagttgatggagaagttcaaggcgccatcagatgctgagttgataaagattgctattgctgacttaaataattcctctctggaggaccgccaacgtgcactgcaagagctcttaattctcgttgagcccatcgacaatgctaatgacgaaggaataagaactacttcagcatgggtgctgggcaaagccagtcaggacaatgttcttgttcaaaaccagatcaatggatatggagctttggacagattagtgaagatgggttattccagttctggaccagaagctgcaaaggcattgtacactatatcctctttgattagggacaacgaacatggtcaggagttgttcctttcagaaaatggttatgcaatgttgcaggtagaaaaaggaaatcatatattgaacatcaaggcaaaagcgaggttgaaatgtaccaacgcgttgtttgtttgcagcacatattgtcaaccacaaacactagtgttcggcttcagaaaaaggttgtgtctttactggcatatatagctgactttcagctaaatacagggaagtcacaagctcaatccttactcaaccactttttcatataatcagtagttgagatgatatcagcagtgcctgaccttgacctccaggagaaggctttgttagctgttaggaatctgctgcaccttacgtcagctgatgctacagatcttcagaagttttcaggcctggatgattccctgaatgcactgaaggtgcaattggatgagttgacatctcatgaggaacaaagagagtatgctccggaaattgaaattctccggagagaagtccacactgtcttccagcggaaaactgaccaggcaagggtggtgacaaatgaaggcaaatataatggttagaaacatttgctgtccatataagcgtttgttcggttcttccccaaaccaagagggttgggggatttaatagtcccccctcaattctctccaaccccttggtttcgggaggaaactaacaagctctaaaggtgatcacataacaattcctcaactgaatgacaagttgtcaatagaacgagttgcatgggatcatagatacttcacagagataggatgtcacaaaatggtgattgtctatcaagttacagaacgaagaagtgcagtggaacagagttctcattctcactgatttctgcttcgtgtgaaactgtttcatagtacacttgtagcccattgaatgtcgatgttgttcatacgcaaggactcaaagttgttactgggcctgaactaaggctacaatcgcaatagccctgattcagttgcttcctgttcaaatgaaatgttgctcgagttctttcatacgtaggcattttgcgcaacttccactggaagtaaacttaatgtgctttagaaaaccataaagtttgtgaatatatatacagaggaagtagca

SEQ ID NO: 21691 - DNA, 3318 bp, Zea Mays
agatgcaagccatgctccagaaggttgagtaagggctgctgtaaatcaaggcaacagtgcaacatgagcagcacaactggcgttgtccgcacggctccagacgtcagcggctgtgggcatacaagctgctgctcgtggtttccttgcacgacggagagtgcgggggatgcgccggcagatgctcaaggcagccttggtgacggttgacctcggcacacgggggcgcgacctcgccctatcggacagccatcaacagcggcaccgggctgctatctccaagtgcgagcatggtacgtgtctcgcggacgacaaagttcaactctacgacagcggtggtagggacgacacttccctcgtcatcggtaagggcacactatttagcgccaccacattccgctaccggccgccacgagggcgcctccgctggttattgttgcgacctactccaggtgcccgtccatgtgctcccctttcgtccagatggcgtccatgggatccaggtggctacacacgtgcaagtccaatgcgcggagggtgtctgccttatcttatgggataaaaaaattcagattcggaataataagataagtcgagatgtaaaaggcttgtcttctaggtgtctggttttgggtcaagtagactcggtcttagagtacccgtcatgctgcagctcgaggacgagctgcttgttcaggaggggtgtagtgtcagggcctaaggaggcccacagaggggctgcgacagcagcaaccatgggccctccaagggggattagataaggatagttagagataagattagttgagattatttaggagattagttgagattatctaggaaggttatcagttagtagtttgttgagagtttttaggagagtttttaggagatacgaatctctagctagataggggcggtcagccggcttatttatgtaatcaatggattagaaataaagcaggcaagaattagaagggagaaactctcctcttgcttggccgtggacagaggcccccggccgacgttcctgtccatcgatacccctctccaatccctcaccgatctagcgaccataacagaggaagaacaggaggagtcagagtagtttgttcttatggtgaccgaatatgtaggatcttttagtcatagtggagctatggttaacgggaatgccagggaaaaatgacactgctgaaattgctgcatcatggcagttagaagagagaagggtaggcctagtgtggtggtgagagttgtctccctgagtcattaggacacaggttcgaagcagcctctccgtatttgcaggagcaggcttgcctccttttatcccttccctagaccccacttatgtgggagcctcaagcactgagtctgccttttttttatgacaattagaagagagacgtgttcccgttgttcttccatagtaaaatatcatgaatctcatgtcacaaacatttattacttgataaggatgtattgattctaacaataatttgtaaagtgatttagttgtgcttccaaatgatctatgcaaacacaaactgaacttgcatcatatataccttttaggaatgtatgcgctcatgtgctactaaaaaatgatataacattgatgcatattgttattctttgccaaggcgtccaagattatcttctcattttcattttcagtttgttttcccggtgcaaatcaagtttaaggcatggatttagcacttggcggcttaacctcagttaagttaaatgaatgcaggcgccaaatatcaccgttttcctgcaatagagtaataaaccatgcagcgctcgcatgtgtagctggaggggccaatgatgatgtgatagtgcgtttatgaacctttgaggtcatcaacatctatgttcatgagaacattgaaccttgggacccaaggggtagtacagggctacaggcatagtaaaaccgaccacagatgtagcagcttttagttagatctggattatttgtgactcatgaatatgaaaaaattagccctttcattatccatccacttggaatagtatccaccctttctgcgttttaatatttgtaacttgttttttgaaggagcacctgaccacctctcgctagaagaatctatatagaaagaagcatgttacggttaattggtaatttttttcactctcgaatatgcaggagagctgtgtatcatcgcattaagaagaatttaaatatttacaataatctcacatcccacacaccagacaaacttcaggttacatactcggtggagacaaaagataaacccaaccaatgctagcttaacgtccttttagtggcagcaacctcaagttgcattaaacccctagctcctgctaaataccaatggtgtcttcctcagttatctaaggattggctgcatgcttatttgctcacaaattttcaaatgaattgtagcagaaaactgtggattactattacagatttgaatttattgagatctgccatgtgggcacattccttctaaggagccttgttcgggcacgtcataggcctacctagtggctaacagccacagtcaattagaggaaaatctgttcagccttgccttagttggttgattgggttaatttggaaggttggaggaatgatagaaaagaagagaggaattaacttgtatgaggattagacacaagcaggaattagacggaaacacttcctctcttgctcggccatgggcaagtccctcggccggctccggctccctctttctctctcccaaccctagctgccaccataacatctggtattagagatgttaggttccgatgaggatgacaagcaaccaaagaaggtgctgccgctgccaccggatcccattgccaaggtattggccaacctcacccaacagatggcatctctctgggcgtgtctagaggccctgaaatcctgaccgaggcaagaaggaattagaagcaaacaccttctctcatgttcaactgtggacaaagcccggccggtccccctctctcccaaccccatccgccaccataacatctgttatcatagacatcagctttcgatgaaggcgacaagcaaccaaaggtgctatcgccatcgtcgccggattccattgccaaagcattggacaacctcacctagtagatggcatctctctgggcacgcctagaggccatggatatctgaccgtcggtgaccaccaccaccatgccgctagtgttcccttgtggcttgctgggctatgggacgcgggacggcagtcgtctccatgccagattcaaagatgaaggattgtgtcaatgtagctgagtaag

SEQ ID NO: 21692 - DNA, 1585 bp, Zea Mays
aaaaaatgatataacattgatgcatattgttattctttgccaaggcgtccaagattatcttctcattttcattttcagtttgttttcccggtgcaaatcaagtttaaggcatggatttagcacttggcggcttaacctcagttaagttaaatgaatgcaggcgccaaatatcaccgttttcctgcaatagagtaataaaccatgcagcgctcgcatgtgtagctggaggggccaatgatgatgtgatagtgcgtttatgaacctttgaggtcatcaacatctatgttcatgagaacattgaaccttgggacccaaggggtagtacagggctacaggcatagtaaaaccgaccacagatgtagcagcttttagttagatctggattatttgtgactcatgaatatgaaaaaattagccctttcattatccatccacttggaatagtatccaccctttctgcgttttaatatttgtaacttgttttttgaaggagcacctgaccacctctcgctagaagaatctatatagaaagaagcatgttacggttaattgcatcctatcttctagatgctcaaagtggaatgagcgtgtcccctagagttcctgcccaggatatgaaagaaagccaagaagttaaagaagcactgagagcgcagatggaagtccaaagaagactgcatgaacaagtggaggtccaaaagcgcgtgcagatcagaatggaagcgtttcagaagtacatcgacagtatcctggagagcgcgtgcaagatggtcaccgaacagttcgcttcaagtggcttcagcatctctgaccctgatctcccggagatatcccctggaggggtggtcatgtgtggcggccccacggacacgttgagctcgtcggtgttcaaccagctttccgtcagctccatcggctcgcacagtccaggaggcaaaccttccccttccccatcaggcatggaatgtccgccgctgctcctccacaagtcgcatgagctcaagcggaggtcctcttgaactgacaaatcggcgaagcctgagggcgcggtgatggctgtctttgctagtgttgtcggatatggtggtactggtggtgacaagggaaattggtggtccagtcttgtggtagctgactttctccaggtagcaagatattgctgtgtttgtttgatcagtcaaagcatcaaacagacagacctacgttcatgtgaactgcctcatgcatgtgctagattgaaaaaaaaagttatcatattttgtcatgagattatgattctactagctagcatccttagcacacttgagatgttgttgactcgtgtcctagtgtcctctgtgttgatccatgtatgcacagcgattcatgttgggagttgggactgggacatgttaacaccagatgtttcaagcttcgtactttgcctcagttgtccatgcatgcagcaggcatcccagtacttcacctgctgttgaacttgaagactagtgtattcagcttatgaaagattcatgctgagtttgtacccccacaaattgctagttgcaactttgaactatattttccttttcttcgttttgaaaag

SEQ ID NO: 21693 - DNA, 1094 bp, Zea Mays
ttgttttcccggtgcaaatcaagtttaaggcatggatttagcacttggcggcttaacctcacatcctatcttctagatgctcaaagtggaatgagcgtgtcccctagagttcctgcccaggatatgaaagaaagccaagaagttaaagaagcactgagagcgcagatggaagtccaaagaagactgcatgaacaagtggaggtccaaaagcgcgtgcagatcagaatggaagcgtttcagaagtacatcgacagtatcctggagagcgcgtgcaagatggtcaccgaacagttcgcttcaagtggcttcagcatctctgaccctgatctcccggagatatcccctggaggggtggtcatgtgtggcggccccacggacacgttgagctcgtcggtgttcaaccagctttccgtcagctccatcggctcgcacagtccaggaggcaaaccttccccttccccatcaggcatggaatgtccgccgctgctcctccacaagtcgcatgagctcaagcggaggtcctcttgaactgacaaatcggcgaagcctgagggcgcggtgatggctgtctttgctagtgttgtcggatatggtggtactggtggtgacaagggaaattggtggtccagtcttgtggtagctgactttctccaggtagcaagatattgctgtgtttgtttgatcagtcaaagcatcaaacagacagacctacgttcatgtgaactgcctcatgcatgtgctagattgaaaaaaaaagttatcatattttgtcatgagattatgattctactagctagcatccttagcacacttgagatgttgttgactcgtgtcctagtgtcctctgtgttgatccatgtatgcacagcgattcatgttgggagttgggactgggacatgttaacaccagatgtttcaagcttcgtactttgcctcagttgtccatgcatgcagcaggcatcccagtacttcacctgctgttgaacttgaagactagtgtattcagcttatgaaagattcatgctgagtttgtacccccacaaattgctagttgcaactttgaactatattttccttttcttcgttttgaaaag

SEQ ID NO: 21694 - DNA, 1124 bp, Zea Mays
ataacatctggtattagagatgttaggttccgatgaggatgacaagcaaccaaagaaggtgctgccgctgccaccggatcccattgccaagcatcctatcttctagatgctcaaagtggaatgagcgtgtcccctagagttcctgcccaggatatgaaagaaagccaagaagttaaagaagcactgagagcgcagatggaagtccaaagaagactgcatgaacaagtggaggtccaaaagcgcgtgcagatcagaatggaagcgtttcagaagtacatcgacagtatcctggagagcgcgtgcaagatggtcaccgaacagttcgcttcaagtggcttcagcatctctgaccctgatctcccggagatatcccctggaggggtggtcatgtgtggcggccccacggacacgttgagctcgtcggtgttcaaccagctttccgtcagctccatcggctcgcacagtccaggaggcaaaccttccccttccccatcaggcatggaatgtccgccgctgctcctccacaagtcgcatgagctcaagcggaggtcctcttgaactgacaaatcggcgaagcctgagggcgcggtgatggctgtctttgctagtgttgtcggatatggtggtactggtggtgacaagggaaattggtggtccagtcttgtggtagctgactttctccaggtagcaagatattgctgtgtttgtttgatcagtcaaagcatcaaacagacagacctacgttcatgtgaactgcctcatgcatgtgctagattgaaaaaaaaagttatcatattttgtcatgagattatgattctactagctagcatccttagcacacttgagatgttgttgactcgtgtcctagtgtcctctgtgttgatccatgtatgcacagcgattcatgttgggagttgggactgggacatgttaacaccagatgtttcaagcttcgtactttgcctcagttgtccatgcatgcagcaggcatcccagtacttcacctgctgttgaacttgaagactagtgtattcagcttatgaaagattcatgctgagtttgtacccccacaaattgctagttgcaactttgaactatattttccttttcttcgttttgaaaag

SEQ ID NO: 21695 - DNA, 387 bp, Zea Mays
ccatatttaccacatggggacggtttctactctttttccccccaaatctttagcgtagtctgtctgcagagatttttctttttaaaagagcaccattaatctcatatgtactaattgtatgatactgcatgtattagtattatcaatcaccaataatgaaataaatagaggaaaacacattttgaaagcagtgaaagagcaacctgcagcatcctatcttctagatgctcaaagtggaatgagcgtgtcccctagagttcctgcccaggatatgaaagaaagccaagaagttaaagaagcactgagagcgcagatggaagtccaaagaagactgcatgaacaagtggagccacagctgcatacaaggccttgctcattacaatcgtt

SEQ ID NO: 21696 - DNA, 1448 bp, Zea Mays
cccgtcttcagtctgcacttgttcctctcaactcccttccctccaccggctctgtcattctgtcctccattaccgccacctcctagtttctcgcgcctcgccgtcggcgagcggcgccaccgtcggcgtagagccaggcccgaggccattcctccctcgcagggaggcgtcgccgttgccccgccctctgggctagcgcggcgtggaggggacaactggagatccgcctgtctctgcttggattgctttttcctcctctcgccgcttcaatgtggcagtgcatgattcaaaaagctttgcaagcagagagttgctgaattgaagagggaattgcataagtcagaaagttctattggacagaactaccctactgctgcgtgaagacgatggagtggccaccaccgtcgacgtcaccatcgccgtcgctggtggtgcgcagccccaggcaaacagtcagcctgatccgcaaccggcgaccccatcgtgactgggccccctcatcgaggtctccctctttcgccgcccgtgaccatggccccaagccttcggaggtgtacggcttcgttggatccatcaccaccgtcattgccaccgccgtgtacctcgcctgggcatacacgcccgagcccgtcctccagtcactcggcatcacctactaccctagcaagtactgggcactggcggtgccatcgttcgtggttgtgaccgtggtgctgtccatgggcatctacatgggcctcaacttcgctgccactcctcctccgacttccttcagtactatcttcgatgaaaagagtagggagcacacagccttttcttctgcaactgaggatgagaggcccattgaacccatctcagacatcggtattgatcggatcaacagtcttatgtttggtgatagatgatttcccccggtggaatatgagtttaccatggagcgccggattggaaatagatgcaaacgcgaaggaagatttccatgtcagctgaactttgttgcctgcatatgctattgagaggcccgtcgaacccgttttcagacggtagtattgatcagatcaggaatcttatacttggcggtgatagacgattactcaaaaatggagtgtgagtttacaacagagtgccagattggaaggcgtgaagaaataatccacattgttaagtgaactttcatattaccttcaagcataaccgacaaaggaattcgatccttgagcttttcgtttcacgtgaagggacgccctgtaactggattttttttgtgttgtgtagtaatgtgatgtgtactgtggtaaactcactgcggctgtgcctaggtatttatttgtgttgtgtagtaatgtgatgtgcacagggctgttcctgacttttgaggggcccgggacaagattataaatagaggctccaacaccataaaaactattttttactattatatatatcaa

SEQ ID NO: 21697 - DNA, 1335 bp, Zea Mays
cttgttcctctcaactcccttccctccaccggctctgtcattctgtcctccattaccgccacctcctagtttctcgcgcctcgccgtcggcgagcggcgccaccgtcggcgtagagccaggcccgaggccattcctccctcgcagggaggcgtcgccgttgccccgccctctgggctagcgcggcgtggaggggacaactggagatccgcctgtctctgcttggattgctttttcctcctctcgccgacagaactaccctactgctgcgtgaagacgatggagtggccaccaccgtcgacgtcaccatcgccgtcgctggtggtgcgcagccccaggcaaacagtcagcctgatccgcaaccggcgaccccatcgtgactgggccccctcatcgaggtctccctctttcgccgcccgtgaccatggccccaagccttcggaggtgtacggcttcgttggatccatcaccaccgtcattgccaccgccgtgtacctcgcctgggcatacacgcccgagcccgtcctccagtcactcggcatcacctactaccctagtactgggcactggcggtgccatcgttcgtggttgtgaccgtggtgctgtccatgggcatctacatgggcctcaacttcgctgccactcctcctccgacttccttcagtactatcttcgatgaaaagagtagggagcacacagccttttcttctgcaactgaggatgagaggcccattgaacccatctcagacatcggtattgatcggatcaacagtcttatgtttggtgatagatgatttcccccggtggaatatgagtttaccatggagcgccggattggaaatagatgcaaacgcgaaggaagatttccatgtcagctgaactttgttgcctgcatatgctattgagaggcccgtcgaacccgttttcagacggtagtattgatcagatcaggaatcttatacttggcggtgatagacgattactcaaaaatggagtgtgagtttacaacagagtgccagattggaaggcgtgaagaaataatccacattgttaagtgaactttcatattaccttcaagcataaccgacaaaggaattcgatccttgagcttttcgtttcacgtgaagggacgccctgtaactggattttttttgtgttgtgtagtaatgtgatgtgtactgtggtaaactcactgcggctgtgcctaggtatttatttgtgttgtgtagtaatgtgatgtgcacagggctgttcctgacttttgaggggcccgggacaagattataaatagaggctccaacaccataaaaactattttttactattatatatatcaa

SEQ ID NO: 21698 - DNA, 1413 bp, Zea Mays
cttgttcctctcaactcccttccctccaccggctctgtcattctgtcctccattaccgccacctcctagtttctcgcgcctcgccgtcggcgagcggcgccaccgtcggcgtagagccaggcccgaggccattcctccctcgcagggaggcgtcgccgttgccccgccctctgggctagcgcggcgtggaggggacaactggagatccgcctgtctctgcttggattgctttttcctcctctcgccgtgcatgattcaaaaagctttgcaagcagagagttgctgaattgaagagggaattgcataagtcagaaagttctattggaactaccctactgctgcgtgaagacgatggagtggccaccaccgtcgacgtcaccatcgccgtcgctggtggtgcgcagccccaggcaaacagtcagcctgatccgcaaccggcgaccccatcgtgactgggccccctcatcgaggtctccctctttcgccgcccgtgaccatggccccaagccttcggaggtgtacggcttcgttggatccatcaccaccgtcattgccaccgccgtgtacctcgcctgggcatacacgcccgagcccgtcctccagtcactcggcatcacctactaccctagcaagtactgggcactggcggtgccatcgttcgtggttgtgaccgtggtgctgtccatgggcatctacatgggcctcaacttcgctgccactcctcctccgacttccttcagtactatcttcgatgaaaagagtagggagcacacagccttttcttctgcaactgaggatgagaggcccattgaacccatctcagacatcggtattgatcggatcaacagtcttatgtttggtgatagatgatttcccccggtggaatatgagtttaccatggagcgccggattggaaatagatgcaaacgcgaaggaagatttccatgtcagctgaactttgttgcctgcatatgctattgagaggcccgtcgaacccgttttcagacggtagtattgatcagatcaggaatcttatacttggcggtgatagacgattactcaaaaatggagtgtgagtttacaacagagtgccagattggaaggcgtgaagaaataatccacattgttaagtgaactttcatattaccttcaagcataaccgacaaaggaattcgatccttgagcttttcgtttcacgtgaagggacgccctgtaactggattttttttgtgttgtgtagtaatgtgatgtgtactgtggtaaactcactgcggctgtgcctaggtatttatttgtgttgtgtagtaatgtgatgtgcacagggctgttcctgacttttgaggggcccgggacaagattataaatagaggctccaacaccataaaaactattttttactattatatatatcaa

SEQ ID NO: 21699 - DNA, 1106 bp, Zea Mays
cttgttcctctcaactcccttccctccaccggctctgtcattctgtcctccattaccgccacctcctagtttctcgcgcctcgccgtcggcgagcggcgccaccgtcggcgtagagccaggcccgaggccattcctccctcgcagggaggcgtcgccgttgccccgccctctgggctagcgcggcgtggaggggacaactggagatccgcctgtctctgcttggattgctttttcctcctctcgccgtgcatgattcaaaaagctttgcaagcagagagttgctgaattgaagagggaattgcataagtcagaaagttctattgggtactgggcactggcggtgccatcgttcgtggttgtgaccgtggtgctgtccatgggcatctacatgggcctcaacttcgctgccactcctcctccgacttccttcagtactatcttcgatgaaaagagtagggagcacacagccttttcttctgcaactgaggatgagaggcccattgaacccatctcagacatcggtattgatcggatcaacagtcttatgtttggtgatagatgatttcccccggtggaatatgagtttaccatggagcgccggattggaaatagatgcaaacgcgaaggaagatttccatgtcagctgaactttgttgcctgcatatgctattgagaggcccgtcgaacccgttttcagacggtagtattgatcagatcaggaatcttatacttggcggtgatagacgattactcaaaaatggagtgtgagtttacaacagagtgccagattggaaggcgtgaagaaataatccacattgttaagtgaactttcatattaccttcaagcataaccgacaaaggaattcgatccttgagcttttcgtttcacgtgaagggacgccctgtaactggattttttttgtgttgtgtagtaatgtgatgtgtactgtggtaaactcactgcggctgtgcctaggtatttatttgtgttgtgtagtaatgtgatgtgcacagggctgttcctgacttttgaggggcccgggacaagattataaatagaggctccaacaccataaaaactattttttactattatatatatcaa

SEQ ID NO: 21700 - DNA, 1413 bp, Zea Mays
cttgttcctctcaactcccttccctccaccggctctgtcattctgtcctccattaccgccacctcctagtttctcgcgcctcgccgtcggcgagcggcgccaccgtcggcgtagagccaggcccgaggccattcctccctcgcagggaggcgtcgccgttgccccgccctctgggctagcgcggcgtggaggggacaactggagatccgcctgtctctgcttggattgctttttcctcctctcgccgtgcatgattcaaaaagctttgcaagcagagagttgctgaattgaagagggaattgcataagtcagaaagttctattggacagaactaccctactgctgcgtgaagacgatggagtggccaccaccgtcgacgtcaccatcgccgtcgctggtggtgcgcagccccaggcaaacagtcagcctgatccgcaaccggcgaccccatcgtgactgggccccctcatcgaggtctccctctttcgccgcccgtgaccatggccccaagccttcggaggtgtacggcttcgttggatccatcaccaccgtcattgccaccgccgtgtacctcgcctgggcatacacgcccgagcccgtcctccagtcactcggcatcacctactaccctagtactgggcactggcggtgccatcgttcgtggttgtgaccgtggtgctgtccatgggcatctacatgggcctcaacttcgctgccactcctcctccgacttccttcagtactatcttcgatgaaaagagtagggagcacacagccttttcttctgcaactgaggatgagaggcccattgaacccatctcagacatcggtattgatcggatcaacagtcttatgtttggtgatagatgatttcccccggtggaatatgagtttaccatggagcgccggattggaaatagatgcaaacgcgaaggaagatttccatgtcagctgaactttgttgcctgcatatgctattgagaggcccgtcgaacccgttttcagacggtagtattgatcagatcaggaatcttatacttggcggtgatagacgattactcaaaaatggagtgtgagtttacaacagagtgccagattggaaggcgtgaagaaataatccacattgttaagtgaactttcatattaccttcaagcataaccgacaaaggaattcgatccttgagcttttcgtttcacgtgaagggacgccctgtaactggattttttttgtgttgtgtagtaatgtgatgtgtactgtggtaaactcactgcggctgtgcctaggtatttatttgtgttgtgtagtaatgtgatgtgcacagggctgttcctgacttttgaggggcccgggacaagattataaatagaggctccaacaccataaaaactattttttactattatatatatcaa

SEQ ID NO: 21701 - DNA, 558 bp, Zea Mays
gttaactagtagtaggcaattaataagcaagcagcaatagcaaatacactcagcatgtctacatgcccgtcttgcatcgtgtactgcgatttcggcttctgctgcggcggtgccagtgacgacggcggccttgaatgtcacgcgccgccgcagcaacttctgccgccgccgccgccgcggctgccgccgtgccatggccatacagaggtcacaacagtggtgaacgcgacagtgcaactgcctcctcctccgccgccgccgccgccgtgccatggccataaagaggtcatcacgacagtggtgaacgcgccaacaatgcaaccgccgcctctgccgctacatccacatgtactagtaccatacagtaaccagctgccaccgcctgttccggcaccaccgcacccgcctcgacctccgacgattacggtatacgacacgccgccaccgctgcaggcgatagttcctcgtcgtcagtgtgtgccgccgccgccgccgctgccgccacctgccaaggcgaggtacgaaacggatgatgatccatcgtcgtcgtctgcactg

SEQ ID NO: 21702 - DNA, 2354 bp, Zea Mays
ttctaagactcccgctggttttgtgttgatgcagtgttcgaagaagagggaaatcaagcgccagatggccacgaccaagctattcgcggaggaacagctcgccgaggatgtcgccctcaagagaggcatctccgtggggggctgattgttttgctgagaaaaaaataccgatcatggaggtgtgtccacacatttcttggccactgcctctattgtgtatcctttagttgatagatacatgttagacgtttcttaatatacctcgcgagattgattgagtttgcttgctgactacctatggttaattactagatacatggagccaaatgttatctgatataccagcttccatcacttgggttatttcttgttggctacctgtaatgaatcagtggttagcaccttctgttggtttatccaaggtttttagttaagtgctgaaactacacttatttttcgctcaaacaagcatttataagctaccagctcctgccttccgcttcaaccatgcacatatctctgtccgcagaatttgactactcggttggcccaacaattgtaagttaccagctccttctattttgcttgagaaaatctgatcttggttgaaatgtcaatgtcattacaaaagagagtaaatcactaacaagaagtttactgattctattttgctcctcgacgtcggcgtccgcatcatccaaggtcagtaactccacttccccaagagccagcgaaactatttgattggtaactaggtgaatttcaaaacatcagtgcatacattgacgatacattagcatttagaatgagtcccctcccatgatgcccgccgaggtagcgccgtcgcggcgcatgccccctacccgcaaaaactgccactgtatggtaatgggaccccttgccatgcttgatgtgtatgtcccttttattgccttcatgatatccaatcataattggagttcaaagtagggacaagaacacaataacaatatatggagaaataattaattaattcatgcactactgagtacaaaaataactttatgtgtcgccgccagacgggattacagctttgtggagcctcacaataatccaggtagcatatagaacatttttacatgtgcttgtgaatgtcccaaatcagatgaccatgtttttcgcacttccggagactctataaggagggtgttcatacttcatatgctccagtacagtacaggaccacatagttacatacatcccacaacttttttattctgtatttgtgcttggagggacacgtgatagtactgctactcttaatgtgttgatctctcagccaccagacaccagacacgcagccggggttggccagcgccagccaccaggccgccgtggctccgacttccaacgtcgtgccccgcctggcaaccgaccgcatccaccgcctcctggctggctgggcagggtagacacaaaggtctcatccagtgctccactcctccgcatccttttctgctccgagacacctgctgaagctggaagtacatggtacaaggatgattactttaattgaattggtctgccactggctgctgccatccactgcgggctcgatcgccacgccgacgccatccccgtcctcgagcgcgccgtcacagtccggcacaagaatcgtatgctgacagcgagcctgaggccggtgcagccgacggcgacgactaccagcagctgcagcctgtcgagcccgactagaggggtgagtggtgctgctcctgatgagatcgctggaggcttaatggagattcctgtaatctatgaggcacttggcgatctcgatgaggcccaaaagcttcttcatagggcactcaggcgagggctcatcgagggagtggagcattgttgccggtgttgtggcacaaatgggcgttctgtactacatggtgggaggtatgcaaattcggggaactcgttcaagggtgcagttgcaaagtctagggccattgtacagatagatggagtacacagcgacatatttagccctggtgctgaaagggggagccacacacttctgattcaagtattatttacccgctatgaattcaaagtcggcactcacgatggccttggacacaatcctgagcaacaagatgttgaaatactatttggacctggctatactggtcttgcggatcttgggaatagatactttgagaaacagagtttgaaagctgcatttgctactgcactagctgatccaacagtagacctaaacatgcaaatgcaccgaagggatctctgaatgtgatctagcatgtgttgcttttgggtatccattatggcatgttattttcttaatatagttttaatatcca

SEQ ID NO: 21703 - DNA, 289 bp, Zea Mays
agactctataaggagggtgttcatacttcatatgctccagttgatctctcagccaccagacaccagacacgcagccggggttggccagcgccagccaccaggccgccgtggctccgacttccaacgtcgtgccccgcctggcaaccgaccgcatccaccgcctcctggctggctgggcagggtagacacaaaggtctcatccagtgctccactcctccgcatccttttctgctccgagacacctgctgaagctggaagtacatggtacaaggatgattactttaattga

SEQ ID NO: 21704 - DNA, 418 bp, Zea Mays
caacaaccttgctgcaatctataatgccatgggaagtcctaatctgtagtacagatagatggagtacacagcgacatatttagccctggtgctgaaagggggagccacacacttctgattcaagtattatttacccgctatgaattcaaagtcggcactcacgatggccttggacacaatcctgagcaacaagatgttgaaatactatttggacctggctatactggtcttgcggatcttgggaatagatactttgagaaacagagtttgaaagctgcatttgctactgcactagctgatccaacagtagacctaaacatgcaaatgcaccgaagggatctctgaatgtgatctagcatgtgttgcttttgggtatccattatggcatgttattttcttaatatagttttaatatcca

SEQ ID NO: 21705 - DNA, 1377 bp, Zea Mays
tttcgtcgtacacctcacccgctttcctttgctccacacgagcgacgcgatttctctctcttttaaattaaattatcttggactgctgttggtctggtcggcggctggtggcatagggatggagacggcggcggcgatggtggagggcggggtggggcggttctcgcgggcgccggcgctggccgcggcgctgctggcggagacgtgggcgccgctggccgtggcgctcgcggcgctggccacgctgcccagcctgctgcgccggctgcaggtcatcgtgctgcgcctccgctcctgcgggaaggaggccatccagtcgcacatcgggacctactactactcgtcctgcgacgaggatgacggcgacagcgacgaggacgagagctccgacgacgaggcggaggccggctcctccggcgacgacgaggaggatctggagcgggtcgggttctacgagggccccgcagacggcgtcctcccatggggcggcgccgtggtccggacctggcagggccgcttctccggctgcgcctcgggcgggggagctgtcggcgccaccgccagcggagcggcgtcccccgccgctgtcaggctgtggggtgccggcacggccagcggcgagccttggtgggctgcctgcagcgccgacgaaagcggctggcgcgacggtgcggccgcggaggcggaccaggtcgtggtcgggtggccgcgcgagcacgcgtcgcagcagcggcggcggcgcgagcggcgtgccgttcctctcgctctcacgggcaggtgaaacggaaggcacggcaatcggcaaggggggctgtcggaggatgtgaatatgccgcagggcgaccagctggagatgccgattccacgcagacgcagggagggacggccacggcccagaccaggccaattgaaccggctactacctcgggtgggtggactatagaaatgcatggtcatggagctgcgcgcacatcttcgatctacccgtggtggtgatgcttgcgccttccacttgcacgcatgcaatttgtacttccattcttagagtcatcttttgatcaataagcgaaacaaaatggtgatatcgcctttgttttttttaataaaaacttgttctcttcgtagtactacgaccactcctagctctttgacatataatgcatccattattgaatattcgaggcgacgatgcctgcgacggcaccgtacagttggagctgcgcggcgtacggcatgctgctactaccgtacacgccggcgtcacgtccgatgggcgtaggctgtggatgagatcgaagcagacgcggcacattgcaacccagatggttcagaagctgaggatgagatcaaacggctaaatggagaggcagaaaagcg

SEQ ID NO: 21706 - DNA, 1441 bp, Zea Mays
attttgttgtaggctccaggcacactttgagaaggtgaagaggatttgcgacactaccacattgcctttggctatgcatcatctcagtgataagataacaagccaactggatatttcaaaattgactgacaaactacggcaagcaaaggtagactcaagtgcactgacaccaaaggagaagtacgaaacctgggaggagattaaaattaagagtttcgcaaagatagtttcttcaatgtgggcaatgacattgcttagcttgtatgttagagttcaggtcaccatattaggcaggcatctctacttagattttgcccaaggtacaaatggtccacagttacaggcagaatctgacacctttagtgaaaatggacacaggagctttcttgcaatggctgattatcttgtcactgacaaaatcactggattcctaacgcaaatgcaacgtgcagcaactgaagtccttaaagagaagcaactgaaagaccgtatgaacatggaccaagtattgcagacagtattacaaatattggacatgttcatgggcctttctgaagataactcatggataaattatcttgtacctgagaatccccctgtttatgcacagttgatggctgtgtccagtagtggctttgatgattcatcactcctaaacgatttcagaaagctagaccaactaatgtctgagacacgaatagtactggcaagaaatatcatggagaggtcattgaggaagatcgcgggagtggtggtagaggatctgggtgtgcagattgtaactccaggatcgggattgcccttagcaacgctcttgcccaaagttgatcatctgagttccccgttgcttgaggaaccaaacaagaacaaacacattcagatcatccgaagtatgccggaagtggaactcttctacacattgctctacacaaacatgccaccagaaacgtaatccgtacattgatgtgaaaagaacacttgcttctgaattttggctacaaagatctggtggtatatgtgcaggttgagccgcctgaaatcaggaaactgataaacgtggagagatataggttggcattttctgccctgtatatactgagaatgagatattccgttgttgctaacaggaactgagtaaggttccttccatttggattctttcttgttttttcaaggttcggttgtgcacgtctaggtagaacctcacgaatcgggtctgctattttactattttttgggtgctattttactatattttttgggagcttacacgctgacagatgttccagatgttttactggccacacaaggttaatgtaattgtatacattgtcagttgaatcttgtgtgtcgggtgaatgaatattcgagcccacagtttgcgaccctgcagcatatgccgaagtgaagcttttgtgaggacattcggctaagttgaccc

SEQ ID NO: 21707 - DNA, 768 bp, Zea Mays
aggctccaggcacactttgagaaggtgaagaggatttgcgacactaccacattgcctttggctatgcatcatctcagtgataagataacaagccaactggatatttcaaaattgactgacaaactacggcaagcaaaggtagactcaagtgcactgacaccaaaggagaagtacgaaacctgggaggagattaaaattaagagtttcgcaaagatagtttcttcaatgtgggcaatgacattgcttagcttgtatgttagagttcaggtcaccatattaggcaggcatctctacttagattttgcccaaggtacaaatggtccacagttacagaatctgacacctttagtgaaaatggacacaggagctttcttgcaatggctgattatcttgtcactgacaaaatcactggattcctaacgcaaatgcaacgtgcagcaactgaagtccttaaagagaagcaactgaaagaccgtatgaacatggaccaagtattgcagacagtattacaaatattggacatgttcatgggcctttctgaagataactcatggataaattatcttgtacctgagaatccccctgtttatgcacagttgatggctgtgtccagtagtggctttgatgattcatcactcctaaacgatttcagaaagctagaccaactaatgtctgagacacgaatagtactggcaaggtgtggatgacaacaatcacgtgcaaggaacccttccgttgagacagttgctatgttgcaaatcaaaagag

SEQ ID NO: 21708 - DNA, 1420 bp, Zea Mays
aggctccaggcacactttgagaaggtgaagaggatttgcgacactaccacattgcctttggctatgcatcatctcagtgataagataacaagccaactggatatttcaaaattgactgacaaactacggcaagcaaaggtagactcaagtgcactgacaccaaaggagaagtacgaaacctgggaggagattaaaattaagagtttcgcaaagatagtttcttcaatgtgggcaatgacattgcttagcttgtatgttagagttcaggtcaccatattaggcaggcatctctacttagattttgcccaaggcagaatctgacacctttagtgaaaatggacacaggagctttcttgcaatggctgattatcttgtcactgacaaaatcactggattcctaacgcaaatgcaacgtgcagcaactgaagtccttaaagagaagcaactgaaagaccgtatgaacatggaccaagtattgcagacagtattacaaatattggacatgttcatgggcctttctgaagataactcatggataaattatcttgtacctgagaatccccctgtttatgcacagttgatggctgtgtccagtagtggctttgatgattcatcactcctaaacgatttcagaaagctagaccaactaatgtctgagacacgaatagtactggcaagtgatgatttcagaaatatcatggagaggtcattgaggaagatcgcgggagtggtggtagaggatctgggtgtgcagattgtaactccaggatcgggattgcccttagcaacgctcttgcccaaagttgatcatctgagttccccgttgcttgaggaaccaaacaagaacaaacacattcagatcatccgaagtatgccggaagtggaactcttctacacattgctctacacaaacatgccaccagaaacgtaatccgtacattgatgtgaaaagaacacttgcttctgaattttggctacaaagatctggtggtatatgtgcaggttgagccgcctgaaatcaggaaactgataaacgtggagagatataggttggcattttctgccctgtatatactgagaatgagatattccgttgttgctaacaggaactgagtaaggttccttccatttggattctttcttgttttttcaaggttcggttgtgcacgtctaggtagaacctcacgaatcgggtctgctattttactattttttgggtgctattttactatattttttgggagcttacacgctgacagatgttccagatgttttactggccacacaaggttaatgtaattgtatacattgtcagttgaatcttgtgtgtcgggtgaatgaatattcgagcccacagtttgcgaccctgcagcatatgccgaagtgaagcttttgtgaggacattcggctaagttgaccc

SEQ ID NO: 21709 - DNA, 1439 bp, Zea Mays
aggctccaggcacactttgagaaggtgaagaggatttgcgacactaccacattgcctttggctatgcatcatctcagtgataagataacaagccaactggatatttcaaaattgactgacaaactacggcaagcaaaggtagactcaagtgcactgacaccaaaggagaagtacgaaacctgggaggagattaaaattaagagtttcgcaaagatagtttcttcaatgtgggcaatgacattgcttagcttgtatgttagagttcaggtcaccatattaggcaggcatctctacttagattttgcccaaggtacaaatggtccacagttacagaatctgacacctttagtgaaaatggacacaggagctttcttgcaatggctgattatcttgtcactgacaaaatcactggattcctaacgcaaatgcaacgtgcagcaactgaagtccttaaagagaagcaactgaaagaccgtatgaacatggaccaagtattgcagacagtattacaaatattggacatgttcatgggcctttctgaagataactcatggataaattatcttgtacctgagaatccccctgtttatgcacagttgatggctgtgtccagtagtggctttgatgattcatcactcctaaacgatttcagaaagctagaccaactaatgtctgagacacgaatagtactggcaagtgatgatttcagaaatatcatggagaggtcattgaggaagatcgcgggagtggtggtagaggatctgggtgtgcagattgtaactccaggatcgggattgcccttagcaacgctcttgcccaaagttgatcatctgagttccccgttgcttgaggaaccaaacaagaacaaacacattcagatcatccgaagtatgccggaagtggaactcttctacacattgctctacacaaacatgccaccagaaacgtaatccgtacattgatgtgaaaagaacacttgcttctgaattttggctacaaagatctggtggtatatgtgcaggttgagccgcctgaaatcaggaaactgataaacgtggagagatataggttggcattttctgccctgtatatactgagaatgagatattccgttgttgctaacaggaactgagtaaggttccttccatttggattctttcttgttttttcaaggttcggttgtgcacgtctaggtagaacctcacgaatcgggtctgctattttactattttttgggtgctattttactatattttttgggagcttacacgctgacagatgttccagatgttttactggccacacaaggttaatgtaattgtatacattgtcagttgaatcttgtgtgtcgggtgaatgaatattcgagcccacagtttgcgaccctgcagcatatgccgaagtgaagcttttgtgaggacattcggctaagttgaccc

SEQ ID NO: 21710 - DNA, 2161 bp, Zea Mays
ctttgaccgaacagctccacgtctgggccctctctctaccacacataattgaagggtttgccgttcggaggacggtgatccctgtctgtttctgtttctctctagagatcccataccgccgccagcccgccgctgtgcctcatcgccggcgacggcgcagaacaacccagccgatcagccgtcctcacatcgaagtctccatacaccagtggcatcgcccccatatttcgcccgttgcattgaactactgcagagtggagatccgtctatccatgacccacccagcaggccctggatcgatctgtcattctcttggtaattaacccacgcttgctcggaggaacgctgcagggcacaagaaatgcagagggatgccggctccggcgaccggacgccgggcaccccgagcccgacgcacggtggccggctcaggcaccggaagcgctccaacgaggtccccagcgacgtgaacacgactaatggcgccaacctgctcttaaacgaccagaacaagtacaagtcgatgctagttcgtacctactcctcactgtggatgatggccggggtcgtgttcttgatatatatgggccatctctacatctgggccatggtggtggtcgtccaaatcttcatggcaaaggagctcttcaaccttctccgcaaggccaatgaggaccggcagctcccagggttcaggatgctcaactggcattttttctttactgcgatgctgtttacctacgggcgcttccttagccatcagcttgttaacacgatgacttcagataagttgttgtacaagctggtgagcaggctcatcaagtaccagatgtttatttgctactttctttacatagcaggttcatcctcccagcttcgttaattgctatcaatgatgttgctgcatatttctttgggttcttctttgggaaaacaccactgatcaagctctctccaaagaaaacatgggaaggctttataggtgcatcagtgacaacattgctttctgcatttgtggttgctaatttcatgggccatttccagtggttaacatgcccaagaaaggatctatcaactggatggctttattgtgacccaggtcccatgtttacaccagaaggttatgatctaccgggatggataccacaatggtttccatggcgagaaattgcaattatgcccgttcaatggcatgcattagctcttggcttgtttgcttcaataatagcaccatttggtggcttttttgcaagtggattcaagagggcattcaaatttaaggattttggggacagcatacctggtcatggtggatttacagataggatggactgccaaatggtcatggctgtttttgcgtacatctattaccaatcatttgtaatggtacaggacttatctgttgagacaatcctggagcagatactacgtaatctcacctttgaggagcagcgtgagctatatggacagctaggcaagttacttgtgagagcgaactgaagctaacagtggccgtggaagcacctgatccaaaaggataatgcgcaatgctttttcaggccttgcttttttgttaatcttcttgtacagccctagcacccctaaggatgagacgaagaaccacaacgctgacagggatcgcatcgctgtatgacgttttggagcatacagctcccgtctttttcagagatttgtgtcacctttttgatttgcttctggtgctacgcttgttgccgcatcaaaaccagctaacgctgttttgtcgtgtcagtggtttatttgacaatgtgtaggagatttccacctgtgagtctcttcgctagtactagtagccggtgatgcatccatgtttttgttactgtatctactacctccgttcacaaaatatatgatgttgttgactgttttttttataaaatttaataattcatattattcaaaaaattgtaagctatcatttattttgttgtcgtcttccaaataaatattttaaataaagagtgattaaaattttacagaaaaaaaaagagtcaacggtgtgtcttatcaacggtaatttaatttaaggcagtttgatgattatctaagacattccctcgttcagccattcagtactcattttgttcaagtgaacatatctcgtgcacttaagtttttagtg

SEQ ID NO: 21711 - DNA, 2268 bp, Zea Mays
ccctctctctaccacacataattgaagggtttgccgttcggaggacggtgatccctgtctgtttctgtttctctctagagatcccataccgccgccagcccgccgctgtgcctcatcgccggcgacggcgcagaacaacccagccgatcagccgtcctcacatcgaagtctccatacaccagtggcatcgcccccatatttcgcccgttgcattgaactactgcagagtggagatccgtctatccatgacccacccagcaggccctggatcgatctgtcattctcttggtaattaacccacgcttgctcggaggaacgctgcagggcacaagaaatgcagagggatgccggctccggcgaccggacgccgggcaccccgagcccgacgcacggtggccggctcaggcaccggaagcgctccaacgagcgacgtgaacacgactaatggcgccaacctgctcttaaacgaccagaacaagtacaagtcgatgctagttcgtacctactcctcactgtggatgatggccggggtcgtgttcttgatatatatgggccatctctacatctgggccatggtggtggtcgtccaaatcttcatggcaaaggagctcttcaaccttctccgcaaggccaatgaggaccggcagctcccagggttcaggatgctcaactggcattttttctttactgcgatgctgtttacctacgggcgcttccttagccatcagcttgttaacacgatgacttcagataagttgttgtacaagctggtgagcaggctcatcaagtaccagatgtttatttgctactttctttacatagcaggttttgtttggtttattatcacactaaagaaaaagacatacaagtaccagttcagtcaatatgcatggactcacatgatccttctcatggtatttgcccagtcatctttcactgtggcaaacatttttgatggaatattctggttcatcctcccagcttcgttaattgctatcaatgatgttgctgcatatttctttgggttcttctttgggaaaacaccactgatcaagctctctccaaagaaaacatgggaaggctttataggtgcatcagtgacaacattgctttctgcatttgtggttgctaatttcatgggccatttccagtggttaacatgcccaagaaaggatctatcaactggatggctttattgtgacccaggtcccatgtttacaccagaaggttatgatctaccgggatggataccacaatggtttccatggcgagaaattgcaattatgcccgttcaatggcatgcattagctcttggcttgtttgcttcaataatagcaccatttggtggcttttttgcaagtggattcaagagggcattcaaatttaaggattttggggacagcatacctggtcatggtggatttacagataggatggactgccaaatggtcatggctgtttttgcgtacatctattaccaatcatttgtaatggtacaggacttatctgttgagacaatcctggagcagatactacgtaatctcacctttgaggagcagcgtgagctatatggacagctaggcaagttacttgtgagagcgaactgaagctaacagtggccgtggaagcacctgatccaaaaggataatgcgcaatgctttttcaggccttgcttttttgttaatcttcttgtacagccctagcacccctaaggatgagacgaagaaccacaacgctgacagggatcgcatcgctgtatgacgttttggagcatacagctcccgtctttttcagagatttgtgtcacctttttgatttgcttctggtgctacgcttgttgccgcatcaaaaccagctaacgctgttttgtcgtgtcagtggtttatttgacaatgtgtaggagatttccacctgtgagtctcttcgctagtactagtagccggtgatgcatccatgtttttgttactgtatctactacctccgttcacaaaatatatgatgttgttgactgttttttttataaaatttaataattcatattattcaaaaaattgtaagctatcatttattttgttgtcgtcttccaaataaatattttaaataaagagtgattaaaattttacagaaaaaaaaagagtcaacggtgtgtcttatcaacggtaatttaatttaaggcagtttgatgattatctaagacattccctcgttcagccattcagtactcattttgttcaagtgaacatatctcgtgcacttaagtttttagtg

SEQ ID NO: 21712 - DNA, 2836 bp, Zea Mays
ccctctctctaccacacataattgaagggtttgccgttcggaggacggtgatccctgtctgtttctgtttctctctagagatcccataccgccgccagcccgccgctgtgcctcatcgccggcgacggcgcagaacaacccagccgatcagccgtcctcacatcgaagtctccatacaccagtggcatcgcccccatatttcgcccgttgcattgaactactgcagagtggagatccgtctatccatgacccacccagcaggccctggatcgatctgtcattctcttggtaattaacccacgcttgctcggaggaacgctgcagggcacaagaaatgcagagggatgccggctccggcgaccggacgccgggcaccccgagcccgacgcacggtggccggctcaggcaccggaagcgctccaacgaggtccccagcgacgtgaacacgactaatggcgccaacctgctcttaaacgaccagaacaagtacaagtcgatgctagttcgtacctactcctcactgtggatgatggccggggtcgtgttcttgatatatatgggccatctctacatctgggccatggtggtggtcgtccaaatcttcatggcaaaggagctcttcaaccttctccgcaaggccaatgaggaccggcagctcccagggttcaggatgctcaactggcattttttctttactgcgatgctgtttacctacgggcgcttccttagccatcagcttgttaacacgatgacttcagataagttgttgtacaagctggtgagcaggctcatcaagtaccagatgtttatttgctactttctttacatagcaggtaactgtggcaaaaaaattttgttcccaaataagggtcatgaaatgtacaagtttacatcataggtcagttcaatattttaatagttcttgatttgataggctggcattggacccagggagttcagtctgacaacgacatttggtccatttcccttttggtagatgtgtttagaaatgtaggccggagaagtagtgccatcaaacctcctcaaacgggactttgcttagtgagttttttagagtgacaaggaacagttcttccttcattctccagttcataatgtttttttagttgattttgtttattgagtaaaggtggttttattgtgtttatatttattgagtgatggtggttgggaaggctgtatatgatgtgactgtacaatgcaatataatcctctatgttgttcccattaagtttgggtccttaagcacttaagttttatagcacataaattcgtaagctgttttttttacaaaaaaatgaggcaaatgcattctcataaagtttgaaaattgcttgcttattgccaccatagtaatttatttattttctaggttttgtttggtttattatcacactaaagaaaaagacatacaagtaccagttcagtcaatatgcatggactcacatgatccttctcatggtatttgcccagtcatctttcactgtggcaaacatttttgatggaatattctggttcatcctcccagcttcgttaattgctatcaatgatgttgctgcatatttctttgggttcttctttgggaaaacaccactgatcaagctctctccaaagaaaacatgggaaggctttataggtgcatcagtgacaacattgctttctgcatttgtggttgctaatttcatgggccatttccagtggttaacatgcccaagaaaggatctatcaactggatggctttattgtgacccaggtcccatgtttacaccagaaggttatgatctaccgggatggataccacaatggtttccatggcgagaaattgcaattatgcccgttcaatggcatgcattagctcttggcttgtttgcttcaataatagcaccatttggtggcttttttgcaagtggattcaagagggcattcaaatttaaggattttggggacagcatacctggtcatggtggatttacagataggatggactgccaaatggtcatggctgtttttgcgtacatctattaccaatcatttgtaatggtacaggacttatctgttgagacaatcctggagcagatactacgtaatctcacctttgaggagcagcgtgagctatatggacagctaggcaagttacttgtgagagcgaactgaagctaacagtggccgtggaagcacctgatccaaaaggataatgcgcaatgctttttcaggccttgcttttttgttaatcttcttgtacagccctagcacccctaaggatgagacgaagaaccacaacgctgacagggatcgcatcgctgtatgacgttttggagcatacagctcccgtctttttcagagatttgtgtcacctttttgatttgcttctggtgctacgcttgttgccgcatcaaaaccagctaacgctgttttgtcgtgtcagtggtttatttgacaatgtgtaggagatttccacctgtgagtctcttcgctagtactagtagccggtgatgcatccatgtttttgttactgtatctactacctccgttcacaaaatatatgatgttgttgactgttttttttataaaatttaataattcatattattcaaaaaattgtaagctatcatttattttgttgtcgtcttccaaataaatattttaaataaagagtgattaaaattttacagaaaaaaaaagagtcaacggtgtgtcttatcaacggtaatttaatttaaggcagtttgatgattatctaagacattccctcgttcagccattcagtactcattttgttcaagtgaacatatctcgtgcacttaagtttttagtg

SEQ ID NO: 21713 - DNA, 2247 bp, Zea Mays
ccctctctctaccacacataattgaagggtttgccgttcggaggacggtgatccctgtctgtttctgtttctctctagagatcccataccgccgccagcccgccgctgtgcctcatcgccggcgacggcgcagaacaacccagccgatcagccgtcctcacatcgaagtctccatacaccagtggcatcgcccccatatttcgcccgttgcattgaactactgcagagtggagatccgtctatccatgacccacccagcaggccctggatcgatctgtcattctcttggtaattaacccacgcttgctcggaggaacgctgcagggcacaagaaatgcagagggatgccggctccggcgaccggacgccgggcaccccgagcccgacgcacggtggccggctcaggcaccggaagcgctccaacgaggtccccagcgacgtgaacacgactaatggcgccaacctgctcttaaacgaccagaacaagtacaagtcgatgctagttcgtacctactcctcactgtggatgatggccggggtcgtgttcttgatatatatgggccatctctacatctgggccatggtggtggtcgtccaaatcttcatggcaaaggagctcttcaaccttctccgcaaggccaatgaggaccggcagctcccagggttcaggatgctcaactggcattttttctttactgcgatgctgtttacctacgggcgcttccttagccatcagcttgttaacacgatgacttcagataagttgttgtacaagctggtgagcaggctcatcaagtaccagatgtttatttgctactttctttacatagcagaaaaagacatacaagtaccagttcagtcaatatgcatggactcacatgatccttctcatggtatttgcccagtcatctttcactgtggcaaacatttttgatggaatattctggttcatcctcccagcttcgttaattgctatcaatgatgttgctgcatatttctttgggttcttctttgggaaaacaccactgatcaagctctctccaaagaaaacatgggaaggctttataggtgcatcagtgacaacattgctttctgcatttgtggttgctaatttcatgggccatttccagtggttaacatgcccaagaaaggatctatcaactggatggctttattgtgacccaggtcccatgtttacaccagaaggttatgatctaccgggatggataccacaatggtttccatggcgagaaattgcaattatgcccgttcaatggcatgcattagctcttggcttgtttgcttcaataatagcaccatttggtggcttttttgcaagtggattcaagagggcattcaaatttaaggattttggggacagcatacctggtcatggtggatttacagataggatggactgccaaatggtcatggctgtttttgcgtacatctattaccaatcatttgtaatggtacaggacttatctgttgagacaatcctggagcagatactacgtaatctcacctttgaggagcagcgtgagctatatggacagctaggcaagttacttgtgagagcgaactgaagctaacagtggccgtggaagcacctgatccaaaaggataatgcgcaatgctttttcaggccttgcttttttgttaatcttcttgtacagccctagcacccctaaggatgagacgaagaaccacaacgctgacagggatcgcatcgctgtatgacgttttggagcatacagctcccgtctttttcagagatttgtgtcacctttttgatttgcttctggtgctacgcttgttgccgcatcaaaaccagctaacgctgttttgtcgtgtcagtggtttatttgacaatgtgtaggagatttccacctgtgagtctcttcgctagtactagtagccggtgatgcatccatgtttttgttactgtatctactacctccgttcacaaaatatatgatgttgttgactgttttttttataaaatttaataattcatattattcaaaaaattgtaagctatcatttattttgttgtcgtcttccaaataaatattttaaataaagagtgattaaaattttacagaaaaaaaaagagtcaacggtgtgtcttatcaacggtaatttaatttaaggcagtttgatgattatctaagacattccctcgttcagccattcagtactcattttgttcaagtgaacatatctcgtgcacttaagtttttagtg

SEQ ID NO: 21714 - DNA, 1546 bp, Zea Mays
gtctgacaacgacatttggtccatttcccttttggtagatgtgtttagaaatgtaggccggagaagtagtgccatcaaacctcctcaaacgggactttgcttagttttgtttggtttattatcacactaaagaaaaagacatacaagtaccagttcagtcaatatgcatggactcacatgatccttctcatggtatttgcccagtcatctttcactgtggcaaacatttttgatggaatattctggttcatcctcccagcttcgttaattgctatcaatgatgttgctgcatatttctttgggttcttctttgggaaaacaccactgatcaagctctctccaaagaaaacatgggaaggctttataggtgcatcagtgacaacattgctttctgcatttgtggttgctaatttcatgggccatttccagtggttaacatgcccaagaaaggatctatcaactggatggctttattgtgacccaggtcccatgtttacaccagaaggttatgatctaccgggatggataccacaatggtttccatggcgagaaattgcaattatgcccgttcaatggcatgcattagctcttggcttgtttgcttcaataatagcaccatttggtggcttttttgcaagtggattcaagagggcattcaaatttaaggattttggggacagcatacctggtcatggtggatttacagataggatggactgccaaatggtcatggctgtttttgcgtacatctattaccaatcatttgtaatggtacaggacttatctgttgagacaatcctggagcagatactacgtaatctcacctttgaggagcagcgtgagctatatggacagctaggcaagttacttgtgagagcgaactgaagctaacagtggccgtggaagcacctgatccaaaaggataatgcgcaatgctttttcaggccttgcttttttgttaatcttcttgtacagccctagcacccctaaggatgagacgaagaaccacaacgctgacagggatcgcatcgctgtatgacgttttggagcatacagctcccgtctttttcagagatttgtgtcacctttttgatttgcttctggtgctacgcttgttgccgcatcaaaaccagctaacgctgttttgtcgtgtcagtggtttatttgacaatgtgtaggagatttccacctgtgagtctcttcgctagtactagtagccggtgatgcatccatgtttttgttactgtatctactacctccgttcacaaaatatatgatgttgttgactgttttttttataaaatttaataattcatattattcaaaaaattgtaagctatcatttattttgttgtcgtcttccaaataaatattttaaataaagagtgattaaaattttacagaaaaaaaaagagtcaacggtgtgtcttatcaacggtaatttaatttaaggcagtttgatgattatctaagacattccctcgttcagccattcagtactcattttgttcaagtgaacatatctcgtgcacttaagtttttagtg

SEQ ID NO: 21715 - DNA, 2478 bp, Zea Mays
ctccttttctggttccacgaaggagagggaacactaggaaaccaagccagcatctgatctttattagctgcttctctgttcctagctcctcccatatgggagtacttcgccaaggcaacacacggggcaaacaggcattgcgagaagctgctctgctataatggctctgctataaggtggagaagagaagccgatggccgcagccgaggtcctgacggccgcatgggaggaatggggcctgcgggcgctggtgctgctcagcctaacggtgcaggtgacgctccacatcctggcggagttccggcgccacgtcgactccggcgcgctgagggccgtggtatggtcggcgtacatggcggccgacgcgacggcggtctacgtgctgggccacctgtccgtggccagccggtcgccggagcgcgagctgacggcgctgtgggcgccgttcctgctgctgcacctgggcgggcaggacaagatgacggcctacgccatcgaggacaaccagctgtggctgcgccacctgcagacgctcgtcgtccaggtggccgccgccgcctacgtggtctacgggtcctccgccatcgtcggcgcgcgccggctccccttgctcctcgcggccaccgtcaccatgtccgccgtcggcgtcgtcaagtacggggagcgagtgtgggcgctccggcgcgccggcactagcccgaccggcaactacagcagcgacatcgggaagaggaggttcaacctggcggtgcccgattctttcatcagccgcttggatcccgcggagacctacctgctgcacgctcacctgctgctggacatggccaaggacaggttcaagggtccgctaccgcgtctgtatctgtgcgggcccggcagccaggaaacgcagctgcacggcgaggaggagctgtacaaggtggccgagctgcagctgtcgctcctgcacgacgtcttctacaccaaggccgaggccacgcacacctggtgcggcctctgcgcccgcgtgctgtcgtcgctggccaccgccgccgcgttcgtgctgttcaacgcgctgctcctgggcgcccatcgccgcaagctggagggctacagcagaggcgacgtggcggtcacctacgtcctcttcgtcggcgccgtcgtgctggaggccgcgtcgctcgtgagggccgtgttgtcgagctggacatgcgcgctgcttgtcaagcacggctccgaaggcagcgcggtgtgcaactccctagcccccgcggccgtgtacctccgccggctggtccgcgcggcggagtggaggtggtggcgctgctggtcgcgctctatggggcagctcggtctggtccagctgtgcgtgcgcagcagggccagccggtacagcagggtcgctagatggatgggcgtggaggactggtggaacacgatggcctattccggcccgtccgtccccgtgtcgccggacgtcaggaagctgctgctcaagagcctgaaggcgaggccgtgggatcgagagcagttcgagagcagagggctgtacggccgggagctgggccttgactgggtcgcagagtcgaagctggaggcgaggatcctcgtctggcacgtcgccaccgagctctacctgtactggtttaacaaggatcagctgccgctgccgctgccggccgccggtgctggtgttgcggacctcgtcgaggtcgctcagtcgctgtccagctacatgctcttcctgctggcatcgcgcccacacatgctgcctcccgacgccagccgcaacgactacctcgtggtgtgctacgctctcaccacccacgagaggtacagcacagccgacgatctgctctcctcgctacagcgctttgcggacgcgctgtgggccaacaactctgcgccggagtacgaactgcgttgcaagaatactaatcggcgtgggtacaaggtgttgaggggaggatgctcgcttgctgcgttcctcatccaccaccaacaccaagaagactcctcctcctcctcctcctcctcgcctgccggtggcaccggcaccctggaaatgatctgcagggtgtgggcgcagatgctgtgctgcgttgccgacgagtgcagcgccaattctcatgcaaagcaactcagcggcggcggcgagttccttactgtcgttgctcttgtagccaaattcatgaggtccaagaggttgtcctggcacttgcacatagaatctcagcgtacagacgaatggtaaattatacgtactagctaggtagggcgactgcttctacaagtatggccatgcctgttctgtgtgtgcactggtcgtttgtttggtttactggtcatctgcaagctggccacaagtagtaggtggtgtttttagttggctgttttacaccatgcattgcattaagcaatacgccgtagccactctctggcccacaaaaaaaaagtctaaaatcaagaacaccttagccaattgagatcgatgccttc

SEQ ID NO: 21716 - DNA, 589 bp, Zea Mays
cacacacactaatattgttgcagcggaaatcttactaccaaattttacaggttacaaaaattttacattagtttatcggagtgattacaaaagtgtaagtttgaaatatatgctagctcaagggatcatcctcaataagaagtatagaagggttacttagacttataagaaggccgagcccaccggcacttaacaccatcaacaacagcacaaagttagaacctgaaaaacaacagggaataaaaccctgagtatggaattactcagcaagacttacccgactaaagaaaagactctcaagggtatgctggcttaagggagtcaaggtaaggcttttcaataatcaaagactctgttttgcagaaatgcttactaaagtggatccttagaaatccagttttatttgtcaagttaagtagaattacctgtgactagagttctttctaccctagttcaatcactggtcctgcactagccaatttcttaacaaaaacccatcatctttagtggaatgctacgtgtaagtcagtgaccaagtcttcataaccgcgaaggtacggcgatccgaatcgattatactcagctgagg

SEQ ID NO: 21717 - DNA, 1113 bp, Zea Mays
acacctagtggcgaggcgttgtacaattttgtacggaaacactagttattaatatacgactacgcgtaacgattacgcttctcgaagctaacgcaaacatcacgaacaacaaactatacacatgaaatacaattaacctacacaactcaccagctaattaattaaatgctaaccttatctcttgctttataatttatactacatctttataagggattaaaatattggcctactaatattctactcggtacactaattcagctaattgtccggaatagcgaaataaatcgctataatagaacctggctcgataatcgcaagaaccgcgaagtcgacgagagttccgtgactcgcgtaatttatcgagcaactagtgagtatcacactagcacattaatttattcaacaattgaactattctgaataactcatcgacttaccatgaccagaatgatttgataatcgtagatcgacgatgagcattggttcagacttcccatcgaacacatgacagggattgtgctcgaaggcggctttcaggggaagagctcgacaggggctttggagctcaacacaagtgacacgcatctggcagatagatcgtcgggatcgacgggcatgtcgcgacgcggcgtgggttgacgacgaagaataaaggggctgctagcttcgacttcagcaccaatctccttccaaaattataatcggctcgaacttcacaaagaaaatgattaaaccctggttcaggatgtacgacgatcagctggcaggcggggtgtactagagctttggttccttaatccttcatcagctgggactccttttccaatcatcacatacacaggagagcagcgcaagtaccctgtcaaaatgacggattgacgaagtcgctgctcacggcgcggcgtcgaaggacggcaacgttgcatcaactagcaacagcaaacgatgttgtaccaacggcagggccgaaaacgacgatggcagggagcttcgacggctgggcgcgcggcgaagagaaggaacgctcggctgggagcttctgccggcgaacaggaagagcagaggatggacgcgacgcagggattggggccgaaaacgacgatggcaggg

SEQ ID NO: 21718 - DNA, 370 bp, Zea Mays
cagaagatttcatgtgcatcataattctaaaactttagcccctttacaccaagttgtgtacatgaagaaacacaagcggctctttttttaatgagcccaaggacgaaacacaagcggctcttccgctattcgtattttttaatgagtccatggacgtttccagcaacttgacatgctgtagctaagctgtagatctctctaggagctgctctgtagccggatatcacacataaatttttttttgacaatctacgtggaccgttcaagtaccatcgtatggctttttgacaaggcccctgaacctgtgaaggtctgatctcattctgatcatagtccaagccaacgtccaatcttatagatggcattgttg

SEQ ID NO: 21719 - DNA, 2261 bp, Zea Mays
ctcgatccaagataggtgccgcctccacttgggttcctagtctagtggtctggtcgtactccgtgtcttcatcgtcggaagaatcaatgtcggcgtagtcatccgatgtccactgctggcgaagcttacaatgagtcgcaccctggtaccaagcttggtaccgcctgtagtcactgttgttgtgcaactcatcgttttcatgcacattctcctcagccaaatcccactcttcaataaattccagatgatgttgacgaaagtctgttatcttcttttgcttccgccggtcaaatctacacacaaaccatatcatttaaagggctatggaggctgccacacgcgcgagcttgctcgcgtttcacgttttttcgtgttatttatcgtgtgacatgtgacttgtgacactgagtgatcgcgtcatgacatgttctaaacgacagtttaatttttgccttttgtttatttggttatcaaatatcacacctagactgccacatcaaccaggagtaacgggcacgcacgttacgtgcgagatctccaagcggttgcacgtagagatatttcagggggcggttcctgcaatatagcaaatcgaatcaaggggttgttgcggcccgtctataaagggcaggtgtccttcggtcggaggacagaggcgaatagcaacagactcatcctcttcttttcaattctctgtgtcgtcgcttctctgccctgtcgtcccttcgtctgccgtgcagcagatcaagggagagcgatgtctctaaaccactgtcggcgttttgatgacctgcacgagtgccggcgaatcaggtttctgggaagtgcttcatgcacgtccgctcgggctcttcttcaacactcgtggaaatcactgtgagtaaatctgcggtttcagattattgcgatgacggtcttatggttagatccgttgtcgattcttatgttatgagttaatcttgttgagttagttcagatctgttctgttctaatatcgttgatattatctgccagtagatctggatttttcgttttgtgctgcattatcaaattaatcttaggtcctattaatttttcaacacgggcgggatcgagtccttagcttggaagcaattaggccctggcacagtggcatgtacaggccatacatgattaacactagtaactggcgcgcgcattgcgcgcgtgggaaaaattataatataagtgataacattttgagcaagatatacatatactcatctaaatagagttaggtaaattatcgtgtttcaacgtttgaaattaagttgttatatttatacaaattttcttgaaaaggatgaagaaacatatatatatatatacataattgtagagagcatacaaaaataaacaccctagaacttcaaaggttgttgatggtagaaggcaacatttagttttgggaagatttcggatactcatgggtccttgaacctgttgatgaattatggaaaatataatgagttgttacatatattttcatttatggactaatttgtatttgtatctttttttcacaaatggaactttatgtaaagatacaggaagaactttaagcagaatcataagtgcaggttttggctgaccattattagttgattttatttagcgatatttttaaaattgtcctaatttcacagttgttaacaattattttatagattattattaagtcttaacaaagtagaacatgacatgatgtatgtgaagtttgttgtgtcctagaattagagcattaggctggaaatagtatggtatgcacattggacatgaaacgtctgtttggcatacactatagtgagattactaatcagaaatagcaactaggcatggcgtaatgccttaaatcaggtattctctttaggcccactgagaacaaaagtcactttcttcaaagtaaagcagtaaaactccgtctaaacttgtgtttcctcaaataaaaaagttgtatgatgaccagaatcactaagaaatttgaaaaattatggtaaccaaacactcacctgagtttccttcaagcgatcacctatgtaaccacttttagcaaaacgctcgttgcagcaaaatcaatcaagttaatgactctttggctgggttggcctgttttcttcaaccaaaaaaatgggagctatactttctcaggattagttatttagcatgcaaaatatttgtctaaaaagggattgtcgccagtctgaaagagagcataaggaacactatattttagtagatcttgg

SEQ ID NO: 21720 - DNA, 1037 bp, Zea Mays
ctaattcaacggaacataaaaagcacatattgtgattacctccatgaccatcaaaaacaccgaagaacgttgtctcgctatcaagatctagcattcctgaatgatgtatggatgtatagattggtaaatattgtgttatggaacaattttgagaagttgcctgaccgataaaaaatggtaggcatctttataaaaaataaccatgcttgtagtgtgatgttgaatatactaaaatcaatgtattaaacagatcaaatgagatcaaaggatgaaaggaatatggatttagtatcaaaagagagctaatgcctgtagtctatgacaaatcattggttcactcttttcagtgtggtattgaacttattaaaactattgtgttaaactgataaaatgagatgaaaggaatatggttttagtattgttacaacttggtgcataaataataattgattttttggaagataattagtggttgttagaatctttcacttattttaacgccgaggattttttctgtcatttcttataaaaaatacaaaaaggatttattgggttgcatgtcatttatttttggggctcgacagggaagacatgtaccttttttgtatttacatgtgcaaagaacaattttagtatgtcattgatctggaaatacatggtaaccaaacactcacctaagttcacctgtggagccacttttagcaagacgctcactaccagctaaatgaatcaagttaaggactacttggacatgttgccatgtgtcgtgcaataaaaacagaatctttctagcccaagtgaacaccctgtccctaaagtaattgcggcttggatggctttgacaaggagggagggggtatcacggccatgaaatcaaaccctccctttgagatgataatgattgctttatctactcaaagttctcaaataatccatgcatcatacccacaactactccacctgtcactggaattaacaatatcctatgccaagtatcagcaagcctctgcagacaaagccaagaagcaccctcagtg

SEQ ID NO: 21721 - DNA, 175 bp, Zea Mays
gtcgacaccacggtcaaagatgtcgccaagctggacagcgagggtggacccggtggcccatgaggtggaggcggcggatggggagtcggggctgcggggcacgaccgcacgaggccggcgaggcggagcacggagaaagacgatccgccgcgatgcgtctaggagtaatggacgg

SEQ ID NO: 21722 - DNA, 2142 bp, Zea Mays
atggcggcggcagaggtgtactcgccgaccgaggcggtggcggcgcagcagcagcgggagaaggcggcatcgcagattatcctcatgcccggccgcggtacaacagcaacagccatgaaaccccattgtgtcgcgccctcgacgtgttcgacggaatatcgcagcacgtgccgacccgatctgcagccctggttgcgaggacgtcaaaccccgctaccgtcgacgttgtgcctcacgcttcaccaatgcgatgaaatgtctgagcgaatagacgacatgcgacccgagtttgattctgccaggttgtttgatgtgtattttactcattgtgatttagttgatgatgtgtttacagttaagtgtttggagacgggtgagactgttgccataaagaaggttcttcaggataagcgttacaagaaccatgggattgtgattagttacttcattgcaaaaaaaattaggaacagtattaatgtgtgtacccattgcttgaagcttcatatcgatggagctcgcatcttccatgcgtctgcagcacttggagttcttgtagatagactcgtgaaagctgctgattcagttttggtatgcctatcgaaagggttaggcgcacccgtcggatctgtgattgttggttcaaaggcatccattgacaaggccagaattctccggaagaccctaggcggtggaatgagacacgtgggagttctttgtgctgctgctcatgttgccgttcgtgacactgtgggaaagcttgcggatgaccacaaaaaggctaaagctttggcagtttgggtattgaagcttttatgtcttgttgggttcattttcttagagggactgaagaaaatcgagcagattacagtggactcagcttcggtcgagaccaatatgttcaagctctacaaggtgaggtctgttctgtttggccagaaaggcatcccatacctgaatacctacgatggccgcaccatgcgctaccccgaccctctcatcaaggccaacgacaccatcaagatcgatctggagaccaacaagatcatggacttcatcaagttgtatttgccctttcatggacttcatcaaaatatactgccaagttctgcttcagatccttcggggcacgccgtcctgcgcccaactctttccttcgttggcgttcggtacccgctcctctctgggcccgcggcctcgaacccatcgccggaggtggccttcatgccgctccgctccgagatcccagctaacgcggcacctgcccagacacctgcgcctgagcccgtgggccgcctcatgctggattatgacatatatattatcttatcagctgatccagtacacaggctgttatactgtaagtgtttctttgattgcacggcaccggtgctgtacaacgtgctcctgacgttgcaggacagcgtgcataaggtcttctacgccgtcgtcgaggccgctgcagttcgcgcagacaacagccatcttggagggttggtgaggggagaattgcccaaaacccttaagcaaacccctttggacaatgggaaccctagatatggccccattcacctctaccaacatgtgctgaatgcaggggatgacatgattggtgttgagtgcttagaagaagattgtgatggcaagtgtttctttgattgccgtcgtcgaggccgctgcagttcgcgcagaaaacaaccatcttggaggtatctaattccaatattgtatgtctcggttgaacttgtgaaggcgttgcaagcacatatcattaactgggatattcatatgtttgatgaggagatcggcaataccactcagggtggcaagtttgaccatgcagatcgtttgttccaaagcattgagagcgcttacataaatagattatcaaatacaagtgacgtcaaagagcttattccagaattcttttacatgccagagtttcttgaaaattcaaattcatatcatcttggtgtcaagcaggatggggaacttataggcgatgttgctctccctccatgggcaaaggataataactcaagtgacgagtttgacaaagattctattgagagtggtgatagatctcttgaagagctaagctgggagacactggaacttcttgtggtacctcatatattcaggtaa

SEQ ID NO: 21723 - DNA, 1581 bp, Zea Mays
cacgatttgtgatccatattttctccaacagaccacctaaagccggaccctattctgggctttcacccgtgcatgacccatatatcgggactctgcgacacaaatcggtcccgcggtaccaacggcgatactcgaaacaacggaaagggacggaacgaaggatagaaaaaaaagaagcggcggcggcgacaagagtcgagggccgctacaacctaggtacacgccgccggcaccaaggatggagaatgggcagctgtcaaatgaatgggctgaagaacagaacgaacaatacttgcatgatgattgggctgacagcttaggtgttttcattgagaatccagaatatgcgaacacatttgaggacgacacgtcctctcagcaaacgtttccatcccacgagaaagcaaaaggtaaagaacagaagaaactaagaaagcagaaaaatgttgcccatagagggtctgcctttaccaaggaggaggatgctgtgatttgctcggcctttctccatgtcagtaaggatcccattgcaggagttaatcaaagtgcatgtgcttactacaaaagaatgtatgattttttctgtgagaacaaaccagaacgctcaacaagaagtcagattggcataaaaaaaggtggcaacttatccaaaaggcagttagtaagttttctgcattcaaatcgaaagttgataggcgaaatgaaagtggcaaaaaatgaacaggataggatcgatgatgttgtgaagatgtacgaggagaaggaagctttccaattcttgcactgttggaagctgctacataatgagcccaagtggaatgataaagtgctagagctaaacaacactccgacaagaaaaacacaacaaccagaaggcccctgtaatcccgttggtacacaacccaacactgaaaatgcagcaattacaaggcctgaaggtcgtgatactgcaaaaaaaagaaggttcaaagaagacactgcatcatctagtgctgctgtagaagtgttgcagtagatgcaagagaggaatgaaaaaacagaagagaagcaagatgaacagatgcaagagatcctgacattgaaggggaataaaatgaggcttactgagaagatgtttgacttgcagaagcatgaaatggaagttaagaacaagttgaaggaggagcagctcagtcttaccaagcaggacatagaagcaagggccaaacaaagcgaggcacaactgcttactgctgaattgggcatcatgggagcagacttagataaactttctcccagtgtgagagcatactacgtcgccatgcagcagcaaatcatggagcgtagaggcatcatcacccctcacaacaatgatgcggcatagaagcacttctgtagtactgctatatgtattactttcatatccagacttgtatttgccttaatttattcagactgcttgtatgtgttcatcaagttattctacaactatctataatttttgctataatttattctgtagtactgctatcgtgagagctaagacttgaatctataatctattgtatgtgttcatcaagttattatggtgctgtaattttt

SEQ ID NO: 21724 - DNA, 1593 bp, Zea Mays
cacgatttgtgatccatattttctccaacagaccacctaaagccggaccctattctgggctttcacccgtgcatgacccatatatcgggactctgcgacacaaatcggtcccgcggtaccaacggcgatactcgaaacaacggaaagggacggaacgaaggatagaaaaaaaagaagcggcggcggcgacaagagtcgagggccgctacaacctaggtacacgccgccggcaccaaggatggagaatgggcagctgtcaaatgaatgggctgaagaacagaacgaacaatacttgcatgatgattgggctgacagcttaggtgttttcattgagaatccagaatatgcgaacacatttgagtattctcgacaggacgacacgtcctctcagcaaacgtttccatcccacgagaaagcaaaaggtaaagaacagaagaaactaagaaagcagaaaaatgttgcccatagagggtctgcctttaccaaggaggaggatgctgtgatttgctcggcctttctccatgtcagtaaggatcccattgcaggagttaatcaaagtgcatgtgcttactacaaaagaatgtatgattttttctgtgagaacaaaccagaacgctcaacaagaagtcagattggcataaaaaaaggtggcaacttatccaaaaggcagttagtaagttttctgcattcaaatcgaaagttgataggcgaaatgaaagtggcaaaaaatgaacaggataggatcgatgatgttgtgaagatgtacgaggagaaggaagctttccaattcttgcactgttggaagctgctacataatgagcccaagtggaatgataaagtgctagagctaaacaacactccgacaagaaaaacacaacaaccagaaggcccctgtaatcccgttggtacacaacccaacactgaaaatgcagcaattacaaggcctgaaggtcgtgatactgcaaaaaaaagaaggttcaaagaagacactgcatcatctagtgctgctgtagaagtgttgcagtagatgcaagagaggaatgaaaaaacagaagagaagcaagatgaacagatgcaagagatcctgacattgaaggggaataaaatgaggcttactgagaagatgtttgacttgcagaagcatgaaatggaagttaagaacaagttgaaggaggagcagctcagtcttaccaagcaggacatagaagcaagggccaaacaaagcgaggcacaactgcttactgctgaattgggcatcatgggagcagacttagataaactttctcccagtgtgagagcatactacgtcgccatgcagcagcaaatcatggagcgtagaggcatcatcacccctcacaacaatgatgcggcatagaagcacttctgtagtactgctatatgtattactttcatatccagacttgtatttgccttaatttattcagactgcttgtatgtgttcatcaagttattctacaactatctataatttttgctataatttattctgtagtactgctatcgtgagagctaagacttgaatctataatctattgtatgtgttcatcaagttattatggtgctgtaattttt

SEQ ID NO: 21725 - DNA, 2402 bp, Zea Mays
ggactggagcgaggtacgcggcggtgaggtgtggtcgacccgagagggaggccgggagcgagggactgagtgacacgaagcgggacggagctcgatcagagctgcccttttagggcttgttcgctttggagtggattgagggggattggaggggattaaatcccctcctatatataggaggggatttaatcccctccaatccccctcaatccactccaagcgaacaagccctaaaagggcagctctgatcgagctccgtcccgcttcgtgtcactcagtccctcgctcccggcctccctctcgggtcgaccacacctcaccgccgcgtacctcgctccagtccagtcctacctggacggcctgccaacacaaccaagagggcatttctcaccatcgtcccatggcgtcgacggagatggagatgggcgtcgtaggcggcggcgtcaatagcagtggaggaggcagctgcggcgggctggtggtgacggagctgagccacatcaaggagctggtgaggcagctggaggtgcacctcggcgggtccccggacctgtgcaagcacctggcctcgcagatcttctccctcaccgagcgctccatcggcctcatcacatcctccaacctcgacggtgcccggcggcagaagcggcccgcgggcgacgccggcctcgcctcgccgctctcggcgacgcccaccagcgacgtcaccgacgggcctttccagagcaccaagaagaagaggaaggtgatggaacagcggaggcagagggtgagctctgccggcggcgagaacccggtcgaggacggccatagctggaggaagtacggccagaaggagatcctcggagccaagcacccaaggttggcaggcacacacgcatctcgctcagaaatgtgttgatttggcttaagtttcagagcccaagcaatctgttccctcagacacgtgtgactgtgtgtcctcccaagtcccaagtgggatcgaaatcattcgcgtctgcctttttgggttcggatgcttgtgcctgtcctgtccgactcctttctgaaagttgggtgctgtagcctttgttgtgttcttgcatgattgattagcccctccacttggcacataaggcaattggatttggattacgacagtgcgctgcaatctttccttgctgctgccagtctagtcttgctccgaattcacaatcaaaatatctccctttatttttggaaccgtggctaatctccggcgtgcaaaatcctcgcaggggctactaccgctgcacgcaccgccactcgcaggggtgcccggcgacgaagcaggtgcagcgcaccgacgaggacccgacggtgtacgacgtgatctaccacggcgggcacacctgcgtccacagggcggcggcgggccaggcccaggccacggcgccgccggagcacagaccggacgcgcacggccacctgcggagcctgggcgccggcctcaccgtgaagacggaaacggaggagggcctgcccgcggccgcgcccttgtgcctctccgcctccacgccgccggtgagcggcggcgggtgcccgtgcccgtgcctggcgccgtccacgccggagaactggggcgtgtcgcccgcgagctccaactccaaccacgccgcctcctacctgccgttcgaggacgccgagtggcgggggcacgccgggctccaggaagtggtgtccgccagcgcgccgcctccgcccgccgtggacagcctcgacgacctcctcctcctcgtcgacatagacgacatcgccagcttgttcgactgatccgcacaccgtacgtagctgatgaacggtagggaatcgaagaaggcacgagtacgacgagtataatgtgaccgagccctctggctccggggtccggtcgggcgttcgttcgtgcctggaacggaacggaacggaggagggaagagcgctagagctctgctttcctgggtccatgcagatggtgataccgtaggagatgatgatgaaaaagagtagtggttttattttacgttttttgggctactcctcgctttttttgttaacctttttcctcctcttctgaggcctgagggtgctgtgtttgtgttgtattgtattgtattattggtttcttattatgccaagggggaaaaaaataagatccttcgagccatctgagaattgtctttgatctcaattatcagtagttttgctctgcttctaaacccttacatataaatgtattttgaaatcacaaatgcatttaaggttttttttgtgtgtgtgtgtgtggatgtctcagtgtctggacgcagttctgaattgagcacaagatagtttgtcatttgccaacactgaacctgaatactgaccatgttttgtccttgtaataataataaatagaagaaaaa

SEQ ID NO: 21726 - DNA, 1933 bp, Zea Mays
atgatgaaatttaagaagggaggatgttgtggcaaggcgtccaaagatgaaaatacaagaaaagataacatgatactattaggtaagagagaagcaaagcaagcaacaccggctgccgacgcgcaggtcagtacaatgagaggatcgatgttctgcggcggagatctccggtggtggatgttggccatcttcttcctctgcacactaattgctgccgcggaggagcgcgtcgtcacccatctccccggcttccagggaccactccccttccagctccgaactgggtacgtggaggtggacgaggacaatggcgtccgcctcttctactacttcaccctctccgagggctcctcagccgacgacccggtcatgctctggctcagcggcggccccggatgcacttccttcaccggcctcgtctatcagattggccctctcagtttcgaccttgacagctacatgggtggcctgcctaagctggtgtacagacctgagtcctggaccaaggtgagcaatatcatttttcttgattccccggttggagctggattttcatactctgtcaaagagcaaggatacaattcaagtgacacaaaagctgtcagccatattctggtctttctcaagaagtggtttgacgagcacccagagttcttgtcaaatccactttacattggcggtgattcatacgctggtatgattgtgcctaccgtcacttctgaaattgctaagggtttgaaaattgttggtagtaaacctacaatgaatctaaagggctgccttgttggaaatccattcacagatcaatcaaactttgatgggccatcgaaaattccatttgctcataggatggctctcatatctgaccaaatgtacaagtcatacaagaagagttgccgtggaggagacaacaggcaccaaagcatccagtgcagaaatagtcttgatgccatagatgagtgtgtcaaggatatatctgagtttcacgttctggagccccgctgtgcttatgcaagccctcaccaatacaatgttctcaagctgaagacgagtttaggtgttcagaagatgcagcagctaccagacttcactgcagaagggcttcacttgtctgagatttctacagaacaatgctatatacactgtctagaatatgggcaaacaatgccacagtgagggaggctcttgggattcacaagggaacagttcccctatggttaagatgcaacacggacataccgtatttgaaagatattaagagttcagtgaagtaccatttggatgtgaccaccaaaggatacaaaagtctagtttacagtggtgatcatgacatgggtgtaccttatattggcacacaatcctggattaggtcacttaatttctctattgtggatgactggagaccatggtatgttgatgggcaagttgcaggatatacagtgttgtactcaaataacctcacatttgcaacggtgaagggtgctgggcatactgctccagaatacatgccaaggcaatgccttgctatgctttcaaggtggcttgctggtgataccctttgattggcgcatagagatgcactgctacatagttgtatagactttatgtgtatgtaagtgagttacttgggactagttgtctggattgttgtgtctaggcttttcgtcgtttttccctttaataaaccgagcgattgtaatgttttcgggtctgttgtccctaataaaaatttggtcaattcttttgtacctacagtgaaatgcagaactctgcccttttaaaaaagagaggttctatacaattatggtaaactcatgtaatccttttgcaatcctttacagaacctccccgaaaaggattgcaagcataatattcgatcgaaggaaaaaaatcaaataaggttctgttgagcaccgaattgagcctgtggacg

SEQ ID NO: 21727 - DNA, 1957 bp, Zea Mays
atgatgaaatttaagaagggaggatgttgtggcaaggcgtccaaagatgaaaatacaagaaaagataacatgatactattaggtaagagagaagcaaagcaagcaacaccggctgccgacgcgcaggtcagtacaatgagaggatcgatgttctgcggcggagatctccggtggtggatgttggccatcttcttcctctgcacactaattgctgccgcggaggagcgcgtcgtcacccatctccccggcttccagggaccactccccttccagctccgaactgggtacgtggaggtggacgaggacaatggcgtccgcctcttctactacttcaccctctccgagggctcctcagccgacgacccggtcatgctctggctcagcggcggccccggatgcacttccttcaccggcctcgtctatcagattggccctctcagtttcgaccttgacagctacatgggtggcctgcctaagctggtgtacagacctgagtcctggaccaaggtgagcaatatcatttttcttgattccccggttggagctggattttcatactctgtcaaagagcaaggatacaattcaagtgacacaaaagctgtcagccatattctggtctttctcaagaagtggtttgacgagcacccagagttcttgtcaaatccactttacattggcggtgattcatacgctggtatgattgtgcctaccgtcacttctgaaattgctaagggtttgaaaattgttggtagtaaacctacaatgaatctaaagggctgccttgttggaaatccattcacagatcaatcaaactttgatgggccatcgaaaattccatttgctcataggatggctctcatatctgaccaaatgtacaagtcatacaagaagagttgccgtggaggagacaacaggcaccaaagcatccagtgcagaaatagtcttgatgccatagatgagtgtgtcaaggatatatctgagtttcacgttctggagccccgctgtgcttatgcaagccctcaccaatacaatgttctcaagctgaagacgagtttaggtgttcagaagatgcagcagctaccagacttcactgcagaagggcttcacttgtctgagatttctacagagtgcagagtttgtgcctagatgagacaatgctatatacactgtctagaatatgggcaaacaatgccacagtgagggaggctcttgggattcacaagggaacagttcccctatggttaagatgcaacacggacataccgtatttgaaagatattaagagttcagtgaagtaccatttggatgtgaccaccaaaggatacaaaagtctagtttacagtggtgatcatgacatgggtgtaccttatattggcacacaatcctggattaggtcacttaatttctctattgtggatgactggagaccatggtatgttgatgggcaagttgcaggatatacagtgttgtactcaaataacctcacatttgcaacggtgaagggtgctgggcatactgctccagaatacatgccaaggcaatgccttgctatgctttcaaggtggcttgctggtgataccctttgattggcgcatagagatgcactgctacatagttgtatagactttatgtgtatgtaagtgagttacttgggactagttgtctggattgttgtgtctaggcttttcgtcgtttttccctttaataaaccgagcgattgtaatgttttcgggtctgttgtccctaataaaaatttggtcaattcttttgtacctacagtgaaatgcagaactctgcccttttaaaaaagagaggttctatacaattatggtaaactcatgtaatccttttgcaatcctttacagaacctccccgaaaaggattgcaagcataatattcgatcgaaggaaaaaaatcaaataaggttctgttgagcaccgaattgagcctgtggacg

SEQ ID NO: 21728 - DNA, 1286 bp, Zea Mays
gcctatagccatctccaccgtaacatcagggtcctcctttacacgacggtcgttcagcaacacgcctcatccgtggcagcgggcagcggctcggacagcgctcattcagttcgtcacggcctcgcagtcttgcagatctgaggacgggccgtaagggtactagagccggcgccggcggttacctggggcggccgccccacctcgctgttacggtaggtccgtccctaacctcgaagattcgacgcaagcgggcggtgaatccaatggcgggcgaggaagagctcactgtaggcggcggcgtgcccatccggccgccgcggctggaagacgcggggctcgaggactgcgcgctcccgccggagtctatcgctgaggcattctccctcgctgccgcggccgtctcctcccgcctcgcccggctgcccttctccgaagactccgacgaggaggactgcgtctcggcaccacgcggaggaggctgcgtggatgacgccggactcgactgcggggccgcccccgtctcccttgtcggcggcggcgttgcgggcgtcggcagcgtcgacgaagtcgtggtcgtcggcggaggacgcggaggcggatacgaggacgcggtagtggtcggtgggcgcgcagaagaggaggatacagtcgtggtggtcggggaacagcctagggacagggagaagaagctggggaaggatgatggatgtgtcgagggggtgcgagaaggggtcagtgaacccagacgggcgcaaggcgatgaagacggcgaggaggcggcagagaaggcgatcttggtgccagatttcgactgaacagctcaatttctgatcgctgaatctggcatctcgctgtagcttgggccaaggttgctggcattggacattggtaaagtgcagagatggcaatggacgttgatccccgatttcccgcggaaaattactccattagagcatggtgatgtagaattttcttctcccatgcagatataagagcggaaaattctttcccctacgggtaaacagggattaggacggggaagtatcccctcattctcgtggggacctgttaaacctgcgtgtgacgatgttttcatgtactagttaattataaaaataaataattagcttgtcaaaagatcaatcattacaaatgtgttcattttgatgagcacataatgatttcttacatctaacaatatgtataagtgaaattgttttgtattaataataaaggatgtatattctaattataatttaaacggagacggggatctcctttggaat

SEQ ID NO: 21729 - DNA, 2257 bp, Zea Mays
gtagctttaagattttttagcaggacacgagaaaaaacatgtatacttttttaagacggaaaaccatgtttagtagtggtattatttggcggctcatacgggtctcaccctccctgtatccctctgaccctctcggcggcgactgggcgacagccgctgtctcactacgcctggtgcccaggtatctctgccggcgacgagcacctgccaggggtatgggaatggaggtcgttggtgctgaagcagcaccagcagagatcaaagtatctgatgatgtgaatctattccaagagaaggaaagcaaagcaactgctaaagaacgtgaggaggcagctgtttttggttcagagacaactaccaatgtcactgatctggcacctccaacggatgtgaaggatgagtggcctgaacctaagcaaacttatgccttctacttcatcaaggtccgctcatttgaggatcctaaactgagggcaaaactcgagcaagctgacaaagaattccagaagaagatccaagctcgttctaaacttatcgaggcagtaagagccaagaaggcagagcgctccagtattatcgcggagctgaagccattgagcgctgagaacaagcaatataatggagttgtgaatgagaagataaaggagatggagcctcttcggaacagcttgggcaagtttcgtgaggaaaacaatgccatgagagcacagagtgcaggtttatgctcttctatcgaagaccttgacctaacgatcaagatgctgaatgatcgcatcgtacatgagagcatacctttatctgaggagaagcgtctggtgaaagaaattaaagaccttgaaaaaaccagatcgaaagtcatctctaatgctgctaacagggctaaactgcaaggtacagtggttgaaaaagaggctatacaggaccaggtcaaaatcattggggagggcattgatgaaataaagaaagaaagacaggctgtaagatctaagattaaggtcctggaggatgagctaaaacttgttgatgctgagattgcatcgcttcaagaagatttagatgcagcaactgccagaaaggacaaggcatatgaattgttgcaagaattgagagcaggtcgcgatgcgaaaaacgcacccttcatgcaaaatcgtacagttttagccaaagctagggattattctttgaggaatatgctatcagaactgcaagagctccacaaggctgaggtcgacaaattcatgagccaatggtgtgaaagtaaggccttcagagaggactacgagaagagaatcctcacctccctaaacagccgacagctgactcgagatggtcggatgaggaatcctgatgagaagcccatatttatcgagtcacaggcgccagctccagagccagagccgttccctgtaaaattgcctgcaaaacaagtcaaggaagtgcctgctcctcaggcagataatgcttccaagattgaagctccttcaaaaggacctgtccagttgcacaaggcaaaagctgctctcgatgctgatgatgattatgaggcagcaaaagctgtggcccgagcacagaaggaagctgagaagaagctgaagaaagaggagaagaaagccaagaagaaatctggtgcagctgacactgatgagccctcagaatcggatgccaagtctgacgaagccatggaagccccagcggaacaagaagtggccccagcttccaccacggtaaagaaagaacagaaggagagtgcccggtacaggaatgtggtgagccggagcaaggccccgctacccaaggcgatcctgaagaggaagaaggctcagtcctactggtcatgggctggcccagctgccatggtggctgctgtgctagttgccctccttgcggtgctgggatactaccagtactactacctcccagcgaataccagcaactgagtggatgaggcccgtgtactcccccccgccaggccatttgatgatgtggagaccaattttgcaggtgagaagaaagagtgcatggtctgcttttgagacgtgaaggatcggagaaaagtcctgttcattttcgatgttagtttatatatatttcgtggagcctaagatacagttggttttggttgcgactttgctagatctcgctctctctatatatactgcgactgatatatcccatgtaattttgacgtgaagcatatattgacatctggaataatgcctttcgctttaggtatctcaattctcataatgccccgtcc

SEQ ID NO: 21730 - DNA, 2346 bp, Zea Mays
caaggcttgcgtgttctcaccccttgcgttctcttctgttctctctctctcacacaaggtctcaccctccctgtatccctctgaccctctcggcggcgactgggcgacagccgctgtctcactacgcctggtgcccaggtatctctgccggcgacgagcacctgccagctgcaggggtatgggaatggaggtcgttggtgctgaagcagcaccagcagagatcaaagtatctgatgatgtgaatctattccaagagaaggaaagcaaagcaactgctaaagaacgtgaggaggcagctgtttttggttcagagacaactaccaatgtcactgatctggcacctccaacggatgtgaaggatgagtggcctgaacctaagcaaacttatgccttctacttcatcaaggtccgctcatttgaggatcctaaactgagggcaaaactcgagcaagctgacaaagaattccagaagaagatccaagctcgttctaaacttatcgaggcagtaagagccaagaaggcagagcgctccagtattatcgcggagctgaagccattgagcgctgagaacaagcaatataatggagttgtgaatgagaagataaaggagatggagcctcttcggaacagcttgggcaagtttcgtgaggaaaacaatgccatgagagcacagagtgcaggtttatgctcttctatcgaagaccttgacctaacgatgctgaatgatcgcatcgtacatgagagcatacctttatctgaggagaagcgtctggtgaaagaaattaaagaccttgaaaaaaccagatcgaaagtcatctctaatgctgctaacagggctaaactgcaaggtacagtggttgaaaaagaggctatacaggaccaggtcaaaatcattggggagggcattgatgaaataaagaaagaaagacaggctgtaagatctaagattaaggtcctggaggatgagctaaaacttgttgatgctgagattgcatcgcttcaagaagatttagatgcagcaactgccagaaaggacaaggcatatgaattgttgcaagaattgagagcaggtcgcgatgcgaaaaacgcacccttcatgcaaaatcgtacagttttagccaaagctagggattattctttgaggaatatgctatcagaactgcaagagctccacaaggctgaggtcgacaaattcatgagccaatggtgtgaaagtaaggccttcagagaggactacgagaagagaatcctcacctccctaaacagccgacagctgactcgagatggtcggatgaggaatcctgatgagaagcccatatttatcgagtcacaggcgccagctccagagccagagccgttccctgtaaaattgcctgcaaaacaagtcaaggaagtgcctgctcctcaggcagataatgcttccaagattgaagctccttcaaaaggacctgtccagttgcacaaggcaaaagctgctctcgatgctgatgatgattatgaggccgagcccccgaaggagaaggcaaagcctacgggggctgatgtggcgaagttgaaagagatgaagaggcaggaggagattgagaagaacaagcttgccttggagaggaagaagaggcaggctgagaagcaggcagcaaaagctgtggcccgagcacagaaggaagctgagaagaagctgaagaaagaggagaagaaagccaagaagaaatctggtgcagctgacactgatgagccctcagaatcggatgccaagtctgacgaagccatggaagccccagcggaacaagaagtggccccagcttccaccacggtaaagaaagaacagaaggagagtgcccggtacaggaatgtggtgagccggagcaaggccccgctacccaaggcgatcctgaagaggaagaaggctcagtcctactggtcatgggctggcccagctgccatggtggctgctgtgctagttgccctccttgcggtgctgggatactaccagtactactacctcccagcgaataccagcaactgagtggatgaggcccgtgtactcccccccgccaggccatttgatgatgtggagaccaattttgcaggtgagaagaaagagtgcatggtctgcttttgagacgtgaaggatcggagaaaagtcctgttcattttcgatgttagtttatatatatttcgtggagcctaagatacagttggttttggttgcgactttgctagatctcgctctctctatatatactgcgactgatatatcccatgtaattttgacgtgaagcatatattgacatctggaataatgcctttcgctttaggtatctcaattctcataatgccccgtcc

SEQ ID NO: 21731 - DNA, 2324 bp, Zea Mays
caaggcttgcgtgttctcaccccttgcgttctcttctgttctctctctctcacacaaggtctcaccctccctgtatccctctgaccctctcggcggcgactgggcgacagccgctgtctcactacgcctggtgcccaggtatctctgccggcgacgagcacctgccagctgcaggggtatgggaatggaggtcgttggtgctgaagcagcaccagcagagatcaaagtatctgatgatgtgaatctattccaagagaaggaaagcaaagcaactgctaaagaacgtgaggaggcagctgtttttggttcagagacaactaccaatgtcactgatctggcacctccaacggatgtgaaggatgagtggcctgaacctaagcaaacttatgccttctacttcatcaaggtccgctcatttgaggatcctaaactgagggcaaaactcgagcaagctgacaaagaattccagaagaagatccaagctcgttctaaacttatcgaggcagtaagagccaagaaggcagagcgctccagtattatcgcggagctgaagccattgagcgctgagaacaagcaatataatggagttgtgaatgagaagataaaggagatggagcctcttcggaacagcttgggcaagtttcgtgaggaaaacaatgccatgagagcacagagtgcaggtttatgctcttctatcgaagaccttgacctaacgatcaagatgctgaatgatcgcatcgtacatgagagcatacctttatctgaggagaagcgtctggtgaaagaaattaaagaccttgaaaaaaccagatcgaaagtcatctctaatgctgctaacagggctaaactgcaaggtacagtggttgaaaaagaggctatacaggaccaggtcaaaatcattggggagggcattgatgaaataaagaaagaaagacaggctgtaagatctaagattaaggtcctggaggatgagctaaaacttgttgatgctgagattgcatcgcttcaagaagatttagatgcagcaactgccagaaaggacaaggcatatgaattgttgcaagaattgagagcaggtcgcgatgcgaaattttagccaaagctagggattattctttgaggaatatgctatcagaactgcaagagctccacaaggctgaggtcgacaaattcatgagccaatggtgtgaaagtaaggccttcagagaggactacgagaagagaatcctcacctccctaaacagccgacagctgactcgagatggtcggatgaggaatcctgatgagaagcccatatttatcgagtcacaggcgccagctccagagccagagccgttccctgtaaaattgcctgcaaaacaagtcaaggaagtgcctgctcctcaggcagataatgcttccaagattgaagctccttcaaaaggacctgtccagttgcacaaggcaaaagctgctctcgatgctgatgatgattatgaggccgagcccccgaaggagaaggcaaagcctacgggggctgatgtggcgaagttgaaagagatgaagaggcaggaggagattgagaagaacaagcttgccttggagaggaagaagaggcaggctgagaagcaggcagcaaaagctgtggcccgagcacagaaggaagctgagaagaagctgaagaaagaggagaagaaagccaagaagaaatctggtgcagctgacactgatgagccctcagaatcggatgccaagtctgacgaagccatggaagccccagcggaacaagaagtggccccagcttccaccacggtaaagaaagaacagaaggagagtgcccggtacaggaatgtggtgagccggagcaaggccccgctacccaaggcgatcctgaagaggaagaaggctcagtcctactggtcatgggctggcccagctgccatggtggctgctgtgctagttgccctccttgcggtgctgggatactaccagtactactacctcccagcgaataccagcaactgagtggatgaggcccgtgtactcccccccgccaggccatttgatgatgtggagaccaattttgcaggtgagaagaaagagtgcatggtctgcttttgagacgtgaaggatcggagaaaagtcctgttcattttcgatgttagtttatatatatttcgtggagcctaagatacagttggttttggttgcgactttgctagatctcgctctctctatatatactgcgactgatatatcccatgtaattttgacgtgaagcatatattgacatctggaataatgcctttcgctttaggtatctcaattctcataatgccccgtcc

SEQ ID NO: 21732 - DNA, 2246 bp, Zea Mays
gctagttccttcgataggagcttcttctcgtccagttcgtgtgttgaatccgccgctgtagcaatctggggtatgggaatggaggtcgttggtgctgaagcagcaccagcagagatcaaagtatctgatgatgtgaatctattccaagagaaggaaagcaaagcaactgctaaagaacgtgaggaggcagctgtttttggttcagagacaactaccaatgtcactgatctggcacctccaacggatgtgaaggatgagtggcctgaacctaagcaaacttatgccttctacttcatcaaggtccgctcatttgaggatcctaaactgagggcaaaactcgagcaagctgacaaagaattccagaagaagatccaagctcgttctaaacttatcgaggcagtaagagccaagaaggcagagcgctccagtattatcgcggagctgaagccattgagcgctgagaacaagcaatataatggagttgtgaatgagaagataaaggagatggagcctcttcggaacagcttgggcaagtttcgtgaggaaaacaatgccatgagagcacagagtgcaggtttatgctcttctatcgaagaccttgacctaacgatcaagatgctgaatgatcgcatcgtacatgagagcatacctttatctgaggagaagcgtctggtgaaagaaattaaagaccttgaaaaaaccagatcgaaagtcatctctaatgctgctaacagggctaaactgcaaggtacagtggttgaaaaagaggctatacaggaccaggtcaaaatcattggggagggcattgatgaaataaagaaagaaagacaggctgtaagatctaagattaaggtcctggaggatgagctaaaacttgttgatgctgagattgcatcgcttcaagaagatttagatgcagcaactgccagaaaggacaaggcatatgaattgttgcaagaattgagagcaggtcgcgatgcgaaaaacgcacccttcatgcaaaatcgtacagttttagccaaagctagggattattctttgaggaatatgctatcagaactgcaagagctccacaaggctgaggtcgacaaattcatgagccaatggtgtgaaagtaaggccttcagagaggactacgagaagagaatcctcacctccctaaacagccgacagctgactcgagatggtcggatgaggaatcctgatgagaagcccatatttatcgagtcacaggcgccagctccagagccagagccgttccctgtaaaattgcctgcaaaacaagtcaaggaagtgcctgctcctcaggcagataatgcttccaagattgaagctccttcaaaaggacctgtccagttgcacaaggcaaaagctgctctcgatgctgatgatgattatgaggccgagcccccgaaggagaaggcaaagcctacgggggctgatgtggcgaagttgaaagagatgaagaggcaggaggagattgagaagaacaagcttgccttggagaggaagaagaggcaggctgagaagcaggcagcaaaagctgtggcccgagcacagaaggaagctgagaagaagctgaagaaagaggagaagaaagccaagaagaaatctggtgcagctgacactgatgagccctcagaatcggatgccaagtctgacgaagccatggaagccccagcggaacaagaagtggccccagcttccaccacggtaaagaaagaacagaaggagagtgcccggtacaggaatgtggtgagccggagcaaggccccgctacccaaggcgatcctgaagaggaagaaggctcagtcctactggtcatgggctggcccagctgccatggtggctgctgtgctagttgccctccttgcggtgctgggatactaccagtactactacctcccagcgaataccagcaactgagtggatgaggcccgtgtactcccccccgccaggccatttgatgatgtggagaccaattttgcaggtgagaagaaagagtgcatggtctgcttttgagacgtgaaggatcggagaaaagtcctgttcattttcgatgttagtttatatatatttcgtggagcctaagatacagttggttttggttgcgactttgctagatctcgctctctctatatatactgcgactgatatatcccatgtaattttgacgtgaagcatatattgacatctggaataatgcctttcgctttaggtatctcaattctcataatgccccgtcc

SEQ ID NO: 21733 - DNA, 2212 bp, Zea Mays
gtgttgaatccgccgctgtagcaatctgctgcaggggtatgggaatggaggtcgttggtgctgaagcagcaccagcagagatcaaagtatctgatgatgtgaatctattccaagagaaggaaagcaaagcaactgctaaagaacgtgaggaggcagctgtttttggttcagagacaactaccaatgtcactgatctggcacctccaacggatgtgaaggatgagtggcctgaacctaagcaaacttatgccttctacttcatcaaggtccgctcatttgaggatcctaaactgagggcaaaactcgagcaagctgacaaagaattccagaagaagatccaagctcgttctaaacttatcgaggcagtaagagccaagaaggcagagcgctccagtattatcgcggagctgaagccattgagcgctgagaacaagcaatataatggagttgtgaatgagaagataaaggagatggagcctcttcggaacagcttgggcaagtttcgtgaggaaaacaatgccatgagagcacagagtgcaggtttatgctcttctatcgaagaccttgacctaacgatcaagatgctgaatgatcgcatcgtacatgagagcatacctttatctgaggagaagcgtctggtgaaagaaattaaagaccttgaaaaaaccagatcgaaagtcatctctaatgctgctaacagggctaaactgcaaggtacagtggttgaaaaagaggctatacaggaccaggtcaaaatcattggggagggcattgatgaaataaagaaagaaagacaggctgtaagatctaagattaaggtcctggaggatgagctaaaacttgttgatgctgagattgcatcgcttcaagaagatttagatgcagcaactgccagaaaggacaaggcatatgaattgttgcaagaattgagagcaggtcgcgatgcgaaaaacgcacccttcatgcaaaatcgtacagttttagccaaagctagggattattctttgaggaatatgctatcagaactgcaagagctccacaaggctgaggtcgacaaattcatgagccaatggtgtgaaagtaaggccttcagagaggactacgagaagagaatcctcacctccctaaacagccgacagctgactcgagatggtcggatgaggaatcctgatgagaagcccatatttatcgagtcacaggcgccagctccagagccagagccgttccctgtaaaattgcctgcaaaacaagtcaaggaagtgcctgctcctcaggcagataatgcttccaagattgaagctccttcaaaaggacctgtccagttgcacaaggcaaaagctgctctcgatgctgatgatgattatgaggccgagcccccgaaggagaaggcaaagcctacgggggctgatgtggcgaagttgaaagagatgaagaggcaggaggagattgagaagaacaagcttgccttggagaggaagaagaggcaggctgagaagcaggcagcaaaagctgtggcccgagcacagaaggaagctgagaagaagctgaagaaagaggagaagaaagccaagaagaaatctggtgcagctgacactgatgagccctcagaatcggatgccaagtctgacgaagccatggaagccccagcggaacaagaagtggccccagcttccaccacggtaaagaaagaacagaaggagagtgcccggtacaggaatgtggtgagccggagcaaggccccgctacccaaggcgatcctgaagaggaagaaggctcagtcctactggtcatgggctggcccagctgccatggtggctgctgtgctagttgccctccttgcggtgctgggatactaccagtactactacctcccagcgaataccagcaactgagtggatgaggcccgtgtactcccccccgccaggccatttgatgatgtggagaccaattttgcaggtgagaagaaagagtgcatggtctgcttttgagacgtgaaggatcggagaaaagtcctgttcattttcgatgttagtttatatatatttcgtggagcctaagatacagttggttttggttgcgactttgctagatctcgctctctctatatatactgcgactgatatatcccatgtaattttgacgtgaagcatatattgacatctggaataatgcctttcgctttaggtatctcaattctcataatgccccgtcc

SEQ ID NO: 21734 - DNA, 2442 bp, Zea Mays
ccacgaccgcggttgcgagaatatctcttctgcgattacacactgatggctctgctccttggctccaggtgctagccgaggccacaagcgcgttgttccataccgacgcagagaataagtggaagggcgtgtggatcgagattgacagcggtggagacgacggctagagcgagaggagcagcgccgtggccagcgaggggagcacagtcacggccgccgcgtctgcgggctccacagccacgtcgaggagatgctgttgggctccgtggatgcaagctgggccagcgacggagaacgacattcgtgccgccatcggcgacaactccggcatgagcaaagcgatacgatagctgttgaagcaggagggcgacttgcggcatgcaggcaatggtggtgccctggatccgtatgtttatatggcacttgaatttgttaagcagctaggagaggctttgcattcagtcaattccaaatcaactagccacaatttggaattaatttatgttattccggctccaagaatgcaaaagctcaataattaggactttggacccaaagatctcatgcatctggctgacactgtagatgggttttctcttatgacatacgacttctcaggacctcaggatcctggtcccagtgcacctctaaagtggatacatcattctttagcagcagttctttcagcaaaagattcctctcatagcaattcacattcacggatgatattccttggcatcaacttttatggttatgattttctactatctggaggtgctactcccaaattgtgtgttccttctccggggaaaccatgaatcctttaatatggtttcgagaaggagataatgactaaatacaaagatcaaggcccttaactttatcgaaagttttaaagatgttttggggaccttcctctagcggcaataatagcaggatgtgtgtacactgcacgtggaggtgtcttcactagttccatggtacaattgtaatgccatcacataattcaaaaaaggggggaaagggtcacaaatacaaggcgaattttactaatgatttgacttccatgaaacttggatcattggatgagttattaaaagcaatgataactgttcttgaccctccttgggaaggctcaaatttgatccctagggatgtgatgtggtctgacccttccttgcagatgggtctttctccgaataaagatcaagacattggattgctttggggtcctgatatcactcagcaatttctgaggacaaataatttgaagcgacgcacaggcgaattgatcatgtggaggcctggaagtgtaatggtggtttaccgagggagcatttacaaaaggcctctaaaatctcaagctctaaatggtgcctcatcatcggttaaaggcgaatttggtgcattgttcatcccaaatgcctcgaatgccgttgagaatgatattcaagggatatatttgtctgcaaaacatgcaactgtgtccctattgaatgtgtagaatattaagcacatgaatgaggaagggttggagttcaattagataatgatgagctaggtcctcattttgtggattggtgggaacggagctgactagccaaagttagtgaggaaccttccatgccattttgctctagggagaaaccagaactatcaagtttagcagcagtaatataataaggagcatgttgtaactgccccagcgttggtgtggacagcagtaatatattgctcatcgattgcaaataattttattctaatttttcatcacatcaccaagaggtatggacacaactttgcctttttctatttcctcttattgttatgaggatagcaatatcaatatataaatataacctcgacaaaacacatctgattactgtctcatgcctgaaaaatcactctataaagtgtaacatctgattactgtctcatgcaacaatgaatgaaattagaaggcttgaaaggtaacaataagttttgactcagagtgaacaaaaatattttatcaatacaattcgccattatatcttcacttaacgatttcatcagttgttattgattaaatatttgtagggatgtcaaacatgttagtattattggcttaaaagcagctagggtctttgccaaaggcacacaatgtttcttcatcctaggaacacaaattctggctactgattttcttatttgttgtcatccatccagaatttcatttactaaatggtactgcatagaagactagaatttgtgccatttcatttactaaatggtactgcatagacgaccagaatttcaaaggcactcagagttagtgccatttcatttcattaaagaagaagagtacaaagtaatatgaccaaggaagccatgcatagacgaccagtcactcaattaaaagtgaaatgtcaaaccgtgcacactgctaacattcagtgtaat

SEQ ID NO: 21735 - DNA, 1728 bp, Zea Mays
gtgagcttgactctgcctccaacttccatttgaaaaggctgttgaagcaggagggcgacttgcggcatgcaggcaatggtggtgccctggatccgtatgtttatatggacctcaggatcctggtcccagtgcacctctaaagtggatacatcattctttagcagcagttctttcagcaaaagattcctctcatagcaattcacattcacggatgatattccttggcatcaacttttatggttatgattttctactatctggaggtgctactcccaaattgtgtgttccttctccggggaaaccatgaatcctttaatatggtttcgagaaggagataatgactaaatacaaagatcaaggcccttaactttatcgaaagttttaaagatgttttggggaccttcctctagcggcaataatagcaggatgtgtgtacactgcacgtggaggtgtcttcactagttccatgatgggtctttctccgaataaagatcaagacattggattgctttggggtcctgatatcactcagcaatttctgaggacaaataatttgaagcgacgcacaggcgaattgatcatgtggaggcctggaagtgtaatggtggtttaccgagggagcatttacaaaaggcctctaaaatctcaagctctaaatggtgcctcatcatcggttaaaggcgaatttggtgcattgttcatcccaaatgcctcgaatgccgttgagaatgatattcaagggatatatttgtctgcaaaacatgcaactgtgtccctattgaatgtgtagaatattaagcacatgaatgaggaagggttggagttcaattagataatgatgagctaggtcctcattttgtggattggtgggaacggagctgactagccaaagttagtgaggaaccttccatgccattttgctctagggagaaaccagaactatcaagtttagcagcagtaatataataaggagcatgttgtaactgccccagcgttggtgtggacagcagtaatatattgctcatcgattgcaaataattttattctaatttttcatcacatcaccaagaggtatggacacaactttgcctttttctatttcctcttattgttatgaggatagcaatatcaatatataaatataacctcgacaaaacacatctgattactgtctcatgcctgaaaaatcactctataaagtgtaacatctgattactgtctcatgcaacaatgaatgaaattagaaggcttgaaaggtaacaataagttttgactcagagtgaacaaaaatattttatcaatacaattcgccattatatcttcacttaacgatttcatcagttgttattgattaaatatttgtagggatgtcaaacatgttagtattattggcttaaaagcagctagggtctttgccaaaggcacacaatgtttcttcatcctaggaacacaaattctggctactgattttcttatttgttgtcatccatccagaatttcatttactaaatggtactgcatagaagactagaatttgtgccatttcatttactaaatggtactgcatagacgaccagaatttcaaaggcactcagagttagtgccatttcatttcattaaagaagaagagtacaaagtaatatgaccaaggaagccatgcatagacgaccagtcactcaattaaaagtgaaatgtcaaaccgtgcacactgctaacattcagtgtaat

SEQ ID NO: 21736 - DNA, 1258 bp, Zea Mays
tggtacgggtgacaggagatgatacaggcgaatcgttgcagagagatgtgatataggggagagattgctgacgtagtgggtgaaattccgttcaagacagtctcagtcatccacttcccctctgcaccttgaacgtcctccgcagaggcagctccccaactgttagaatggacgacacggaagccgccaagaacacggccaccaccggccccactttcgcctcccctctcttctctttctccaacctcggcggtgcttccttcggctctggctttggcttcaaatccagcgctcctctgccgcctgccatcgaggtccagctctgcgaggaatcacccgttccggcagctaggttggagccagtcgtggtcgatgactccttgacgatctacaagggcagagtgagtacatctgacgtgtttggtgtcaaagactctgatttggtccctggaaaatatgaaggtgggttgaagctgtgggaaggttcattagacttggtgaaagccctgaattctgatatcaaagaagataaatttcatctggaaggcaaacgcgtattggagcttggatgtggacatggcctccctggcatttttgcgggtctcaagatttcaatgccgaggtgcttaggtgcttgactataccaaatgtaaaagtcaatcttttcaaggattcaccagaaggaacatgtacatgtccgattgttggtttctttgctggtgattggagtgaaatggataagctactactttgcggggatgctgagcaagacaaaacagccagtggtgatacagaagtgcttgcgctaccctgggggtgtggtttacatggcagggaagaagcattactttggagtaggtggtggcacaaggcagtttctgcgcttggttgaaaaagacggtgccatgcatcctgagcggctcaatgatgttgctgatggatcatccaatgttagggaggtttggaaattctcattcaaatagattagcactgcccctgcgattgtcgggagaactggaaacatgtactggactccatattgggtgagagggaggtcttataggacttcctggttctgttaatctacctgtgactgtttcaaaaagctgatctttctcttttggagcactgctttgctcttgtagactaaaaaaaatcgcttttacctctggtttctgtttgttaaacttgtttagcctttcatatgaaacgatgaattctccatgatattatcacacttgctctcaaattaccctcc

SEQ ID NO: 21737 - DNA, 2211 bp, Zea Mays
tggtacgggtgacaggagatgatacaggcgaatcgttgcagagagatgtgatataggggagagattgctgacgtagtgggtgaaattccgttcaagacagtctcagtcatccacttcccctctgcaccttgaacgtcctccgcagaggcagctccccaactgttagaatggacgacacggaagccgccaagaacacggccaccaccggccccactttcgcctcccctctcttctctttctccaacctcggcggtgcttccttcggctctggctttggcttcaaatccagcgctcctctgccgcctgccatcgaggtccagctctgcgaggaatcacccgttccggcagctaggttggagccagtcgtggtcgatgactccttgacgatctacaagggcagagtgagtacatctgacgtgtttggtgtcaaagactctgatttggtccctggaaaatatgaaggtgggttgaagctgtgggaaggttcattagacttggtgaaagccctgaattctgatatcaaagaagataaatttcatctggaaggcaaacgcgtattggagcttggatgtggacatggcctccctggcatttttgcgggtctcaagggtgctgacctgattcatttccaagatttcaatgccgaggtgcttaggtgcttgactataccaaatgtaaaagtcaatcttttcaaggattcaccagaaggaacatgtacatgtccgattgttggtttctttgctggtgattggagtgaaatggataagctactactttgcggggatgctgagcaagacaaaacagccagtggtgatacagaagtgcttgcgctaccctgggggtgtggtttacatggcagggaagaagcattactttggagtaggtggtggcacaaggcagtttctgcgcttggttgaaaaagacggtgccatgcatcctgagcggctcaatgatgttgctgatggatcatccaatgttagggaggtttggaaattctcattcaaatagattagcactgcccctgcgattgtcgggagaactggaaacatgtactggactccatattggttccaatggcagacacatctgattgagtcacacctgacaagtcaaaaaaaggcgcaaggacaaaattctatcccagatgcttcaccctctattttttctatctggattgataaaccatgctggatggggccaagaggaatgttttttttccagtaaacactcgagaatgcacccccagcaggcagcagcacaagacagcgagaggtgtgaatgcagtagggacatggatgtgaaagggtgctcatagccccatgtgatgcaaggagtcaagcattggggcaagctttgtccctatctccacgtttcagtgctgctaatcctagcttcaacatgcttttgcagtgagctaccatgtccacgatgggcttcttccaggacacccgcgtcgtcggtggtggcagcagccggacggccaggtttctccagtaccagaggctggagtgctgggaggacgccggagtcgctcccagtcccaggtcccggtggcggtggccgtggctgccgacggagaatggttgctgagctctccgcaaagatccgtcacgccagcgccaggaccgaggccgccgccaccatctgcccggccgtcgtcttcgtgtcaccgtgggggcttcctgtgctctcccggccactcttggtcggccacaagagcaggtaccagtatcaccatggaaaggacacctgatgatgagctgagcaggtagtacccaatctgtattcctggcgatgattatatatgcggcgagctagttgatcttgtagtatgtgtagtaatcctcattttgattcccctgcgatgcttgtgtcatgcttgattgggccccttgctacggcatgcatgtcatgttgtgccctctatcaacatccgtaccaagcaaagcaattgctatattccatcactaccattcgcccatgtggatttggatatctcgtaggaattcaccgttcttcatgagcagcttcaatcgcatgcataattgcatatatggcctggaaaaacatctaggatttggtgttctttttttttctatttaggccatgattggcagatctccggctcctctacaggagcagctcattcataagagccatttttttttttttgcaaatcgttgcaaaatggctcctcctatacgattttat

SEQ ID NO: 21738 - DNA, 1117 bp, Zea Mays
ctcaagtccagttccatactgatttcgatttgttgtttgcgatgccaaaggttatgatgtcagtagcaagtatgcatgttacctcccgacgcaagttctgaccgaatttcctggatggatggataggctgagcatggaaaaactttatgaatggatcctgaggcagcacgaaaatggtttgaggctaacagttgctgatgtagcctcccatatccagcatgagattcagtatggaggtgacaatgcatcagcctctccaaggtcacaataccctagccaaagcactgcaccgacaatgcacattcccaacacaagcaaccagcaaccatcgccaagcttatttgcttcaggaaaccctgggttgacacagtccaagaattccatggtcttttcaagcgcattatccagccccatccggcggagcctgcaaccttaccacctagagcaggacggggatgcagggtacttcgcgaacggtgcaagccgcgatgtgaaccccacggcttcgaatgattcgtccatggacatgcactcggacagcccagctcatgactcctactgagcagctcccaccatggaaccagcctcaagaacagcacttcaagtggaagaagtctgctgtcacagccttcccaggcctagtagtaatattcaatttaacaccttccatagcctctcttacactaagcgtgtgatgtcttgtgttgttactactacttaccacttgttgctttgcgagaattatgtaatttgcatgtactatactatactgtaccatttgatttatctgtgcatattactgctgttggtacgtgacaagtgcaggaaacaaaccactgaaaagaattaacagcttggacagtttgtgaggtgatcttgatttatctgttgccactgctgtcattcgttttttgttgagacggaaactgcataaatgtagctgctggtgttggattgtggtgaatcaaggcagcagcgaaattaaaaaccacatgactgctgtgctttctcatgtgttgtaactgataatgtattgttatgacgatccatgacgctgagactgcactggtgtcgacggcacataatgtagctgtttgagcgtggttgtaatcgagag

SEQ ID NO: 21739 - DNA, 1386 bp, Zea Mays
agagattgcagtacttgatttctatgataggtgttgttctgtggtccacattgttttattgttaggaaaaactttatgaatggatcctgaggcagcacgaaaatggtttgaggctaacagttgctgatgtagcctcccatatccaggtaagtttgcaatcgttccttgatatgtttctatacaaattgacaatacaaactcaggtaaaaaacctgcatatattgccatttcataggtcatggttagttctaaattgtgtgctactgacttgttgccttaatgaacaatagtttatgacaaatgagatgagatgaacttgttgttcttgcagacttaacttcgatcctgttcctatcctctgattattttctttgcctttttacatatccagccatagcatgtttgcatacagtttcaccattgttcttccttttgcgcatattcaggcaaagaatgattacacacttatgtatcatctgtgtgtagcatgagattcagtatggaggtgacaatgcatcagcctctccaaggtcacaataccctagccaaagcactgcaccgacaatgcacattcccaacacaagcaaccagcaaccatcgccaagcttatttgcttcaggaaaccctgggttgacacagtccaagaattccatggtcttttcaagcgcattatccagccccatccggcggagcctgcaaccttaccacctagagcaggacggggatgcagggtacttcgcgaacggtgcaagccgcgatgtgaaccccacggcttcgaatgattcgtccatggacatgcactcggacagcccagctcatgactcctactgagcagctcccaccatggaaccagcctcaagaacagcacttcaagtggaagaagtctgctgtcacagccttcccaggcctagtagtaatattcaatttaacaccttccatagcctctcttacactaagcgtgtgatgtcttgtgttgttactactacttaccacttgttgctttgcgagaattatgtaatttgcatgtactatactatactgtaccatttgatttatctgtgcatattactgctgttggtacgtgacaagtgcaggaaacaaaccactgaaaagaattaacagcttggacagtttgtgaggtgatcttgatttatctgttgccactgctgtcattcgttttttgttgagacggaaactgcataaatgtagctgctggtgttggattgtggtgaatcaaggcagcagcgaaattaaaaaccacatgactgctgtgctttctcatgtgttgtaactgataatgtattgttatgacgatccatgacgctgagactgcactggtgtcgacggcacataatgtagctgtttgagcgtggttgtaatcgagag

SEQ ID NO: 21740 - DNA, 1033 bp, Zea Mays
cttgatttctatgataggtgttgttctgtggtccacattgttttattgttaggaaaaactttatgaatggatcctgaggcagcacgaaaatggtttgaggctaacagttgctgatgtagcctcccatatccagcatgagattcagtatggaggtgacaatgcatcagcctctccaaggtcacaataccctagccaaagcactgcaccgacaatgcacattcccaacacaagcaaccagcaaccatcgccaagcttatttgcttcaggaaaccctgggttgacacagtccaagaattccatggtcttttcaagcgcattatccagccccatccggcggagcctgcaaccttaccacctagagcaggacggggatgcagggtacttcgcgaacggtgcaagccgcgatgtgaaccccacggcttcgaatgattcgtccatggacatgcactcggacagcccagctcatgactcctactgagcagctcccaccatggaaccagcctcaagaacagcacttcaagtggaagaagtctgctgtcacagccttcccaggcctagtagtaatattcaatttaacaccttccatagcctctcttacactaagcgtgtgatgtcttgtgttgttactactacttaccacttgttgctttgcgagaattatgtaatttgcatgtactatactatactgtaccatttgatttatctgtgcatattactgctgttggtacgtgacaagtgcaggaaacaaaccactgaaaagaattaacagcttggacagtttgtgaggtgatcttgatttatctgttgccactgctgtcattcgttttttgttgagacggaaactgcataaatgtagctgctggtgttggattgtggtgaatcaaggcagcagcgaaattaaaaaccacatgactgctgtgctttctcatgtgttgtaactgataatgtattgttatgacgatccatgacgctgagactgcactggtgtcgacggcacataatgtagctgtttgagcgtggttgtaatcgagag

SEQ ID NO: 21741 - DNA, 2235 bp, Zea Mays
ttgacacaatccattattccttccccttcgcttcgtttattccccacttccacacggccacaccgccacagccgccgccgccggacggcgctgtccttccctgggaggcgctccactaggctcggctcagctcacgcgcggcggcggtgtccgtggctgctgggcttgcgcgcgcacctgattccgtgctgggcttcgcgaggtgctcctcgtgcgagacacacgcccgatgcggcggaatcgcgcggccggcgcccgagacccggcgtgattcggtggggaggctgggtcgcggtgcttccgcgtgcgggaaccagtgacttttttattcttctcttccccagcggctcgggcggctagcgggcgggccgcttggtgctcgtcagcgcgtgaggcggagattacccggcgccgatctggtgctcttgccgcccggagaggtggtgccgggggccattgccgggttctgattaggaggaggcggaggaggtaagtccctagtcttatggggctcgcgccgccggagctggggcagttcgacgggtgggagagctccggggaggagagggagcgctggggctggtgccgccgcagccgccgcggcagcagtaggcgccgcgcggaccccaagggcgccgacgacgacaccgccgtctccaccggttgctgcatccgcctctggcccgtcggaacatgcccgccgccgccgccgccgccgccgccgaggtccaaggtcgacacctccaccagcagcgccagcacgcacggcggcctgaaagtctccttggagaagggggttttggatgtgtttttaaagggtggatcgaagagaacggaactgcacccgtgaaacctggtacaggtctcacggttgctgtcaagacactaaaccatgacgggcttcaagggcataaagaatgggtggctgaagttgattttcttggaaatcttcaccatcccaatttggtcaagttgattggatattgtgttgaagatgaccaaaggttgctggtgtatgaattcatgcctcgtggcagtttggataaccatctttttagaaggtctcttcctctcccatgggctatcagaatgaaggttgcactgggagcagcaaagggtctggctttccttcatgaagaagcagaaagtccagtcatttatcgtgattttaaaacatctaatatactactggatgcggagtataatgcaaaactctccgattttgggcttgcaaaagacggacctgtaggtgataaaactcatgtctctactcgagtaatgggaacctatggatatgcagcaccagaatatgtcatgactggtcatctgacatcaaagagcgatgtctacagcttcggggtcgtgcttcttgagatgatgtcggggcgcaggtcaatggacaagaatcggcccaacggggagcacaacctggtggaatgggcacggcccctcctaggggagaggcagcggttctacaagctggttgaccctcggctggagggcaacttctctgtgaagggcgcgcagaaggcggcgcagctagcgcgcgcctgcctcagccgggaccccaaggcgcggcccctgatgagccaggtggtggaggtcctcaggccgctgcagaacctgagggacatggcgagcgcctcctacttctaccagacgatgcacgccgagcgcatggcgcactcgagcagcatgaacggcaggagcagccacggccacggctcctccaaggcacagagcccgttcgggcggaacgggcagcagcagcccgtgcggagcctctcggacgggccccgcgcctccccgttccgctactcgccgaagccgaacgtgaaatgatgaggcacctggtccgggccgtgggcgtcgaagtcgaaccccattcgttgatgtgtgttgtgtacttgtgtagattgacatatgcacaaaggaaaagatgtaggcgaaagaggaggtgtaggttgaatgaatgctgatggatcgttgctatatatttttgcccccaaacaaggcaggtttaggtgtttttagccttgcaatgtgcggtgcctcgtgaatcttgatgctagatgtcgtgttaggtctggtgaagagaaagtgcttcggtacctgcctttcgaagcaaacggaagaggcgcaattaatcacgtttgcatctaaactgctctttttcttcgctttaaccaagttttaacattaaatttcacgtgttttgaccgattccacccccaa

SEQ ID NO: 21742 - DNA, 3976 bp, Zea Mays
ttgacacaatccattattccttccccttcgcttcgtttattccccacttccacacggccacaccgccacagccgccgccgccggacggcgctgtccttccctgggaggcgctccactaggctcggctcagctcacgcgcggcggcggtgtccgtggctgctgggcttgcgcgcgcacctgattccgtgctgggcttcgcgaggtgctcctcgtgcgagacacacgcccgatgcggcggaatcgcgcggccggcgcccgagacccggcgtgattcggtggggaggctgggtcgcggtgcttccgcgtgcgggaaccagtgacttttttattcttctcttccccagcggctcgggcggctagcgggcgggccgcttggtgctcgtcagcgcgtgaggcggagattacccggcgccgatctggtgctcttgccgcccggagaggtggtgccgggggccattgccgggttctgattaggaggaggcggaggaggtaagtccctagtcttatggggctcgcgccgccggagctggggcagttcgacgggtgggagagctccggggaggagagggagcgctggggctggtgccgccgcagccgccgcggcagcagtaggcgccgcgcggaccccaagggcgccgacgacgacaccgccgtctccaccggttgctgcatccgcctctggcccgtcggaacatgcccgccgccgccgccgccgccgccgccgaggtccaaggtcgacacctccaccagcagcgccagcacgcacggcggtaaacgtctctctctcatgtcacccgcatactcgctccgcattgtgctttgctgccttgctcgcgcggtggatgggatttgctcgtctagtgaccataattgcgacgccgtactgtaagccctcatttcgttatgggtaatgatgtaacatacacatgtcgcactttgtcacctcatgttgagcttgcagctgatcgattgtaaatggtcctgaggacgtgtgcagttttcggtagttactacgccggtgtttgagggagatatgtgaggctgcagctgggatcgacaactctttcagttatatccttctattgagcattgaatttgcggatggactggtaatgattgccttcagcatatacaaaggatcaccgatttgttggcaaatcctgtacaacaagcatctttcttgctgagcagcagcacacatgatagttcaggttctggaggagcaagtgtgagtggaccagcgtcattagtggtttcccgagtatctaattttagaatagcattagcatgtgtcggttttggctcaatactgttcgcttgaggtgtatagcgaacttggagttactttccgcaggaaagaatgttattgccttctccattgcaaatagttgttggtgcgttagactcatacacctgactctgattttgatgctgtaatgtcagcaggtgtggtgtttgaactagttgtggtttagttgctatttactgtttgttgtgtccagtatggcactgtagctcatgtagaaatataagcccagtttgcgaaaattcatgtgatgtactatgctatgctatggagcctactaacctaggtattcattctcagtgatatgttacataattgttatgctaacgagtaaaaatggtcatattggttagttaatatttctgaaagtagaataagaaaaatgtcacttcagagaaaaactcatctctagaatgtttgttaccatctgcggaatagattgtccattaactgtgtacaccaagaagtatttgtatttctatggagtctagcttgcaattaatttattctagtatgaatcgaaacaccttttcataattggaactaaatgactaatgaacttaaaagtatggaggatgtgtgatgaaataatgccagtcagcatttcgatacttttactaggaacataaagtgctcatttttgtatttacaacagggatttattaaatgaaaataatgaattagagcacctcttgtaagttggtacattaactgatactatctgtggtgtgatgatctactgcatttattgtatgctacacaagtcactattagcatgggctatttggttgtgccatgttcatgtgatatccttttttatatttgcttcggctttcagcaagacactgtgtggactaaatatatacttcagtggtctttgtcagatgctttcaaggatgcatgcataaagtcatactcagactgcagatggaacttttgcttttgtttgttcagatcatattgtcagaagactctcttttgtcagtatggcatactaaactgttgtaatttcatgtaacagcagaaaagtcaacagaaaatggtagcaggaatcaaccggtcgcattggtagtctcaggttctacaactactagtaacgctgaaagcagttcatctgcatctaaagatggagaattgataaaagttgcctttcagctgcgcaagtttgcattcaatgatctaaaatgtgctacccggaacttcaggcctgaaagtctccttggagaagggggttttggatgtgtttttaaagggtggatcgaagagaacggaactgcacccgtgaaacctggtacaggtctcacggttgctgtcaagacactaaaccatgacgggcttcaagggcataaagaatgggtggctgaagttgattttcttggaaatcttcaccatcccaatttggtcaagttgattggatattgtgttgaagatgaccaaaggttgctggtgtatgaattcatgcctcgtggcagtttggataaccatctttttagaaggtctcttcctctcccatgggctatcagaatgaaggttgcactgggagcagcaaagggtctggctttccttcatgaagaagcagaaagtccagtcatttatcgtgattttaaaacatctaatatactactggatgcggagtataatgcaaaactctccgattttgggcttgcaaaagacggacctgtaggtgataaaactcatgtctctactcgagtaatgggaacctatggatatgcagcaccagaatatgtcatgactggtcatctgacatcaaagagcgatgtctacagcttcggggtcgtgcttcttgagatgatgtcggggcgcaggtcaatggacaagaatcggcccaacggggagcacaacctggtggaatgggcacggcccctcctaggggagaggcagcggttctacaagctggttgaccctcggctggagggcaacttctctgtgaagggcgcgcagaaggcggcgcagctagcgcgcgcctgcctcagccgggaccccaaggcgcggcccctgatgagccaggtggtggaggtcctcaggccgctgcagaacctgagggacatggcgagcgcctcctacttctaccagacgatgcacgccgagcgcatggcgcactcgagcagcatgaacggcaggagcagccacggccacggctcctccaaggcacagagcccgttcgggcggaacgggcagcagcagcccgtgcggagcctctcggacgggccccgcgcctccccgttccgctactcgccgaagccgaacgtgaaatgatgaggcacctggtccgggccgtgggcgtcgaagtcgaaccccattcgttgatgtgtgttgtgtacttgtgtagattgacatatgcacaaaggaaaagatgtaggcgaaagaggaggtgtaggttgaatgaatgctgatggatcgttgctatatatttttgcccccaaacaaggcaggtttaggtgtttttagccttgcaatgtgcggtgcctcgtgaatcttgatgctagatgtcgtgttaggtctggtgaagagaaagtgcttcggtacctgcctttcgaagcaaacggaagaggcgcaattaatcacgtttgcatctaaactgctctttttcttcgctttaaccaagttttaacattaaatttcacgtgttttgaccgattccacccccaa

SEQ ID NO: 21743 - DNA, 2292 bp, Zea Mays
ttgacacaatccattattccttccccttcgcttcgtttattccccacttccacacggccacaccgccacagccgccgccgccggacggcgctgtccttccctgggaggcgctccactaggctcggctcagctcacgcgcggcggcggtgtccgtggctgctgggcttgcgcgcgcacctgattccgtgctgggcttcgcgaggtgctcctcgtgcgagacacacgcccgatgcggcggaatcgcgcggccggcgcccgagacccggcgtgattcggtggggaggctgggtcgcggtgcttccgcgtgcgggaaccagtgacttttttattcttctcttccccagcggctcgggcggctagcgggcgggccgcttggtgctcgtcagcgcgtgaggcggagattacccggcgccgatctggtgctcttgccgcccggagaggtggtgccgggggccattgccgggttctgattaggaggaggcggaggaggtaagtccctagtcttatggggctcgcgccgccggagctggggcagttcgacgggtgggagagctccggggaggagagggagcgctggggctggtgccgccgcagccgccgcggcagcagtaggcgccgcgcggaccccaagggcgccgacgacgacaccgccgtctccaccggttgctgcatccgcctctggcccgtcggaacatgcccgccgccgccgccgccgccgccgccgaggtccaaggtcgacacctccaccagcagcgccagcacgcacggcgcagaaaagtcaacagaaaatggtagcaggaatcaaccggtcgcattggtagtctcaggcctgaaagtctccttggagaagggggttttggatgtgtttttaaagggtggatcgaagagaacggaactgcacccgtgaaacctggtacaggtctcacggttgctgtcaagacactaaaccatgacgggcttcaagggcataaagaatgggtggctgaagttgattttcttggaaatcttcaccatcccaatttggtcaagttgattggatattgtgttgaagatgaccaaaggttgctggtgtatgaattcatgcctcgtggcagtttggataaccatctttttagaaggtctcttcctctcccatgggctatcagaatgaaggttgcactgggagcagcaaagggtctggctttccttcatgaagaagcagaaagtccagtcatttatcgtgattttaaaacatctaatatactactggatgcggagtataatgcaaaactctccgattttgggcttgcaaaagacggacctgtaggtgataaaactcatgtctctactcgagtaatgggaacctatggatatgcagcaccagaatatgtcatgactggtcatctgacatcaaagagcgatgtctacagcttcggggtcgtgcttcttgagatgatgtcggggcgcaggtcaatggacaagaatcggcccaacggggagcacaacctggtggaatgggcacggcccctcctaggggagaggcagcggttctacaagctggttgaccctcggctggagggcaacttctctgtgaagggcgcgcagaaggcggcgcagctagcgcgcgcctgcctcagccgggaccccaaggcgcggcccctgatgagccaggtggtggaggtcctcaggccgctgcagaacctgagggacatggcgagcgcctcctacttctaccagacgatgcacgccgagcgcatggcgcactcgagcagcatgaacggcaggagcagccacggccacggctcctccaaggcacagagcccgttcgggcggaacgggcagcagcagcccgtgcggagcctctcggacgggccccgcgcctccccgttccgctactcgccgaagccgaacgtgaaatgatgaggcacctggtccgggccgtgggcgtcgaagtcgaaccccattcgttgatgtgtgttgtgtacttgtgtagattgacatatgcacaaaggaaaagatgtaggcgaaagaggaggtgtaggttgaatgaatgctgatggatcgttgctatatatttttgcccccaaacaaggcaggtttaggtgtttttagccttgcaatgtgcggtgcctcgtgaatcttgatgctagatgtcgtgttaggtctggtgaagagaaagtgcttcggtacctgcctttcgaagcaaacggaagaggcgcaattaatcacgtttgcatctaaactgctctttttcttcgctttaaccaagttttaacattaaatttcacgtgttttgaccgattccacccccaa

SEQ ID NO: 21744 - DNA, 2416 bp, Zea Mays
ttgacacaatccattattccttccccttcgcttcgtttattccccacttccacacggccacaccgccacagccgccgccgccggacggcgctgtccttccctgggaggcgctccactaggctcggctcagctcacgcgcggcggcggtgtccgtggctgctgggcttgcgcgcgcacctgattccgtgctgggcttcgcgaggtgctcctcgtgcgagacacacgcccgatgcggcggaatcgcgcggccggcgcccgagacccggcgtgattcggtggggaggctgggtcgcggtgcttccgcgtgcgggaaccagtgacttttttattcttctcttccccagcggctcgggcggctagcgggcgggccgcttggtgctcgtcagcgcgtgaggcggagattacccggcgccgatctggtgctcttgccgcccggagaggtggtgccgggggccattgccgggttctgattaggaggaggcggaggaggtaagtccctagtcttatggggctcgcgccgccggagctggggcagttcgacgggtgggagagctccggggaggagagggagcgctggggctggtgccgccgcagccgccgcggcagcagtaggcgccgcgcggaccccaagggcgccgacgacgacaccgccgtctccaccggttgctgcatccgcctctggcccgtcggaacatgcccgccgccgccgccgccgccgccgccgaggtccaaggtcgacacctccaccagcagcgccagcacgcacggcgaaaagtcaacagaaaatggtagcaggaatcaaccggtcgcattggtagtctcaggttctacaactactagtaacgctgaaagcagttcatctgcatctaaagatggagaattgataaaagttgcctttcagctgcgcaagtttgcattcaatgatctaaaatgtgctacccggaacttcaggcctgaaagtctccttggagaagggggttttggatgtgtttttaaagggtggatcgaagagaacggaactgcacccgtgaaacctggtacaggtctcacggttgctgtcaagacactaaaccatgacgggcttcaagggcataaagaatgggtggctgaagttgattttcttggaaatcttcaccatcccaatttggtcaagttgattggatattgtgttgaagatgaccaaaggttgctggtgtatgaattcatgcctcgtggcagtttggataaccatctttttagaaggtctcttcctctcccatgggctatcagaatgaaggttgcactgggagcagcaaagggtctggctttccttcatgaagaagcagaaagtccagtcatttatcgtgattttaaaacatctaatatactactggatgcggagtataatgcaaaactctccgattttgggcttgcaaaagacggacctgtaggtgataaaactcatgtctctactcgagtaatgggaacctatggatatgcagcaccagaatatgtcatgactggtcatctgacatcaaagagcgatgtctacagcttcggggtcgtgcttcttgagatgatgtcggggcgcaggtcaatggacaagaatcggcccaacggggagcacaacctggtggaatgggcacggcccctcctaggggagaggcagcggttctacaagctggttgaccctcggctggagggcaacttctctgtgaagggcgcgcagaaggcggcgcagctagcgcgcgcctgcctcagccgggaccccaaggcgcggcccctgatgagccaggtggtggaggtcctcaggccgctgcagaacctgagggacatggcgagcgcctcctacttctaccagacgatgcacgccgagcgcatggcgcactcgagcagcatgaacggcaggagcagccacggccacggctcctccaaggcacagagcccgttcgggcggaacgggcagcagcagcccgtgcggagcctctcggacgggccccgcgcctccccgttccgctactcgccgaagccgaacgtgaaatgatgaggcacctggtccgggccgtgggcgtcgaagtcgaaccccattcgttgatgtgtgttgtgtacttgtgtagattgacatatgcacaaaggaaaagatgtaggcgaaagaggaggtgtaggttgaatgaatgctgatggatcgttgctatatatttttgcccccaaacaaggcaggtttaggtgtttttagccttgcaatgtgcggtgcctcgtgaatcttgatgctagatgtcgtgttaggtctggtgaagagaaagtgcttcggtacctgcctttcgaagcaaacggaagaggcgcaattaatcacgtttgcatctaaactgctctttttcttcgctttaaccaagttttaacattaaatttcacgtgttttgaccgattccacccccaa

SEQ ID NO: 21745 - DNA, 1392 bp, Zea Mays
ttattagctgagcacttctttttttttcttctagacagttgtagatgtgatgtggagcagtgcacaaactgctccatatctgaacaccgcatgataattgtatatttgcagtgtacaaagagtcaaattgcatattttatcttcagtttgtggtcaggtgccttgaatcgtgagagtttacaccttgtgattcccatggctgcctcaatgcgacatgtatctacccttgtctatgatcaaattcaggttgatcagtcaactgtagccatcaaagaaaattttggcaagttcagcgaggtcctggagcctggttgccacttcctgccctggtgcatagggcagcagattgctggttacctctccttgcgtgtgcgccagctggatgtccgctgcgaaacaaagacaaaggacaatgtctttgtcactgttgttgcatctgttcaatatcgcgctcttgctgataaggcatctgacgccttctacaagctgagcaacaccagggaacaaatccagtcatacgtatttgatgtcatcagagctactgttccgaagctgggcttggacgatgcatttgagcagaagaatgagatcgcaaaagcagtggaagaggagcttgaaaagcttgcttgtggtgtaggcaatgtctacttatggctatcagatcgtgcaaacgctaattgttgatattgagcctgacgaccgcgtcaagagagcaatgaacgagatcaatgcagctgctaggatgagggtggcagccagtgagaaagctgaggctgagaagatactccagatcaagaaagccgagggagaggcggaatccaagtacctggctggcgtgggtattgcaaggcagcgccaggccattgtggatgggctgagggacagtgtgctcgccttctcagagaacgttccaggcaccactgccaaggacatcatggacatggtcctggtcacccagtactttgacaccatgagggagattggggcctcctccaagtcctcttcggtgttcatcccccacggtcctggagctgtcaaggatgtctcggcgcagataagagatggcctcctgcaggctaatctgcactgagggtaccctgagaaaacgaaggattcagagggatgagggcatcggtcctatgatgctataaaattgtcaattatagactatatatgatatatagaggcaggcttgattgatttgtaaaagcatagttaagcaccgattgagctataagtgcacttgtgagtgagcctgggtatccaaacctgtcagctatttggtatgtatatgttctgcgtgcaaaatcctactgtagccatagcgttgaacaggaagaattgtaaatggatttggtgagtttatcaatcaggttactgcacaggagtaac

SEQ ID NO: 21746 - DNA, 1545 bp, Zea Mays
ccccacagaaggagaaggaaaataaactagggtttagccggggccacacggcaggctccacggcgtggttatgtccgcctttattctccccccactcgtctgcttcgcctccacctatccgccgcctcccaatcatcctgcccccaaactcccaccccgcagcatccccacgccaccacacctcgtcgcgtcgcgtcgtcaccggcgtgaagatggtcgggccaggcctctacaccgagatcggcaagaagaccagggatctgctgtacaaggactaccagactgaccacaagttcaccctcactacctacacctccaatggcgtcgctgtaactgcttctagcacaaagaaagctgacctgatccttggcgagatccaatcacagataaagaacaagaacatgaccatagatgtgaaagcaaactcggagtcaaatatcattacgacaattactgttgatgagattgcaacaccagggctgaagaccatcttaagctttgctgttcctgatcagagatctggaaagacctagtgctggaggctccctcgagtggggtatggggaagagataaaccgagacaagcattcccctcacaaatatggagatgctgcttctgctttgaaccacactctggttgagctccagtatttgcatgattatgctggagttaatgcaagcatcggtctgacagccaatcctgtagtcaacctctctgctgcctttggtactaaggctgttgcagttggtgccgatatctcacttgatactgcaactgggaacttgactaaatacaatgctgcactgaggttcactcatgaagaccttgtcgcatccctgaacctgaacaacaagggagacagccttactggagcctactatcacaaggtgagcgaattgaccaacacagctgttggggcagagcttacccacagcttctcgaccaatgaaaacaccctcacctttggcgggcagcacgccctggacccactaaccgtcttgaaggcccgcattaacaactctggcaaggccagtgccctgatccagcacgagtggaggccaaagtcgctggtcaccatctcggccgaggtcgacacaaagaccatcgagaagagctcgaaggttgggattgctgtggccctcaagccctgattggttatacagaccattttttccccttctaagttcctagcatgactgtttgggtcagatcagatcagctggggaaaacaaaactgttggggttcctggcatctttgtttgctgtagtcagttgatttaatgaactccgaaatgtctcatggaggaaaattttcggtcgcctgtgtagcgctctgttaaatgagcaaccttcacaataattcaagctcggtagaattctgaacttgttaatgatgattgatggtgactgtcaactgaggtaggggaggttctgttttcagcaataatttttctaccttgtggtgtcggggactttacccaatcgattcatgtgtttttgtggtgcagtatttaattaatgtcaagcgttttttattgcaattta

SEQ ID NO: 21747 - DNA, 3413 bp, Zea Mays
atggtggtccaggttcttgggatgcccggggccggtgtgaagccgccggcgccgccagtcgaggccgcgacggggctaccgccgcgcaggttgacaccttcgagagtctccgccaagcggtcctggccgcccgggtgcggtcggttccctgcgcctctgcccgcgccggcctctccggccgcggcaggtcctgaggtgaatggcgttgatggcgccttcaccatcgtcggcggcagggccgacgacgaggccgcccccgctgtcatttcgccttcggctcagaacggatgcccggataaggtggaggaggccgtcgccgccgccacagtttcgcctctgcccgagaacggcgccccgcctcggccgcaggggtcggataaggtggaggaggccgccgccacagtttcgcctctgcctgagaacggcgccccgcctcggcagcagggttcggataaggtggaggaggccgtcgccgccgccacagtttcgcctctgcctcagaatggcgccccgcctcggcagcaggggtcggataaggtggaagaggtggctgatcctgccgccgtttcacctgtggctcagagttgcggcctgcctcaccaagaggatgataaggtggacgatctctcagctgttttgcctgcagcgcgcagcagcgccctcccacatgccctgcctcagtcagggccggagagggctaggcaggatggagacggtggggagaacggagaggtgcaattggtgggcggtgcagtcaagctgtcatcggatggtcagcaaggggacagggtggtgcaggtggcagggccaacgttagaagtactggggagctgtaccactgttggtgctagttctatgcagaacggtggcgagggggatggcttgttggtggcagcagagaagggctgtggtggcagcagcgatatggggcaggaggttgctgctaatgatttcacagagattgaaaacaaaacaggcactggtgagttacagggaaaggaaaatggaattgcaggaagcagaacaaaacggtggtcgtcggaatcgtctctgaatccgctgcctaagaggagggcagtctcagccgtacgcaaatttccacctggctgtgggaggactattgttaccaccgcagacagtggtgttttggaggtctcacctatacgctcatttgctcctagttttgggatgtctgctgttaataccacaggcagtggagatagggagtggttgccttcagaagccacccctgtcaacaatggtgatgccttggtggcaattccggttttagttttaggagaatcggcttttccaacttcagcaatagaggcatccaataagaaagtggaaagcaagaaaatagtggatgaaggacatagcaaggctcacaatagggtccaagttcgagatgattttgccggtaccaaacaagacggtgaccagcgaaatgttgtttcaaaagctacacagaggaatgtttctgatgagaagatgaatgggaaattctcggcacataaaggggagcaggtagcacaagaaatggtggatcataagatgaaaaatgaacttgaaagtagcttgcaaagaagtaatcttaggacacctttgagcaatcccattgatgtaaaggtaaagaggttggatagtggcaagatgaatgctggattgcttggtaatgcaaggtcctctgcaggtgggaagatgcaaagtaagactctgagtgctaaaaaggaagtgtcctcaaatatgaacacaaagcaaaataagtttgctcataagttgaagagtgatgacacaagcaagggtaatttgcatttgtccgctagggagtccaagcttggaacacatgttgcaatcaatcaaattgaagagcctaaccaaataattgtacaagcattgatggctcctgataattgcccttggacacgaggaagaaagtcatttgctagtgcttccaagtctcttgttcctaggaacaagcttaagggaaaggatggtagtgcttccaagtctcttgttcgtatgaacaagataaaggaaaaggacaccactcgaaaagatatactagcaagaaaagtgacctctaatgaatcgatcaatgatgagacaatggatgataatgagacacgaggaagagaacctattgatagtacttccaagtggcttgttcctgtgaacaagctagatgctactccaaatgatataccagtagggaaagtggtatcttgtgactcgagcaatgatgaggcaatggatgacaatgatggcattatcttggaagatgatgacaactctagggcgctagttgtgtatggacaaaaacaagaaatgtgtctcacggttcttccggttgttccttccgggtcacaccacaagcaatctcgggaccatgatatagatgctcgaagcaaagttaggaagttgctccagttattccaggcgacataccgaaagcttacacaagttgaggaacaaggtaaacgcaaagttggaaggattgacattgaagcagctaaggcactaaagaacgaccctatttataaaaagcttggggctgttgtgggaaattttcccggtgtcgaagttggcgatgaatttcattttagagttgagctgtccataattggtctccatggcccacttcaagcaggtattgccacttctaaggtgaatggtatcaatgttgctataagtatcgttgcctctggtggctatcctgatgaattatcaagctcagatgaactaatatacactggttccggagggaaggctggtgggaataaagaaggagatgatcaaaagcttgagcggggtaatcttgccttgaagaattgcattgaaaccaagaccccggttcgtgtgattcatgggttcaaaggccaaaatagaagtgaaattggtcattctaaaggcaagcaaacttcaatatttatatatgatggattgtacgaagtgttggaatgttggcaagaaggcccaaaaggcgagagggtcttcaagtacaagttacagaggatcgcagggcaacctgaattagccctacatgcagttaaggcaacgaggaagtccaaagttcgtgaaggtctttgtttgcctgatatatctcaaggaagggagcggatacccatatgtgtcatcaacacaattgatgacatgaagccagcaccatttaaatacattaccgaagtcatatatccagattggtatgaaaaagaaccaccaaaaggttgcaactgtacaaacggctgctcggactctattacatgtgcttgtgcagtgaaaaatggaggggaaatcatgttcaatttcaacggtgcgatcgtcgaggccaggcctctcatatatgagtgtggtccatcatgcaggtccagatgatagcgacacattatgaaacattaagaacaacagcaggt

SEQ ID NO: 21748 - DNA, 4504 bp, Zea Mays
cccgagcccggaaaaccgaactgaagcgtccagtctccaagggcgcgaagccgcgcgcgtgcctgcctggcgctggcggacaccctcccgttcaccacttcccattccactccaacctcctcctcgggagagatccgctccctgcctcccctgcggcctcctctttctccgcgcaaactcgccgtggcagagtaatctcgcgccggcccctcgctcatatcggggggaaagaaaggttcttgggatgcccggggccggtgtgaagccgccggcgccgccagtcgaggccgcgacggggctaccgccgcgcaggttgacaccttcgagagtctccgccaagcggtcctggccgcccgggtgcggtcggttccctgcgcctctgcccgcgccggcctctccggccgcggcaggtcctgaggtgaatggcgttgatggcgccttcaccatcgtcggcggcagggccgacgacgaggccgcccccgctgtcatttcgccttcggctcagaacggatgcccggataaggtggaggaggccgtcgccgccgccacagtttcgcctctgcccgagaacggcgccccgcctcggccgcaggggtcggataaggtggaggaggccgccgccacagtttcgcctctgcctgagaacggcgccccgcctcggcagcagggttcggataaggtggaggaggccgtcgccgccgccacagtttcgcctctgcctcagaatggcgccccgcctcggcagcaggggtcggataaggtggaagaggtggctgatcctgccgccgtttcacctgtggctcagagttgcggcctgcctcaccaagaggatgataaggtggacgatctctcagctgttttgcctgcagcgcgcagcagcgccctcccacatgccctgcctcagtcagggccggagagggctaggcaggatggagacggtggggagaacggagaggtgcaattggtgggcggtgcagtcaagctgtcatcggatggtcagcaaggggacagggtggtgcaggtggcagggccaacgttagaagtactggggagctgtaccactgttggtgctagttctatgcagaacggtggcgagggggatggcttgttggtggcagcagagaagggctgtggtggcagcagcgatatggggcaggaggttgctgctaatgatttcacagagattgaaaacaaaacaggcactggtgagttacagggaaaggaaaatggaattgcaggaagcagaacaaaacggtggtcgtcggaatcgtctctgaatccgctgcctaagaggagggcagtctcagccgtacgcaaatttccacctggctgtgggaggactattgttaccaccgcagacagtggtgttttggaggtctcacctatacgctcatttgctcctagttttgggatgtctgctgttaataccacaggcagtggagatagggagtggttgccttcagaagccacccctgtcaacaatggtgatgccttggtggcaattccggttttagttttaggagaatcggcttttccaacttcagcaatagaggcatccaataagaaagtggaaagcaagaaaatagtggatgaaggacatagcaaggctcacaatagggtccaagttcgagatgattttgccggtaccaaacaagacggtgaccagcgaaatgttgtttcaaaagctacacagaggaatgtttctgatgagaagatgaatgggaaattctcggcacataaaggggagcaggtagcacaagaaatggtggatcataagatgaaaaatgaacttgaaagtagcttgcaaagaagtaatcttaggacacctttgagcaatcccattgatgtaaaggtaaagaggttggatagtggcaagatgaatgctggattgcttggtaatgcaaggtcctctgcaggtgggaagatgcaaagtaagactctgagtgctaaaaaggaagtgtcctcaaatatgaacacaaagcaaaataagtttgctcataagttgaagagtgatgacacaagcaagggtaatttgcatttgtccgctagggagtccaagcttggaacacatgttgcaatcaatcaaattgaagagcctaaccaaataattgtacaagcattgatggctcctgataattgcccttggacacgaggaagaaagtcatttgctagtgcttccaagtctcttgttcctaggaacaagcttaagggaaaggatggtagtgcttccaagtctcttgttcgtatgaacaagataaaggaaaaggacaccactcgaaaagatatactagcaagaaaagtgacctctaatgaatcgatcaatgatgagacaatggatgataatgagacacgaggaagagaacctattgatagtacttccaagtggcttgttcctgtgaacaagctagatgctactccaaatgatataccagtagggaaagtggtatcttgtgactcgagcaatgatgaggcaatggatgacaatgatggcattatcttggaagatgatgacaactctagggcgctagttgtgtatggacaaaaacaagaaatgtgtctcacggttcttccggttgttccttccgggtcacaccacaagcaatctcgggaccatgatatagatgctcgaagcaaagttaggaagttgctccagttattccaggcgacataccgaaagcttacacaagttgaggaacaaggtaaacgcaaagttggaaggattgacattgaagcagctaaggcactaaagaacgaccctatttataaaaagcttggggctgttgtgggaaattttcccggtgtcgaagttggcgatgaatttcattttagagttgagctgtccataattggtctccatggcccacttcaagcaggtattgccacttctaaggtgaatggtatcaatgttgctataagtatcgttgcctctggtggctatcctgatgaattatcaagctcagatgaactaatatacactggttccggagggaaggctggtgggaataaagaaggagatgatcaaaagcttgagcggggtaatcttgccttgaagaattgcattgaaaccaagaccccggttcgtgtgattcatgggttcaaaggccaaaatagaagtgaaattggtcattctaaaggcaagcaaacttcaatatttatatatgatggattgtacgaagtgttggaatgttggcaagaaggcccaaaaggcgagagggtcttcaagtacaagttacagaggatcgcagggcaacctgaattagccctacatgcagttaaggcaacgaggaagtccaaagttcgtgaaggtctttgtttgcctgatatatctcaaggaagggagcggatacccatatgtgtcatcaacacaattgatgacatgaagccagcaccatttaaatacattaccgaagtcatatatccagattggtatgaaaaagaaccaccaaaaggttgcaactgtacaaacggctgctcggactctattacatgtgcttgtgcagtgaaaaatggaggggaaatcatgttcaatttcaacggtgcgatcgtcgaggccaggcctctcatatatgagtgtggtccatcatgcaggtgcccgccaacatgccacaacagggtgagtcagcatggtgtcaaaattccactagaaatattcaagacaggcaagacaggttggggtgtaagatccctcagttctatatcatcaggcagtttcatatgtgagtataccggtgagctattggaagatgaagaagctgaaaagagagagaatgatgagtatctatttgatattggtcataactaccatgataaagaactttgggaggggctgaagtcagtggttggtctaggatctgctacctcatcttctgagaccatggaaggcttcacaatagatgcatctgagtgtggcaatgtgggaagatttatcaaccatagttgttcaccaaacctctatgcccaaaatgttctctgggaccatgatgatatgaggatgccacatgttatgttttttgctgttgagaatatcccgccactacaggagctgacctaccactataactataagataggggaggtctacataaatggcgaggagaaggttaaacattgctactgtggcgcctcggattgctgtggaaggctctactgaaacattattgactgttgttagctctatgttttgaacacctctgtcctgtctctgcggtacccttctattctcagttcgccttgtcttgtcggcgttctgatgtttacagcaagctgcatttgatcttgctgttttcatttagaaaaaaaaaaacattctgcttcgctctactgtgttttgaattgtgaatgaattttgaatggaaccccgttgtaccatgtgttcatgtggcaaaaatggacgatgatcgtgtcagcatgctggggcgttaattttttttccacagagctgactggtggcattgtaaattggacaatgttattatataattaaaatcttaaaatctggtttaat

SEQ ID NO: 21749 - DNA, 1142 bp, Zea Mays
ggaaaaccgaactgaagcgtccagtctccaagggcgcgaagccgcgcgcgtgcctgcctggcgctggcggacaccctcccgttcaccacttcccattccactccaacctcctcctcgggagagatccgctccctgcctcccctgcggcctcctctttctccgcgcaaactcgccgtggcagagtaatctcgcgccggcccctcgctcatatcggggggaaagaaaggtgcccgccaacatgccacaacagggtgagtcagcatggtgtcaaaattccactagaaatattcaagacaggcaagacaggttggggtgtaagatccctcagttctatatcatcaggcagtttcatatgtgagtataccggtgagctattggaagatgaagaagctgaaaagagagagaatgatgagtatctatttgatattggtcataactaccatgataaagaactttgggaggggctgaagtcagtggttggtctaggatctgctacctcatcttctgagaccatggaaggcttcacaatagatgcatctgagtgtggcaatgtgggaagatttatcaaccatagttgttcaccaaacctctatgcccaaaatgttctctgggaccatgatgatatgaggatgccacatgttatgttttttgctgttgagaatatcccgccactacaggagctgacctaccactataactataagataggggaggtctacataaatggcgaggagaaggttaaacattgctactgtggcgcctcggattgctgtggaaggctctactgaaacattattgactgttgttagctctatgttttgaacacctctgtcctgtctctgcggtacccttctattctcagttcgccttgtcttgtcggcgttctgatgtttacagcaagctgcatttgatcttgctgttttcatttagaaaaaaaaaaacattctgcttcgctctactgtgttttgaattgtgaatgaattttgaatggaaccccgttgtaccatgtgttcatgtggcaaaaatggacgatgatcgtgtcagcatgctggggcgttaattttttttccacagagctgactggtggcattgtaaattggacaatgttattatataattaaaatcttaaaatctggtttaat

SEQ ID NO: 21750 - DNA, 1347 bp, Zea Mays
aggtgatgcgggcgcaccggatcatggagcgcgtgcaggaggaacaacgctgctagtacggcgtcaaggagccgaggcaggtgctcgccgtcaccccgacctactcacgcgcattctaggcgctccacctcatcggcctcctccactcactccgtcggaatccttgcgcatactggcacgacagaccaactacggctcagcgaggaggacaagcagaatatgcctcttccagtccatggccctgcttgcaactcctcagggcatctgattggatggcacacgttcaactcattgcccttctctgggaagacggccacagttgttggtgaagcagcccctgttctgcccagggatttggagtgggctggttttgtgttgaactcgaggatgctgtggaaggaggctgacggtaagcctgactgggtgaaggatcttgatgctgtgggcgagaatggcgaggagattgagaacccacttactctgttgaatgatccgtcctctgttgagccactgggcaactatgggaagaaggtcctactgtggtggctttgtgttgaagcacgggctgatagcaagtttcctgaagggttcatactcctgactccagcagatatcggattgctaattcatacgaagatagattcatatctggccttgaacctgaaaatgttgataaggagtttttaaggctttggttcaagaacaactgcaatccatatgaagacacggtatattttcttcatacagttgttagaatcacttgtgcattttgttccataatgatccaactcatcttttttagtgaaaacttacgtgtaccccaaaacattcaggttctgccagaagctccagaagagttggtatgttagttggcctggcggtcatccaaagatcatccaccgcgacattaaggcatctaacattcttcttgacttcaaatttgaagctaaggtcgctgactttggacttgcaaagtgcactactgataataacacccatgtttcgacaagagtaatgggcacctttgggtatttggcacctgagtatgcaacatctggcaagctcacagaaaaatccgatgtattttctttcggagtcatgcttcttgagcttattactgggcagcgaccaattgacacaacccaattagcaatgcttgctataagcacatatgtacttccatttgcatgttgtataatactaataccaattgcaaaattatagttatttttctacccttgttagttaataagcatatttctggtcaataggttgtattcttattcttgtaaccgtgttaattaatgttatggacttgtagtctcgtattaccttgtgaatatatct

SEQ ID NO: 21751 - DNA, 1567 bp, Zea Mays
aggtgatgcgggcgcaccggatcatggagcgcgtgcaggaggaacaacgctgctagtacggcgtcaaggagccgaggcaggtgctcgccgtcaccccgacctactcacgcgcattctaggcgctccacctcatcggcctcctccactcactccgtcggaatccttgcgcatactggcacgacagaccaactacggctcagcgaggaggacaagcagaatatgcctcttccagtccatggccctgcttgcaactcctcagggcatctgattggatggcacacgttcaactcattgcccttctctgggaagacggccacagttgttggtgaagcagcccctgttctgcccagggatttggagtgggctggttttgtgttgaactcgaggatgctgtggaaggaggctgacggtaagcctgactgggtgaaggatcttgatgctgtgggcgagaatggcgaggagattgagaacccacttactctgttgaatgatccgtcctctgttgagccactgggcaactatgggaagaaggtcctactgtggtggctttgtgttgaagcacgggctgatagcaagtttcctgaaggaaagtggccttagagaatggattaattttggttgacacaaagtatgagtttggaaaaacatctgatgggacaattgtgttgattgatgaggttcatactcctgactccagcagatatcggattgctaattcatacgaagatagattcatatctggccttgaacctgaaaatgttgataaggtaaactacctttgagtcatacacatcacgtatgggctgattaccttgaatccttgattgcactttatgcctttaaaccttatgattcatatttaacgaggtttctgaatatatcatttaattatcacaggagtttttaaggctttggttcaagaacaactgcaatccatatgaagacacggtatattttcttcatacagttgttagaatcacttgtgcattttgttccataatgatccaactcatcttttttagtgaaaacttacgtgtaccccaaaacattcaggttctgccagaagctccagaagagttggtatgttagttggcctggcggtcatccaaagatcatccaccgcgacattaaggcatctaacattcttcttgacttcaaatttgaagctaaggtcgctgactttggacttgcaaagtgcactactgataataacacccatgtttcgacaagagtaatgggcacctttgggtatttggcacctgagtatgcaacatctggcaagctcacagaaaaatccgatgtattttctttcggagtcatgcttcttgagcttattactgggcagcgaccaattgacacaacccaattagcaatgcttgctataagcacatatgtacttccatttgcatgttgtataatactaataccaattgcaaaattatagttatttttctacccttgttagttaataagcatatttctggtcaataggttgtattcttattcttgtaaccgtgttaattaatgttatggacttgtagtctcgtattaccttgtgaatatatct

SEQ ID NO: 21752 - DNA, 542 bp, Zea Mays
ctctataagtttctgtcgttgtttctcacttcaaagctgatattcatgaggccttatcgtctgaaagaagaaatggtcatccaaagatcatccaccgcgacattaaggcatctaacattcttcttgacttcaaatttgaagctaaggtcgctgactttggacttgcaaagtgcactactgataataacacccatgtttcgacaagagtaatgggcacctttgggtatttggcacctgagtatgcaacatctggcaagctcacagaaaaatccgatgtattttctttcggagtcatgcttcttgagcttattactgggcagcgaccaattgacacaacccaattagcaatgcttgctataagcacatatgtacttccatttgcatgttgtataatactaataccaattgcaaaattatagttatttttctacccttgttagttaataagcatatttctggtcaataggttgtattcttattcttgtaaccgtgttaattaatgttatggacttgtagtctcgtattaccttgtgaatatatct

SEQ ID NO: 21753 - DNA, 2115 bp, Zea Mays
cttcaaccccctgtccgccctctgcttccactcccacgtcgttatccggaagagcaacggtactcttctttcccgtcccctccacgtctcgtctcctccctcgctgcggtgcgggatacgggctagattcagtcagcgctcatgatccggaggatcgagggcaacaaccagcgcggagcggcacaagcctcacgtgtccgggatctcttctccgcccagtaggcttccttgccttcgggcggtttccaggttggtagcatgtgagagtgatggcggccgccgaagcgagggctgcctggcagcgcgccgccaaccgctgcatggtccaggaggacgccaagcgagctccccatctggtctgctgctcgccgcccctacaaccgcacgacacgagcgatggaaatcctctgagcccgcaagatctccatgtccctacatttgtgcccatcaactggaacctgatgaactccagcctgcccatggagacccagtggtggctccagttgcagcccaactttgggtgccaggcagccttagctagggagcgcctcaactatgtaggtgcggaagccgctgagaagaaaacggagggtctagcgccagtacctaaacttgaggatgtccaagcaaacaaggccgcagatccttttgagcctccatggaccatttccgcggctgtcatgaagcaaacatctggaacgggtttggaagagttgaagaatctcgcttgctataccccagtgagcctcgactgcaaaggtagtgccaacagatgtgtttccgaggataacaagtttacagatttcaaagctttcgatcctctcttccctaagccacaaaaggaatactgcgaaatgcatgccccctggaaagaaaccagaaaatctcagccatggtggcaactagctgatgccgatggtttggcttcccttgtcgctgaaagagcaatggaaaacattgtcgacaatgatctgccaaggcccactcagacagtccgggttcatgggggtgaagtgaaggtccctgaaaacaaggatgattatgggctgtctgctctttgtgcggacaaagagctggatcctgcacatgacactatggagtgcagctacagtgtttcaagcaccaccaacaacgacacgaactcttctgatggggggcattggcaacaacatcaaagaaataaagagcccggggaggcacatgattcttatagttccaccgccaatacaccgggcggcaagccagcatatcagaatgcttccgagagggccaagctgttagatgctctccgccactcacaaacacgtgctagggaagctgagatagctgccaagaaagcctacgacgagaaagaccatgtcatcaagctattgttccgtcaggcctcgcacctttttgcatgcaagcagtggttgaaaatgttgcagctggaaaacatatgccttcagctcaggttcagagagcaccagatagcgaccatgttcccagagcttccatggatggtgacgaaagaaaaggtagcaccttctcaagagcacagtgacaggaagaaaggcagaaggctgaacaggaaaggtggcctacgcgatgccgttgcatttgctgttggtgttggtattgttggtgctggattgcttcttggctggactcttgggtggctactgccctaactggaagtttcattgtcgtagatgacaggacagatgccacctgtgcacgctgaattgaatggcaataggaaggatctggtgtacatacttccagaaactggatataccttatgttggatgcgatccttagctgtgtgctgtacatatgggccagtgagggtctggtggaagatgaaatcagccgacttcaacaacgtatgcgctagtactgtaaatctatagattttatttgctttaatgtagcaggaattgtgataatccgtttgctgtaatgtgtgctagacttactagtttaaaataagttagattatataatctagacagattataattccaaacaaacagacccttatatgcatatgcatagcttgttttagacagattataatcccaaacaaacagatccttatgtatctctttttcgatgttcatccacatgaggcct

SEQ ID NO: 21754 - DNA, 1848 bp, Zea Mays
cttcaaccccctgtccgccctctgcttccactcccacgtcgttatccggaagagcaacggtactcttctttcccgtcccctccacgtctcgtctcctccctcgctgcggtgcgggatacgggctagattcagtcagcgcagccttagctagggagcgcctcaactatgtaggtgcggaagccgctgagaagaaaacggagggtctagcgccagtacctaaacttgaggatgtccaagcaaacaaggccgcagatccttttgagcctccatggaccatttccgcggctgtcatgaagcaaacatctggaacgggtttggaagagttgaagaatctcgcttgctataccccagtgagcctcgactgcaaaggtagtgccaacagatgtgtttccgaggataacaagtttacagatttcaaagctttcgatcctctcttccctaagccacaaaaggaatactgcgaaatgcatgccccctggaaagaaaccagaaaatctcagccatggtggcaactagctgatgccgatggtttggcttcccttgtcgctgaaagagcaatggaaaacattgtcgacaatgatctgccaaggcccactcagacagtccgggttcatgggggtgaagtgaaggtccctgaaaacaaggatgattatgggctgtctgctctttgtgcggacaaagagctggatcctgcacatgacactatggagtgcagctacagtgtttcaagcaccaccaacaacgacacgaactcttctgatggggggcattggcaacaacatcaaagaaataaagagcccggggaggcacatgattcttatagttccaccgccaatacaccgggcggcaagccagcatatcagaatgcttccgagagggccaagctgttagatgctctccgccactcacaaacacgtgctagggaagctgagatagctgccaagaaagcctacgacgagaaagaccatgtcatcaagctattgttccgtcaggcctcgcacctttttgcatgcaagcagtggttgaaaatgttgcagctggaaaacatatgccttcagctcaggttcagagagcaccagatagcgaccatgttcccagagcttccatggatggtgacgaaagaaaaggtagcaccttctcaagagcacagtgacaggaagaaaggcagaaggctgaacaggaaaggtggcctacgcgatgccgttgcatttgctgttggtgttggtattgttggtgctggattgcttcttggctggactcttgggtggctactgccctaactggaagtttcattgtcgtagatgacaggacagatgccacctgtgcacgctgaattgaatggcaataggtaagctccaagtgcgtgctttcgtgaagagtgaaaaaggggcagatttttagagttcttccatggtagtctgttgatatggtgatgatagcttgatctcttatgttggttccgtatacataggaaggatctggtgtacatacttccagaaactggatataccttatgttggatgcgatccttagctgtgtgctgtacatatgggccagtgagggtctggtggaagatgaaatcagccgacttcaacaacgtatgcgctagtactgtaaatctatagattttatttgctttaatgtagcaggaattgtgataatccgtttgctgtaatgtgtgctagacttactagtttaaaataagttagattatataatctagacagattataattccaaacaaacagacccttatatgcatatgcatagcttgttttagacagattataatcccaaacaaacagatccttatgtatctctttttcgatgttcatccacatgaggcct

SEQ ID NO: 21755 - DNA, 2111 bp, Zea Mays
cttcaaccccctgtccgccctctgcttccactcccacgtcgttatccggaagagcaacggtactcttctttcccgtcccctccacgtctcgtctcctccctcgctgcggtgcgggatacgggctagattcagtcagcgctcatgatccggaggatcgagggcaacaaccagcgcggagcggcacaagcctcacgtgtccgggatctcttctccgcccagtaggcttccttgccttcgggcggtttccaggttggtagcatgtgagagtgatggcggccgccgaagcgagggctgcctggcagcgcgccgccaaccgctgcatggtccaggaggacgccaagcgagctccccatctggtctgctgctcgccgcccctacaaccgcacgacacgagcgatggaaatcctctgagcccgcaagatctccatgtccctacatttgtgcccatcaactggaacctgatgaactccagcctgcccatggagacccagtggtggctccagttgcagcccaactttgggtgccaggcagccttagctagggagcgcctcaactatgtaggtgcggaagccgctgagaagaaaacggagggtctagcgccagtacctaaacttgaggatgtccaagcaaacaaggccgcagatccttttgagcctccatggaccatttccgcggctgtcatgaagcaaacatctggaacgggtttggaagagttgaagaatctcgcttgctataccccagtgagcctcgactgcaaaggtagtgccaacagatgtgtttccgaggataacaagtttacagatttcaaagctttcgatcctctcttccctaagccacaaaaggaatactgcgaaatgcatgccccctggaaagaaaccagaaaatctcagccatggtggcaactagctgatgccgatggtttggcttcccttgtcgctgaaagagcaatggaaaacattgtcgacaatgatctgccaaggcccactcagacagtccgggttcatgggggtgaagtgaaggtccctgaaaacaaggatgattatgggctgtctgctctttgtgcggacaaagagctggatcctgcacatgacactatggagtgcagctacagtgtttcaagcaccaccaacaacgacacgaactcttctgatggggggcattggcaacaacatcaaagaaataaagagcccggggaggcacatgattcttatagttccaccgccaatacaccgggcggcaagccagcatatcagaatgcttccgagagggccaagctgttagatgctctccgccactcacaaacacgtgctagggaagctgagatagctgccaagaaagcctacgacgagaaagaccatgtcatcaagctattgttccgtcaggcctcgcacctttttgcatgcaagcagtggttgaaaatgttgcagctggaaaacatatgccttcagctcaggttcagagagcaccagatagcgaccatgttcccagagcttccatggatggtgacgaaagaaaaggtagcaccttctcaagagcacagtgacaggaagaaaggcagaaggctgaacaggaaaggtggcctacgcgatgccgttgcatttgctgttggtgttggtattgttggtgctggattgcttcttggctggactcttgggtggctactgccctaactggaagtttcattgtcgtagatgacaggacagatgccacctgtgcacgctgaattgaatggcagaaggatctggtgtacatacttccagaaactggatataccttatgttggatgcgatccttagctgtgtgctgtacatatgggccagtgagggtctggtggaagatgaaatcagccgacttcaacaacgtatgcgctagtactgtaaatctatagattttatttgctttaatgtagcaggaattgtgataatccgtttgctgtaatgtgtgctagacttactagtttaaaataagttagattatataatctagacagattataattccaaacaaacagacccttatatgcatatgcatagcttgttttagacagattataatcccaaacaaacagatccttatgtatctctttttcgatgttcatccacatgaggcct

SEQ ID NO: 21756 - DNA, 2019 bp, Zea Mays
cgactgtagtgttgggtatctaacctcctggttggtagcatgtgagagtgatggcggccgccgaagcgagggctgcctggcagcgcgccgccaaccgctgcatggtccaggaggacgccaagcgagctccccatctggtctgctgctcgccgcccctacaaccgcacgacacgagcgatggaaatcctctgagcccgcaagatctccatgtccctacatttgtgcccatcaactggaacctgatgaactccagcctgcccatggagacccagtggtggctccagttgcagcccaactttgggtgccaggcagccttagctagggagcgcctcaactatgtaggtgcggaagccgctgagaagaaaacggagggtctagcgccagtacctaaacttgaggatgtccaagcaaacaaggccgcagatccttttgagcctccatggaccatttccgcggctgtcatgaagcaaacatctggaacgggtttggaagagttgaagaatctcgcttgctataccccagtgagcctcgactgcaaaggtagtgccaacagatgtgtttccgaggataacaagtttacagatttcaaagctttcgatcctctcttccctaagccacaaaaggaatactgcgaaatgcatgccccctggaaagaaaccagaaaatctcagccatggtggcaactagctgatgccgatggtttggcttcccttgtcgctgaaagagcaatggaaaacattgtcgacaatgatctgccaaggcccactcagacagtccgggttcatgggggtgaagtgaaggtccctgaaaacaaggatgattatgggctgtctgctctttgtgcggacaaagagctggatcctgcacatgacactatggagtgcagctacagtgtttcaagcaccaccaacaacgacacgaactcttctgatggggggcattggcaacaacatcaaagaaataaagagcccggggaggcacatgattcttatagttccaccgccaatacaccgggcggcaagccagcatatcagaatgcttccgagagggccaagctgttagatgctctccgccactcacaaacacgtgctagggaagctgagatagctgccaagaaagcctacgacgagaaagaccatgtcatcaagctattgttccgtcaggcctcgcacctttttgcatgcaagcagtggttgaaaatgttgcagctggaaaacatatgccttcagctcaggttcagagagcaccagatagcgaccatgttcccagagcttccatggatggtgacgaaagaaaaggtagcaccttctcaagagcacagtgacaggaagaaaggcagaaggctgaacaggaaaggtggcctacgcgatgccgttgcatttgctgttggtgttggtattgttggtgctggattgcttcttggctggactcttgggtggctactgccctaactggaagtttcattgtcgtagatgacaggacagatgccacctgtgcacgctgaattgaatggcaataggtaagctccaagtgcgtgctttcgtgaagagtgaaaaaggggcagatttttagagttcttccatggtagtctgttgatatggtgatgatagcttgatctcttatgttggttccgtatacataggaaggatctggtgtacatacttccagaaactggatataccttatgttggatgcgatccttagctgtgtgctgtacatatgggccagtgagggtctggtggaagatgaaatcagccgacttcaacaacgtatgcgctagtactgtaaatctatagattttatttgctttaatgtagcaggaattgtgataatccgtttgctgtaatgtgtgctagacttactagtttaaaataagttagattatataatctagacagattataattccaaacaaacagacccttatatgcatatgcatagcttgttttagacagattataatcccaaacaaacagatccttatgtatctctttttcgatgttcatccacatgaggcct

SEQ ID NO: 21757 - DNA, 2052 bp, Zea Mays
accatctatactccttcaatgctaagcaatcattgactgatatagtgatagctccagccaacagttggtagcatgtgagagtgatggcggccgccgaagcgagggctgcctggcagcgcgccgccaaccgctgcatggtccaggaggacgccaagcgagctccccatctggtctgctgctcgccgcccctacaaccgcacgacacgagcgatggaaatcctctgagcccgcaagatctccatgtccctacatttgtgcccatcaactggaacctgatgaactccagcctgcccatggagacccagtggtggctccagttgcagcccaactttgggtgccaggcagccttagctagggagcgcctcaactatgtaggtgcggaagccgctgagaagaaaacggagggtctagcgccagtacctaaacttgaggatgtccaagcaaacaaggccgcagatccttttgagcctccatggaccatttccgcggctgtcatgaagcaaacatctggaacgggtttggaagagttgaagaatctcgcttgctataccccagtgagcctcgactgcaaaggtagtgccaacagatgtgtttccgaggataacaagtttacagatttcaaagctttcgatcctctcttccctaagccacaaaaggaatactgcgaaatgcatgccccctggaaagaaaccagaaaatctcagccatggtggcaactagctgatgccgatggtttggcttcccttgtcgctgaaagagcaatggaaaacattgtcgacaatgatctgccaaggcccactcagacagtccgggttcatgggggtgaagtgaaggtccctgaaaacaaggatgattatgggctgtctgctctttgtgcggacaaagagctggatcctgcacatgacactatggagtgcagctacagtgtttcaagcaccaccaacaacgacacgaactcttctgatggggggcattggcaacaacatcaaagaaataaagagcccggggaggcacatgattcttatagttccaccgccaatacaccgggcggcaagccagcatatcagaatgcttccgagagggccaagctgttagatgctctccgccactcacaaacacgtgctagggaagctgagatagctgccaagaaagcctacgacgagaaagaccatgtcatcaagctattgttccgtcaggcctcgcacctttttgcatgcaagcagtggttgaaaatgttgcagctggaaaacatatgccttcagctcaggttcagagagcaccagatagcgaccatgttcccagagcttccatggatggtgacgaaagaaaaggtagcaccttctcaagagcacagtgacaggaagaaaggcagaaggctgaacaggaaaggtggcctacgcgatgccgttgcatttgctgttggtgttggtattgttggtgctggattgcttcttggctggactcttgggtggctactgccctaactggaagtttcattgtcgtagatgacaggacagatgccacctgtgcacgctgaattgaatggcaataggtaagctccaagtgcgtgctttcgtgaagagtgaaaaaggggcagatttttagagttcttccatggtagtctgttgatatggtgatgatagcttgatctcttatgttggttccgtatacataggaaggatctggtgtacatacttccagaaactggatataccttatgttggatgcgatccttagctgtgtgctgtacatatgggccagtgagggtctggtggaagatgaaatcagccgacttcaacaacgtatgcgctagtactgtaaatctatagattttatttgctttaatgtagcaggaattgtgataatccgtttgctgtaatgtgtgctagacttactagtttaaaataagttagattatataatctagacagattataattccaaacaaacagacccttatatgcatatgcatagcttgttttagacagattataatcccaaacaaacagatccttatgtatctctttttcgatgttcatccacatgaggcct

SEQ ID NO: 21758 - DNA, 2279 bp, Zea Mays
aatactcctacaccacaccacacccagtcagcacatagaatcttcaagcgaaaacgtcggttgacgatgtccatggcaatatagtcgcgtgaccggcgacgacgacgaagacacacgagagcagtatcctggaaagagagagattgctttccgtgcctgctttgctttgctcatctcatccatggtgaccggatcagtgacgcgctcctcacgtgttgatccgttcgtgacactactaccaccactaccaagcagaaacgataaagcgcacggtatatatatactctactcccatatatccgtcatcagctcggggcgcagagctttgggaattccaagcagagccagcacagccacagcccacagcccacagcccgggaggagaagcgagcgcgcgatccagttggtggccgcccccgcccgcacaccatggcgacgccgtggtggtggccgtcgctgctgccggcgtggctgagctccagcgcgctatggttcctcgtcgccaacgcggtcgtcgccgcggtcgccatcctgtccaggcgcccgccgctgccgctgccgctgccgctgccgtcgccccgccgccgccgccgcagcagcggcgccgccgccgcgctcacgcggagggcctcgtctgcgctgctgcagcgcctccgctccttctccatcttcgccgtcccctccgcctgcttcaacaccaccacgccgtttccgcaccccgacgccgcccaaggaacagaaactgaggcgcccaggaggtccgaggtggacgccaagcccgaggagttcatccgcggcttcgaggaccaccaacgccagcagcgcctcaactccatcttcaactacacccagatgctcaagcagcgcgccgccgccgcccgccgccagcgccagccggatgccccgccagatcagctttgagtcacgtgttcggttcgttcgttcctgatattggtcagcgttttcagggagaccaaaatcagttttgagttgctgtacatagcctgctttcaacagattgtttgtatatagtcaccagatatgatttacagataaagtacgacataaagatatatcttgatcgtttataactctatcagagaatgatagactacatttacaccaagattgattcgtaaccaactaggatacttcttctaacatccaaacttatttacaaagagctatctcttacaaacttgattactagaccaatagtttctatgaatatatctcaacattcttttagcaacaaccataagttcggttgtcgacgcacgtaggtattggctaacattgttaacaaaaaataaatgaaagatttggtctagtaagagttcgatattgtagtgcacctacaatacttctacatcttgttgcttcttgcacatcagaagaacaccagagtaagttgaaattttctcagagatggaaagtggagtacacattggtttacaattttccaatgcatattgccacactcggatttaaggacaaatccagatacatctcacatgtgtgctacgatcaagtttgtatataaatcaatgtcacaatctttattatataatgaaacataaatcaatgtcacaatctttattatataatgaagtttccgtacaaaataactaaataaaataaatcatatggcgacacttgcccactttatgattccggtagcataattaatctaatttaatagaattccttctttaatttgctctacctctattcccaaaaataatgtagcatcgttagatccttgagatcaaacttagctcgcaaatctattaacattgcttccacgtcagcattggatgagctagccaaccacaatatcatcaacatagatcgatagatagatggtggccatgcttttactataaataaacaaggaagtacctccctttgaaacaacaaaaccaagggtgtacaaaattagtactaagtcttgcataccaagccccaggtgcatgttttaatccatatataactttgcccagtccacacacatgatcatgatattccaaactctcataaccaagtggttaattcatatatacttctttctagaacaccatgcaaataaagaatatttaacatcaagctgtctcaaacaccaggctttagttactgcaattgacaaaacaatcctgatagtagctgctttaacaattagactaaaagtgtctttgtaatccatatctttgtttaaatccttttgtgataaggcaagctttgtatctatcaattgtataatcagcatgcttcttgagttt

SEQ ID NO: 21759 - DNA, 1630 bp, Zea Mays
tttcttggacccgagtcgagtagtccggtacatcccaccgcctcgcaccgcggccatgttgacaccgcgcgtcctcaaggcttcgctgctccgctgcttgcgcgctaccgccgagctgcctccgttgcggcgaccccggatcctacctgtgcgggtttaccattccagaggctattctagtgggggaagctccaagtatgataggccaatgagacagttttccgaacagaatgagtcaacctctcagccattaatatattacattgctccatctgctctgcttgcttttgctgggatagccacatttgttcattacaatgatgagaggcgtgcagttcccttcgctaaagtaccaggacagaccaatgttcccaaaagatgtactaccaatagacctgcaataggagggccatttaagctgtatgatacagaaaacagtgaggtgactgaatcaaagcttcggggaaagtggaatctgatgtactttggctatacatcatgcccagatgtgggtccagctgaagttcagaagatagctgatgttgttaaactgttagagtcaaagtacgatatcaatattacaccactctttgtcacaattgatccacaacgtgattcacctgctcagcttaaggcataccttactgagtttgacccaagaatagtaggactaacaggtcccatcagtgcagtaagacagatagctcaggagtaccgtgttttctttaaaagagtagaggaagttggtcaggactatcttatagaaagctctcacaatatgtacttgctagatccatgcttggagacagtaaggtgctttggaagtgagtacgaggcatcagaccttgctgaggctataacaacagaggttcagaaagcatctgcctcatcaacaaattagtctagcggtatggcagcatcagcagttttccaatcttgccgtgaagcacctcctcgcctgttgcatagccctcacagaagggcgtgactcacagtgggctggccattcagctctgcctgcaaccaaccgattcaagttctcctattctcgctcttgttgtgtcagatctgagcttaactgtacagaatggtcttcttgcgacgaagtctcctggcagttccagatcacttacaattctgcgagatgagaatgatcttacaatttccagcaaacattaacctgctgcattggatgaggcatatgacctacagacttaccaggttgttagcacagattcatgaacctgctttgctctctcctctggatgctgaacaggtagtactcgatacgtgctttttgtctacccgccggcacgacagcagccacctgctgccattatgcctgcccgaggccgagggcctcgccatcctcatttcatattcgcggttgtgtttgttctagggcctagctaggtgttgacatcgtgtgagagcctccttttgccactggagtgagtagagttaagcctgttgtgcagtagtagtggaccagtgttagctgtagcaccttttgttttattttatagtcccgtgtgctcgtgcgtttggtgtaagctgacgcctgcaatttaggcttagccggcgtgatcttatgatgatttttgccttgttaaatgttgatggcctgctt

SEQ ID NO: 21760 - DNA, 1685 bp, Zea Mays
tttcttggacccgagtcgagtagtccggtacatcccaccgcctcgcaccgcggccatgttgacaccgcgcgtcctcaaggcttcgctgctccgctgcttgcgcgctaccgccgagctgcctccgttgcggcgaccccggatcctacctgtgcgggtttaccattccagaggctattctagtgggggaagctccaagtatgataggccaatgagacagttttccgaacagaatgagtcaacctctcagccattaatatattacattgctccatctgctctgcttgcttttgctgggatagccacatttgttcattacaatgatgagaggcgtgcagttcccttcgctaaagtaccaggacagaccaatgttcccaaaagatgtactaccaatagacctgcaataggagggccatttaagctgtatgatacagaaaacagtgaggtgactgaatcaaagcttcggggaaagtggaatctgatgtactttggctatacatcatgcccagatgtgggtccagctgaagttcagaagatagctgatgttgttaaactgttagagtcaaagtacgatatcaatattacaccactctttgtcacaattgatccacaacgtgattcacctgctcagcttaaggcataccttactgagtttgacccaagaatagtaggactaacaggtcccatcagtgcagtaagacagatagctcaggagtaccgtgttttctttaaaagagtagaggaagttggtcaggactatcttatagaaagctctcacaatatgtacttgctagatccatgcttggagacagtaaggtgctttggaagtgagtacgaggcatcagaccttgctgaggctataacaacagaggttcagaaagcatctgcctcatcaacaaattagtctagcggtatggcagcatcagcagttttccaatcttgccgtgaagcacctcctcgcctgttgcatagccctcacagaagggcgtgactcacagtgggctggccattcagctctgcctgcaaccaaccgattcaagttctcctattctcgctcttgttgtgtcagatctgagcttaactgtacagaatggtcttcttgcgacgaagtctcctggcagttccagatcacttacaattctgcgagatgagaatgatcttacaatttccagcaaacattaacctgctgcattggatgaggcatatgacctacagacttaccaggttgttagcacagattcatgaacctgctttgctctctcctctggatgctgaacagccatttcattatactcggtgcttctttggccaagttagcgggctgctgcgcgggcggctagcccgggacctgtgtttctggcactgggctctatcgtgaaaattgttgctggaccctggaggctgtaaggagtgctgcacaattccagttctatagaatattaattgtgttttttttggggggtgggctaacaatatcgtctgtactcgataaaagaatattttatgatctctaagaattaataaatgtctgctaacaaaatttaatccaaattattatatggggtttgttgtaagaaacacaatggtacggtgtaattataatttcagtagaacgtttagtttgtaaacgacaggttcttttgaaaaacaatttccaaatgttaacatgaacagacaatagtgtgcat

SEQ ID NO: 21761 - DNA, 1513 bp, Zea Mays
atgtacgcgcatgcttgcttgttagttgttacacacaccctactaactggcacttggccgcatcagttagcttggtccgttgcgtcgatcgtctcattgcgtccgactcagcctggagaggcgcttccactcgacgagccgcagcaagaactccatcacctcggcgggctcctggagcgagtaggaggcgctggtctccttggggtgcttggacaccaggatgccgacgccttggccctggccccggcgccgcagcgccctgaaggcgtcctcgtcggtgcggtcgtcgccgatgtacacgggcaggacgttggtgcagcccgcgaagccgagcgactcgagcaggaactcgagcgccttgcccttgtcccacttgatggtgggccgcacctccagcaccatccgcccctgcgtcagccgcagcctggggtactcccgcagaacgcccttcaccgactcccacagctcgccccacatctgaacaccatcgatcgaatcgaccatagatcatcatgtcagttaggacgatgcgtctcgtagcttatttattaggtctagtgtttgccaatggagggcgtatagcagcaatacgcacaagtggaggggggcacgggggcgagagcagccagccagataaagctgaaaacgacggctgttttggctaattattgcgggcgggcgggcgaaccttttcgtcgacgcatctgaagtggacggagacgcagaacctgttgttctccaccttggccccgggtatgctgcgcgtcgtctctaccaggcgctcgtgcacagcctctatcatgggcaggaactcgctcgccgttgccggttggaacaggactccttttgcctgggccttctcgtgccgggaagaagaggccttggccggacccttgatgtccatgccgtggctgccggcgtagtagagctccgccagcttcacgaacccgaacaccttgtcgcggcaccggccgctcacgatcgccgtcgggaaatgcttggcgacgctacgcacggccatccgcatcgtctcgctcatgaaggcggcgtcggggtcgtccacgatgggcgacagcgtgccgtcgtagtccaggaacatgacgatgcgcctgccctcggacgccgccacgatcctctcgaacttgcccagcgccgacgggtgccgcgccatccaggcggcgcgctcctcctcctcgtcggcgccggcgccggcgagcgcggctgcggccctggcgtgcgtgggcgacgacgcccgcatggactccacgccccagcaggcgccgccgcccacctccgcctgcaagcacttgcggcgcacggcggcggctgcgatcccgctggcgccgcgcggcggcgggtacgggaacagcgtcgtccccgggcaggggcacgagcacgacgcctgcgctgggacgccggaagcctccgccaccgccacgctcggcttcgccatcggcatccgatcggtcggtcgacggcgatcagaggctggctgcagattggaaaggaatga

SEQ ID NO: 21762 - DNA, 2179 bp, Zea Mays
taaaaaacaagtaagcttggacaccagtgtaataatactaatgggcgcccagatcttaataaaaaaattcttatcctcctccgattttatgcgttattttgtttgccaacccacagaaaaaggcggcagttcatccgctgctgttcctagttctctccacccagaagtcgacctcgttgtttcctccctcctgtcccaaatctcacctccttccagttccagctaccgctgctcgcgttgactcgcctcttcctccattcagtgactccttggatcggctcagggacacgcaccagcgtattgtgtcggcgccgaatcttgcgcgcatttcgcgctattgttgccccggaggagtggtttggatccaagaaagtgatcggccttcttggttggatctcctcccgcaatggcggcgctcctggagctgttcctgggctcctctcccacgccggtggactgggaggcagaggtctacccggcgtacggggacttcgccgtactccccttactcgtcgccttcttccccgccgtccggttcctcctcgaccgactcgtcttcgaggttttagcacgaaaatttatatttggaaagggacatgataagctttctgaaacagatgacagtagaaagaaaatcaataaatttaaggaatcagcatggaagtttgttttttttctttctggcgaactgctttcactatctgtaacatacaatgagccatggtttaagaacacaagatacttttggataggccctggtgaccagatctggcctgatcaaaagataaaactgaagctcaaagctgtctacatgtatgctgctggattttacacatattcaattttcgctctcctgttctgggaaacaagacgttcggactttggagtatcaatgtcccaccatatagcaactgttgttctgattattctttcctacattttccgctgtattgttgttgtgcctatcaaacagattcgctcgtgttggcactgttgttttagcccttcatgatgcaagtgatatattcctagagattgggaagatggccaagtacagtagctgcgagtggctagcagttatggcatttcttctttttgtggcatcgtggatacttcttcggctcgttatgttccctttctggatcctaagaagcacaagctatgaagtgctgctgaccttggatagggagaagcatcgattttatggccccatatactactatgttttcaactgtcttctgttctcactcctagttcttcacatatattggtgggtactgatatggcggatgctagttaaacagattcaatcgaaagggcgtgttggtgatgatgttcgatccgattctgaaggcgaagatgagcatgaagattaactttttaggttgaatgattaactgaagaactacattgtgtgatacctgcagcaaggcacaccttctgaaccttttttttttcttttacagaagatatccagatattgtaattcattaggtcatatcattcgttcagcatagaagatgacaaccatcatttgggagttgtcaatgaagccgcctatcggatgctttttatcaaaacagaagtgcattgtatttatttcactaaaccatcatttataagagatacagaatgatcccttgttcatccattcttgtagctagacagttgatttgctttcaaatcatgtaatttgctacagaagcttagttgatttcttggtgtatcattcattgtgatggaaatggaaatcttgggaagaagttcccaacaagaatgtaacatttgtacttttatttctggaggaccctgtttttctgccacaattgtccaacaaagataagctcctaaatattctaataagagcatagcgaagaagcctaagtgcaaaggcaataacatatactccttcagtcctaaaatataattcgttttagactaatcacatatttattaagtaacatacgaatgtagtttctatatatgtctatatttattatcatttggatgaatgtggacagaaaaaaaaaagtagaaagacctattttaagacggagggagtatcatatagcagctttatagcagctttgacgttcaattgacatttatgacaccctgagaaataaagatccccaaacattagacggatgtaataacctgaaagttctacaaagaatca

SEQ ID NO: 21763 - DNA, 1174 bp, Zea Mays
ataagattgagatgaactgggataaggttagagaataagattgaaatgggagaattgtggagagttggttagcatcagataagtccaagaaagtaggagttagttgagagtttgtaggagaagttggttagccatagggctatttataagccgcatggcagcagggaataaatcaagcaagatcattaacaaaccaatctctctcccttgcaatgaccctctcaagcgcctagggctgctaccctagaaccaagcctgcggcagaggggtataacctcgccggagaagacaactatccccatggaccgaaggtccatgacattccacaacttagacatccaaactaaaattcattactacagccttacaactaactagattggcctaggtgccattaacgatcatgtgcactgtaaagatcaccatcgttaggagactcctaatctatgagtagacaatcattagggtcttcatgcctttcgtcgtccgaaggagaggaggcaaagtagcaatatgacagtctgttgctgaattagctagatcagtgactagttcttggatagttagcaaagcaatgttcatttcctacacttctgtaagagacatagggctacaagtagcttggcacatatcgcaaaccttggaacttgtatcctcaaccatggaagttaagacagcaatggcctttttgagcttctcaatctcaaattccatgatctaaacaagtcaaaagaaattacaattacacagaagttgttgcagtaaatgtagacaatcaggttatgacatagttagctaattagacttaaaatatggtaagtgtaatgtttagtactgccaaacagagtgcaagtatgtatgtgaccaacataggtggacatttttacagaataagtggaatcataccatcttcttgcatatacacaggtcatttcacaaaacaacaataaaatataaggacagccttgttaccttgaacctcttcctgatttgggagaccgagccccaacaaactatgacaactttgaattcacacataaacacatgaagtaaacaccaattgctggaaaatcatttaacacataacacatgaactaaagaccaattgtagaataatccattcatgttaatcaatgttcaaaaaagcgcgcttaagcgtccacttagtcatgat

SEQ ID NO: 21764 - DNA, 926 bp, Zea Mays
gtcatttggactgcctgtgtcttcggcagagacctggaaacttctagatcgctcgacactacggccaaaaaaagggctagctgcctaccggcacgtcttcgagagagtttgagatggggacaaaaaatagaataaaaattgttcgcgtcttcctcgcgttcgcgccggaggggcgccgtcgccttgtcccattgcttcgccaccgcagctgccgttcgtcgtcgccatcaccctgccggtagtcgtcgttgccgtcccctcctctcgcccgctcatcgacgacttcttccccttcctctcctcgccgtcatcctcgcccgcgccagtgggagctatcgccggaggtggtgcttgtgggcgtcgacgcccaaccagcagggcacccgaggagaagcgcaagacgaccgcgccgtcagcgctgaacgaggctaagcggtagtgccatgaggtgtgctcgtcgtggaggtcatcgccgctcgcggagcacggccacccggtgaagaagaagcacaggtgagaagagatgatggttgttgtagaccatacgcctctacgagatcgccgcacgcgacccattcctttcctctggagcaaatacgtccacatcgtcgttccccatctggatgctgctggcttctccctcgtccgtcgattggaaggaaggtaagactacaacagaagaacttgaagagcattcactgatctcttatttgaagaccagaatgcaaggtaccaaaagaaagaaaaaattgaattgccttcactaggctcctcttgagaagatacaagcaaaaaatcaaaagcattgcacttcttaccactgatacccctatgtcactactaccatacaggttgtatggtccttgatgaacaaacaataccttgggtcatagattgtctgcatgcatgctagatgagaaaaaaat

SEQ ID NO: 21765 - DNA, 1853 bp, Zea Mays
tagctgcctaccggcacgtcttcgagagagtttgagatggggacaaaaaatagaataaaaattgttcgcgtcttcctcgcgttcgcgccggaggggcgccgtcgccttgtcccattgcttcgccaccgcagctgccgttcgtcgtcgccatcaccctgccggtagtcgtcgttgccgtcccctcctctcgcccgctcatcgacgacttcttccccttcctctcctcgccgtcatcctcgcccgcgccagtgggagctatcgccggaggtggtgcttgtgggcgtcgacgcccaaccagcagggcacccgaggagaagcgcaagacgaccgcgccgtcagcgctgaacgaggctaagcggtagtgccatgaggtgtgctcgtcgtggaggtcatcgccgctcgcggagcacggccacccggtgaagaagaagcacaggtgagaagagatgatggttgttgtagaccatacgcctctacgagatcgccgcacgcgacccattcctttcctctggagcaaatacgtccacatcgtcgttccccatctggatgctgctggcttctccctcgtccgtcgattggaaggaaggtaagactacaacagaagaacttgaagagcattcactgatctcttatttgaagaccagaatgcaaggtaccaaaagaaagaaaaaattgaattgccttcactaggctcctcttgagaagatacaaggtaaaagtatttttctaccttgctttgcacaagcgtattgcgtatatatagtaatataaagccctccctcctaaaaacttcagaatcttaacatgttacagttagttctcagaagatttcatgtgcattgtaattctaaaactttagccagtttacacctgttatttagtctactccttgaaaaaagtttttccctttgatctaaacatgaatgcttccttttactccaacatcacagcaaaaaatcaaaagcattgcacttcttaccactgatacccctatgtcactactaccatacaggttagtgcacgatccttacctttatgttctacatgtctttgggtttctcttttttttcaagtgcgttctattattgtttatatgtccaccttcacactgattagctgttcatgcatagttattatctgttatgtacatttttatacctttccaaattagcttattatcttttaaaaattgtattttcttggctactttacattggaatgaccgatggcaacatcttcaaacaaacatagctaacttagaggaaagaaaacataatctttaaactgctcataagagagaatgtcaattttcagaaaaaaaaagaaaaaacaatattgatgctttagaaaatcttaaactgatgcacgttaatattatcatatcaatgccaacaacatatgtttaagctggtttcatccttcctagcaactctactagcttcctctcgctcttcactgctatttttttaaatttcactgctattttttaaattggaaggaaaataagagtacaacagaagaacttgaagcgcattcactggtctcttatttaaagaccataaaacaaagttccaaaaaacaaaaagaaacattgagttgccttcaccaggctcctcttgagaaaatacaaggcaactcagaagaggcaacattctttagaaaggcatattatctatactacttattaagaaggtaagagtagtcggtcgttatgccctccccgttccgcgcgcagaaaaaaatcaaaccgtggctactcagggatcaaaccttggatctattgagcagaatgcctagccttccaccccttagccaacgtgactcatgttgaatcgtgtataacttcaactaag

SEQ ID NO: 21766 - DNA, 762 bp, Zea Mays
ggggacaaaaaatagaataaaaattgttcgcgtcttcctcgcgttcgcgccggaggggcgccgtcgccttgtcccattgcttcgccaccgcagctgccgttcgtcgtcgccatcaccctgccggtagtcgtcgttgccgtcccctcctctcgcccgctcatcgacgacttcttccccttcctctcctcgccgtcatcctcgcccgcgccagtgggagctatcgccggaggtggtgcttgtgggcgtcgacgcccaaccagcagggcacccgaggagaagcgcaagacgaccgcgccgtcagcgctgaacgaggctaagcggtagtgccatgaggtgtgctcgtcgtggaggtcatcgccgctcgcggagcacggccacccggtgaagaagaagcacaggtgagaagagatgatggttgttgtagaccatacgcctctacgagatcgccgcacgcgacccattcctttcctctggagcaaatacgtccacatcgtcgttccccatctggatgctgctggcttctccctcgtccgtcgattggaaggaaggtaagactacaacagaagaacttgaagagcattcactgatctcttatttgaagaccagaatgcaaggtaccaaaagaaagaaaaaattgaattgccttcactaggctcctcttgagaagatacaagcaaaaaatcaaaagcattgcacttcttaccactgatacccctatgtcactactaccatacaggccgcccacaccaagcaggataattc

SEQ ID NO: 21767 - DNA, 1182 bp, Zea Mays
ggggacaaaaaatagaataaaaattgttcgcgtcttcctcgcgttcgcgccggaggggcgccgtcgccttgtcccattgcttcgccaccgcagctgccgttcgtcgtcgccatcaccctgccggtagtcgtcgttgccgtcccctcctctcgcccgctcatcgacgacttcttccccttcctctcctcgccgtcatcctcgcccgcgccagtgggagctatcgccggaggtggtgcttgtgggcgtcgacgcccaaccagcagggcacccgaggagaagcgcaagacgaccgcgccgtcagcgctgaacgaggctaagcggtagtgccatgaggtgtgctcgtcgtggaggtcatcgccgctcgcggagcacggccacccggtgaagaagaagcacaggtgagaagagatgatggttgttgtagaccatacgcctctacgagatcgccgcacgcgacccattcctttcctctggagcaaatacgtccacatcgtcgttccccatctggatgctgctggcttctccctcgtccgtcgattggaaggaaggtaagactacaacagaagaacttgaagagcattcactgatctcttatttgaagaccagaatgcaaggtaccaaaagaaagaaaaaattgaattgccttcactaggctcctcttgagaagatacaaggtaaaagtatttttctaccttgctttgcacaagcgtattgcgtatatatagtaatataaagccctccctcctaaaaacttcagaatcttaacatgttacagttagttctcagaagatttcatgtgcattgtaattctaaaactttagccagtttacacctgttatttagtctactccttgaaaaaagtttttccctttgatctaaacatgaatgcttccttttactccaacatcacagcaaaaaatcaaaagcattgcacttcttaccactgatacccctatgtcactactaccatacaggaaaataagagtacaacagaagaacttgaagcgcattcactggtctcttatttaaagaccataaaacaaagttccaaaaaacaaaaagaaacattgagttgccttcaccaggctcctcttgagaaaatacaaggttgtatggtccttgatgaacaaacaataccttgggtcatagattgtctgcatgcatgctagatgagaaaaaaat

SEQ ID NO: 21768 - DNA, 1237 bp, Zea Mays
ccgccatcagcgctcgcttggctgctcgacgcattcgccagcgccaccttcaaccagatcgactccgcctaccgcgaggtcggaggggacccttttgtggccaccagtatcctgtcttccacgcaggacatgcacctgccgcagccccccgccgccactggatctcttgccgcacagtggatctggtggaagaaaggctggtcggaggcccaagcgggttgcggtggccgctacgggcatggtcgcggacgtgattggcaaggagtacacatgatccgcggctaattctatagtaagcatgccaaatgcttggaagggtcgggacggggagagcgatggcgacgggtctggtggccgcaaggacagtgttgaagaggcagagcagttcctgtgctccatgctcggggataattccgagcttggcatgggtgttgtcagagacgtgccagtgggtacgggttacccgacgggtaaaaatacccgcgcgggtacgggtatgggtaagattttatacccgcgagtatatatgggtaacccgacgggtagaattttttttgatgggtacgggtatggaatgaccgcccccgcccccaaaaagcacacgcccgctcggaaaccccgcaaaccgcccgccaaccccggcaacccgacctccgtattcatcgctgccgcaaaccgcccccaaccccgcccgccagacctccgtattcatcgctgtcgcgccgcaaaccgcccaccagacctccggaatcgtatccacggcgcaaacacgccatggttttggatgggggcgactcaatccgttcgccgcggctaccaacaatcctcgcagcccgacctggaggaggcccttgaagcctcgcgctacgcgtctcacccctactcctcgcaccccaaggaaatagaataaatctcaaataaacttgaggatgataagggtcaaaatgagatatgttgttctgaaactgaagcaataaagcttccaactctatggattcttgttagcaatggaagagtttgatttgactttaactatttcagtggttctcggtcaaacgccagcaggcacaggttattgcagatagtctttactatactaatttcaagcttcattgcagagtgagattgtcatctatttactaacttctttatgtagtatatgatcaaaaccaaatacatgtttgtccttttgcggcgcaaaaaaacaatatttaaatgctttgagattgtgccaaat

SEQ ID NO: 21769 - DNA, 2056 bp, Zea Mays
gtttaaataaggaatcaaaagcagaaatcaacagataaaaaaatgaaatttatgcagaaagaaaaacagcagggaacccatatcaattaataagcatccccatgcattcaaaagatgtagggaagggagaatcaaaaggaagaggtcatcaccatcctcctccctcctcctaaggtgatctctattgctcatgtccacagcaaaactaaaaataacatcaagagaaataaggaaaactaattactaaagctagttatgcagttcatataattcagtttctttaggttttggctagtaccttgataaaatgagtcaggcaccaacacctaggatgggggaggctcgtcctcgcctactcttgctggagcagggacaatctgaaaataaataaattatttggttcatataagcatcagtaagaacatattccatgtactagttactatagcacataagactgagagaatgcagtacaaacatccaacggtgtttagaagagggaaattccatgtactgaactaagtgaaaataaataaattgtatattcaccttctctgtatagacctacacatttctctacaatctaatttcattagcctctccatcagctatctactttgttctccgtgggggctgtggcacaacacagatgggacatggcaggcaagcaaagaagcaagcaagcaaagaagtgtctccgtgcggcgtgtagagagagagaggagaagaagctagtggtgctagtggccaagaaggaatttgctgcccaactgtactctatttcccaaatttctcccaacctcacggcgcatcagctgctccgtccaggcgacggcgcatcagctgctccatccgacgacaggaaccacaacctcacggtgctcctcaccttcgacatcttcttctccttcaccctactctacccgcgcagtcgcgctctcccgctgctacctaaaggtccaaggggtggtgctcgaggactcgccgatggcgtcttgcttcctgaccgcctcctagaacctgaccgcctcgtccaccatgtgtcgaccttgtggacaagcaacatggatgagaggtatgcacaagcagcaatgacatgggtatgcagagagccatggaggcaacggccacacgagctgtacaactctggacggtttcaaatggctggaaggggctcactagctgggctcttgccctttggtgatgcaaatgatattgtacttcagatggccaacgaagtgttgcctgtggttaaaggagttcctgttcttgctggggtatgtgctatagatccatttcgtcgaatggaatactttctgagacaactagaaaccattggattttgcggtgtgcaaaacttcccaaccgtaggtctgtttgatgggaattttagacataatttggaggaaactggaatgagcatggaagtggagatgatttcaatggctcatcgcatgggtttccttactactccatatgctttcaatccggatgaagttgctgccatggccaaggcaggatctcatatcgtagttgcacatatgggtctgacaactgcagggtctttcggggcaatgacagctaccactttagatgatagtgttttacgtgttcaggccattgcagatgcggcatttggggttaatcctgatataattgttttatgtcatgaaggccccatatctggacccctagaagctgaattcatattgaagaatactgaaagggttcatggattttacggtgcatcaagcatggaaagattaccagtagagcaaactatcacgaacaccgtgagagagtagaaaagaatttccttaaaatgagaaccatcgtttacatgtgtgatttaagcctgttgttcttccgttacacttcgaagattctttcatctctgcctctttatttgtctcttacctatatatctattcactaacacttggacaggtaacttggtgaaaattgtaattccacgatctaaccccaacgatgctcatgttgccggtgttggaaaggtcttctccgagtgtgtgaattcacattagcagaaattaag

SEQ ID NO: 21770 - DNA, 741 bp, Zea Mays
gctgcagcgcctgtccaaacaagccttaaaattgcactacatgaaaaggtagattcaggtgcaaccaagaacaactatgtttatagtagtactcgaatcggattaggtggaattggattatttacattgagcctctcagacactatatagagtttacatgacttgggccaaagccggtacacaaggatcctaacaccaactaactctatcctagtcgtgatatactctaacaatgttaagtgcaactaagaacagcagaagtagattcaatcaagatcctcagtcacaagaaacaatgtatagtttgacaaagcaaagttgagatcaggtccatatgcacctgaatagtcgcaagaaacaacagataggtttcaatcccaaagaggccaagtacattttgggatgtcgccgcatttccacgccctccgttgaggtggtcgattgcagcggcgtccccgtcgtggatcggagcgatgatggccgcccgcttgtcgtgctccctcagcgcgccggccagcatccccgcgatcgcagaaaccagcacctcgcaccgctccaaacagggcgcgacggcatgctcgtcctccactccgccgtcgcccacgttctctggagaccagtggccatcgacggtggattgggagggacatccactctgtctagtcggctggtgttctcatccagaggacgagcggtgtggtggagagaaacatgagtaggccactccccttttcccctttt

SEQ ID NO: 21771 - DNA, 998 bp, Zea Mays
gtataagtatgaataagctggatatagtctcacgttcgtgacatacacatatgacatatgtttaaatatgggtataagtatggataagctagatatagtctcacgcgcatgacatacgcatatgacatatctgcagtatcttttttctgcaacatgttccaaaagaaaaggaaatcataaagaccgagttacagcagtcaatttgtcacccttttacaaactagttaagtatacacgaggaccaactcagaaacatatgccagaagcttttaagacctacattgtgcagtacagtattattttatgaacactcgtgttcacaatgaacaggggaagagctgcagtatcctatcaatgtaaatcatcttggtccaaagtatccaatgactgaaaaaaatacctcaggaagcaaaagtccgttccagaaatattttgtctcataaatccttcggctcaagatactcagacaggctaggtgaagaatggatgagccctgtactcgaatatgacaatgcatactcttctatgttctctaatctgttatcatagttacagcatattacccatgaaacccatccaaaggtattaatcatatcactagtacatcaataggagcgtacctgtaaagataattgaccatgatacctccactttgttgaatgcccttctctgattggtcagccatccaattaattctctcaatcatctaccaaaatagcaagtgctgttatgtgaagcggttgtttcaaatagctagttatctgatttgattaggccccaagtttacacatgaaaaatatcatataatgtcttacatagtaaagaaggtactacaacatcgttttacaattttatttaaaaaaatcaccgggtctgccctttgtttatttttttcaggtacaggtcaaccaaacatgacaaaaccacatctgttcttcagcagcaccatttcaaactgaatttgtgatagtagcttactgctccattttgcaagtgaa

SEQ ID NO: 21772 - DNA, 1773 bp, Zea Mays
caggaaaccaaaagccgcccgcagttagtgtccgctggaagccggggtcatttcgctaaggttcgaccgcgcggcgccgcagctctctcccctcgcaactcccgccgtcgccgccgccgcagcgggacgcgggcctcgtccgcagtccctctgcttcatccgccgccttcctcgtcgtcttcgcagggttttgaccgcgccgccgcaactccgtcgccacattctgcaggcatcgtcaaggttggactcctcccccatcgcatcgtcgtcttcgcagatggattcagtagactccatagccgacaaggcaattggaaggatgcaagagattgcggacaagatattttccgtggcgagggaaacaatccgtcctggacgcgggttgccctcatttgacgctaccaaacttcgtgtagcattggaggacattgcttgcatgctggagcaagactctctggtgttacaagagtatttggacaaggtcaacaatgttaacaaccaacctgacaccaactacgaaccctcagacttgtcctcaccaccccctggtgaagaagacctaagtgaagactgggactttgccgagcacttcgaaaagttttggggtgttgaatatgactcagatcagatgccttcctttagtgacaacgaggtttgaggtagtacgtggtaaacatgttagggtacagggtttagggttagttcaataggaacagacttttggttagtgcgcaggtgtaatctgttccatgtgttttgtgtccatgaacaagtggattaatttgcagtgtggtatgtctatgtaataagtccaacctgaatgttaccacttgtgctactagaaatggtattatggtaccataattgtgttctttttatttggttcttatttcgccttcaattcgtagttctataactgtatacttgttttgcattagatagacaagtctggcaaagttattgcaaagtgggacacaagagcaactaaaatttacacagaaatttgtgtagaagaggttaatgcacgcaacaggccacaacactttctaaatgcagaagggtatgctaacctcattaggaagtttaaggaacgcactggacacacatacacgagggatcaaatgaagaataggtgggactctttaaagagaatgtacacacaatggaaaacactgaatgaaagggctacaggtcttggtcgagaccctcatactggttcaatcagtgcaccagatgagtggtgggctaagcaaaatgaagcaatgccagggtgtatccaatttaaaatagccctgcttgagaatgaggacgatcttaagattatgtttggccccattgtgtgcaccaatgagacaacccttgttcctggagttgaggatgctaattcatcttctgatggtcacgaagaagaaattgtaggtggcggtgaaaacagtacacctgaccccggctcaattgagaaaggtaagcgcaaggtgttccatgattctcctacacctaagaagaaaagggatgtcaaggacgaatacatgaaacgccttgtcgaagcttatgagtctaggtccttgtgctctaacatgtccataacttcttatgagaacgaccccgttcgtaaagaggttgctgctcaattgcaacaagtgattgaagatggtgcaccggaaagaagcgacttacatttctttgcgactcatttgttaatggaaaaacgttacagagatgtgtttgcaaccctaaagaccaaagaaggaagatcgcttggctgcgtcgtgc

SEQ ID NO: 21773 - DNA, 353 bp, Zea Mays
ctaaggttcgaccgcgcggcgccgcagctctctcccctcgcaactcccgccgtcgccgccgccgcagcgggacgcgggcctcgtccgcagtccctctgcttcatccgccgccttcctcgtcgtcttcgcagggttttgaccgcgccgccgcaactccgtcgccacattctgcaggcatcgtcaaggttggactcctcccccatcgcatcgtcgtcttcgcagatttcggcgactaatctggtagttcctgttgcgtccgaagatccagtggtaccaaggagtcgtcgcatatgcggccggccggggcatgcacgcggatgcgcagaagctgacggacgaacgaaaggggaaaa

SEQ ID NO: 21774 - DNA, 1735 bp, Zea Mays
tgttttagtttaggggtaaaatagtccaattagttgatactttatcaaataaccccctaaatggcattttatctgtaatccagtgtttgaaaatggcgtaataacgaagcgtgttctcataatggcattcgagcgaatccgtagtttgataatggcataaatccaattttctcctccaccgagccggccgaatcaaatcgaaccgcgggcagcgcgcacgcgcagcgactgccggcgatggcgagcctcaccctgccgccggcgccccccaacccacgccaggacgccatcgacctccacaaggccttcaaagaaagctatgtcgctgtggattcttgatcctgctggacgtgatgcaactgttttgagagaagctctaaatggtgacactatggatctgagagcagccactgagattatatgttccaggacaccatcacagttgcaaataatgaaacagacttattatgctagattcggtacttatcttgagcatgacattgctcaccacacatccggtgatcaccagaagcttttacttgcatatatggggattccacgctatgaaggtcccgaggttgatcctacaattgtgacacatgatgcaaaggatttgtacaaagctggtgagaaaaggctgggtacggacgagaagatttttatccgtgttttcactgaacgcagttgggcacacttggcatctgtttcttctgcttaccatcatatgtatgaccggaaattagagaaggttatcaagagcgaaacttctggaaactttgaatttgcacttttgactatcctcagatgcgcggaaaacccagcaaagtattttgctaagctcttacgaaaggccatgaaaggtttaggcactgatgacatgacacttataagggtggtggtgacgaggaccgagattgacatgcaatatatcaaggcagagtacttgaagaagtacaagaagccattagctgaggctatcaactccgagacatcaggaaactatcggacgttccttctttcacttgttggtcatggccattaggctatgtttcgaccatgggacatgatatttctatcgatccaccctaaatgcagcgacctacctggaaaacttatgatgttgccatttatctgtcgtgactcctggatctaactgccacatatcacatatgcggttcctagtatgcttgtttaaagtattcgtgtatatatttccatccgggtttcttgttggaagattctggatgggataccagatcagctgttgctggtcacagtgggcttgactggtgtctctatgacgccaatattattatgtcatgttcttgtggtatttccttcatttgttattctgtttttcgctgcttatcccatatccctgttttctccgtccttcacggagaccaacgtcttaggacataacccagagatataggggtacgtttcttggagtataaaagataggttttgtatcttattgtaagatatgactcatacgagggttgtatatatgaagctgtttgttggacttaaaagaaccgtgttaaagatatgtcattgttagaacaactactccctccgtttctttttatttgttgctggatagtgtaattttacactatacaccgacaaataaaaagaaacagagggagtacaagagcttcctaaaaagttgttccccaaaacatcatattaggggctgctgaaaaacaaactcctctaaaaaaaatctaaa

SEQ ID NO: 21775 - DNA, 1832 bp, Zea Mays
aaaatagtccaattagttgatactttatcaaataaccccctaaatggcattttatctgtaatccagtgtttgaaaatggcgtaataacgaagcgtgttctcataatggcattcgagcgaatccgtagtttgataatggcataaatccaattttctcctccaccgagccggccgaatcaaatcgaaccgcgggcagcgcgcacgcgcagcgactgccggcgatggcgagcctcaccctgccgccggcgccccccaacccacgccaggacgccatcgacctccacaaggccttcaaagggtttggatgtgacagtacaacagtgataaacatacttactcatcgcgattcggtgcagcgtggactcattcaacaggaatacagggctatgtatcatgaggaactctcccaccaaagctatgtcgctgtggattcttgatcctgctggacgtgatgcaactgttttgagagaagctctaaatggtgacactatggatctgagagcagccactgagattatatgttccaggacaccatcacagttgcaaataatgaaacagacttattatgctagattcggtacttatcttgagcatgacattgctcaccacacatccggtgatcaccagaagcttttacttgcatatatggggattccacgctatgaaggtcccgaggttgatcctacaattgtgacacatgatgcaaaggatttgtacaaagctggtgagaaaaggctgggtacggacgagaagatttttatccgtgttttcactgaacgcagttgggcacacttggcatctgtttcttctgcttaccatcatatgtatgaccggaaattagagaaggttatcaagagcgaaacttctggaaactttgaatttgcacttttgactatcctcagatgcgcggaaaacccagcaaagtattttgctaagctcttacgaaaggccatgaaaggtttaggcactgatgacatgacacttataagggtggtggtgacgaggaccgagattgacatgcaatatatcaaggcagagtacttgaagaagtacaagaagccattagctgaggctatcaactccgagacatcaggaaactatcggacgttccttctttcacttgttggtcatggccattaggctatgtttcgaccatgggacatgatatttctatcgatccaccctaaatgcagcgacctacctggaaaacttatgatgttgccatttatctgtcgtgactcctggatctaactgccacatatcacatatgcggttcctagtatgcttgtttaaagtattcgtgtatatatttccatccgggtttcttgttggaagattctggatgggataccagatcagctgttgctggtcacagtgggcttgactggtgtctctatgacgccaatattattatgtcatgttcttgtggtatttccttcatttgttattctgtttttcgctgcttatcccatatccctgttttctccgtccttcacggagaccaacgtcttaggacataacccagagatataggggtacgtttcttggagtataaaagataggttttgtatcttattgtaagatatgactcatacgagggttgtatatatgaagctgtttgttggacttaaaagaaccgtgttaaagatatgtcattgttagaacaactactccctccgtttctttttatttgttgctggatagtgtaattttacactatacaccgacaaataaaaagaaacagagggagtacaagagcttcctaaaaagttgttccccaaaacatcatattaggggctgctgaaaaacaaactcctctaaaaaaaatctaaa

SEQ ID NO: 21776 - DNA, 1616 bp, Zea Mays
cccattccacctcttcttatctcacccctactccaaactcaactgtgcagtctacagtgttttacacggccacacgctacgctgaggtttggatgtgacagtacaacagtgataaacatacttactcatcgcgattcggtgcagcgtggactcattcaacaggaatacagggctatgtatcatgaggaactctcccaccgtatttcatctgaactcagtggaaaccacaagaaagctatgtcgctgtggattcttgatcctgctggacgtgatgcaactgttttgagagaagctctaaatggtgacactatggatctgagagcagccactgagattatatgttccaggacaccatcacagttgcaaataatgaaacagacttattatgctagattcggtacttatcttgagcatgacattgctcaccacacatccggtgatcaccagaaggtcccgaggttgatcctacaattgtgacacatgatgcaaaggatttgtacaaagctggtgagaaaaggctgggtacggacgagaagatttttatccgtgttttcactgaacgcagttgggcacacttggcatctgtttcttctgcttaccatcatatgtatgaccggaaattagagaaggttatcaagagcgaaacttctggaaactttgaatttgcacttttgactatcctcagatgcgcggaaaacccagcaaagtattttgctaagctcttacgaaaggccatgaaaggtttaggcactgatgacatgacacttataagggtggtggtgacgaggaccgagattgacatgcaatatatcaaggcagagtacttgaagaagtacaagaagccattagctgaggctatcaactccgagacatcaggaaactatcggacgttccttctttcacttgttggtcatggccattaggctatgtttcgaccatgggacatgatatttctatcgatccaccctaaatgcagcgacctacctggaaaacttatgatgttgccatttatctgtcgtgactcctggatctaactgccacatatcacatatgcggttcctagtatgcttgtttaaagtattcgtgtatatatttccatccgggtttcttgttggaagattctggatgggataccagatcagctgttgctggtcacagtgggcttgactggtgtctctatgacgccaatattattatgtcatgttcttgtggtatttccttcatttgttattctgtttttcgctgcttatcccatatccctgttttctccgtccttcacggagaccaacgtcttaggacataacccagagatataggggtacgtttcttggagtataaaagataggttttgtatcttattgtaagatatgactcatacgagggttgtatatatgaagctgtttgttggacttaaaagaaccgtgttaaagatatgtcattgttagaacaactactccctccgtttctttttatttgttgctggatagtgtaattttacactatacaccgacaaataaaaagaaacagagggagtacaagagcttcctaaaaagttgttccccaaaacatcatattaggggctgctgaaaaacaaactcctctaaaaaaaatctaaa

SEQ ID NO: 21777 - DNA, 1637 bp, Zea Mays
cttcttatctcacccctactccaaactcaactgtgcagtctacagtgttttacacggccacacgctacgctgaggtttggatgtgacagtacaacagtgataaacatacttactcatcgcgattcggtgcagcgtggactcattcaacaggaatacagggctatgtatcatgaggaactctcccaccgtatttcatctgaactcagtggaaaccacaagctatgtcgctgtggattcttgatcctgctggacgtgatgcaactgttttgagagaagctctaaatggtgacactatggatctgagagcagccactgagattatatgttccaggacaccatcacagttgcaaataatgaaacagacttattatgctagattcggtacttatcttgagcatgacattgctcaccacacatccggtgatcaccagaagcttttacttgcatatatggggattccacgctatgaaggtcccgaggttgatcctacaattgtgacacatgatgcaaaggatttgtacaaagctggtgagaaaaggctgggtacggacgagaagatttttatccgtgttttcactgaacgcagttgggcacacttggcatctgtttcttctgcttaccatcatatgtatgaccggaaattagagaaggttatcaagagcgaaacttctggaaactttgaatttgcacttttgactatcctcagatgcgcggaaaacccagcaaagtattttgctaagctcttacgaaaggccatgaaaggtttaggcactgatgacatgacacttataagggtggtggtgacgaggaccgagattgacatgcaatatatcaaggcagagtacttgaagaagtacaagaagccattagctgaggctatcaactccgagacatcaggaaactatcggacgttccttctttcacttgttggtcatggccattaggctatgtttcgaccatgggacatgatatttctatcgatccaccctaaatgcagcgacctacctggaaaacttatgatgttgccatttatctgtcgtgactcctggatctaactgccacatatcacatatgcggttcctagtatgcttgtttaaagtattcgtgtatatatttccatccgggtttcttgttggaagattctggatgggataccagatcagctgttgctggtcacagtgggcttgactggtgtctctatgacgccaatattattatgtcatgttcttgtggtatttccttcatttgttattctgtttttcgctgcttatcccatatccctgttttctccgtccttcacggagaccaacgtcttaggacataacccagagatataggggtacgtttcttggagtataaaagataggttttgtatcttattgtaagatatgactcatacgagggttgtatatatgaagctgtttgttggacttaaaagaaccgtgttaaagatatgtcattgttagaacaactactccctccgtttctttttatttgttgctggatagtgtaattttacactatacaccgacaaataaaaagaaacagagggagtacaagagcttcctaaaaagttgttccccaaaacatcatattaggggctgctgaaaaacaaactcctctaaaaaaaatctaaa

SEQ ID NO: 21778 - DNA, 1633 bp, Zea Mays
ctcacccctactccaaactcaactgtgcagtctacagtgttttacacggccacacgctacgctgaggtttggatgtgacagtacaacagtgataaacatacttactcatcgcgattcggtgcagcgtggactcattcaacaggaatacagggctatgtatcatgaggaactctcccaccgtatttcatctgaactcagtggaaaccacaagaaagctatgtcgctgtggattcttgatcctgctggacgtgatgcaactgttttgagagaagctctaaatggtgacactatggatctgagagcagccactgagattatatgttccaggacaccatcacagttgcaaataatgaaacagacttattatgctagattcggtacttatcttgagcatgacattgctcaccacacatccggtgatcaccagaagcttttacttgcatatatggggattccacgctatgaaggtcccgaggttgatcctacaattgtgacacatgatgcaaaggatttgtacaaagctggtgagaaaaggctgggtacggacgagaagatttttatccgtgttttcactgaacgcagttgggcacacttggcatctgtttcttctgcttaccatcatatgtatgaccggaaattagagaaggttatcaagagcgaaacttctggaaactttgaatttgcacttttgactatcctcagatgcgcggaaaacccagcaaagtattttgctaagctcttacgaaaggccatgaaaggtttaggcactgatgacatgacacttataagggtggtggtgacgaggaccgagattgacatgcaatatatcaaggcagagtacttgaagaagtacaagaagccattagctgaggctatcaactccgagacatcaggaaactatcggacgttccttctttcacttgttggtcatggccattaggctatgtttcgaccatgggacatgatatttctatcgatccaccctaaatgcagcgacctacctggaaaacttatgatgttgccatttatctgtcgtgactcctggatctaactgccacatatcacatatgcggttcctagtatgcttgtttaaagtattcgtgtatatatttccatccgggtttcttgttggaagattctggatgggataccagatcagctgttgctggtcacagtgggcttgactggtgtctctatgacgccaatattattatgtcatgttcttgtggtatttccttcatttgttattctgtttttcgctgcttatcccatatccctgttttctccgtccttcacggagaccaacgtcttaggacataacccagagatataggggtacgtttcttggagtataaaagataggttttgtatcttattgtaagatatgactcatacgagggttgtatatatgaagctgtttgttggacttaaaagaaccgtgttaaagatatgtcattgttagaacaactactccctccgtttctttttatttgttgctggatagtgtaattttacactatacaccgacaaataaaaagaaacagagggagtacaagagcttcctaaaaagttgttccccaaaacatcatattaggggctgctgaaaaacaaactcctctaaaaaaaatctaaa

SEQ ID NO: 21779 - DNA, 284 bp, Zea Mays
gccagtgatcgcttgaggcccacgactgcctaccgctgagactaggtccaagagcccttcgcacgacaccagcgtgcctatgtggagtactccaacgatctggacacacttacgccatcgatggtgacctggtaaccatatcatgagccaacattcgccaacatccagttgagcaccatgtacgagatagacgaggacctttacttaatgaggtgtgccctcatttgcttctatgctgttgagtatcacttgccccacagagtggctcgacaatttggtttgcg

SEQ ID NO: 21780 - DNA, 533 bp, Zea Mays
tatgggtgaacttgagtgtatctcatggagaacttcagacaccacaacgcgttactatcaagggtatcatgtcgccttcgttgtgcagcggctcattgtggatgccggtccctagctgcctgtgcctcctatgcagccagacgttcaccgtcccgttcctgcagttggaccttctatagctggccagagctcctcgcaatcgacgtgggatacatttgcagatgtggacgatgacgatgacgacgacgatgacgcaggtcaagacgtgattggaccgtcccagctgcaggacgctcccacaacttagccatcacagctcacacaacatagacgacgtccacgtgacccatacactccaggcaccgacgctcttggggccaagggcaagggtaagactagaaggatgtgagtactatgtgatgtagaccttatgatgaaaactttgtgatgtggaccttgtgatgtaaactttgttatgtggactatgttatgtggaccttgtattaaggactatgttatgtggactttgtgat

SEQ ID NO: 21781 - DNA, 1689 bp, Zea Mays
atggatcctcttcgtccctggctccccgcggcgacagcctccagctctccaccagcgccgctccgcgtgagcgtccacgctccaatcgaccaatcccatctgttcgcggccgcccacgcttccgccgccagcgccttgatgaaggacaagatgaaggatttcgtgaagaagatcacctcctccgggtccgggaccccctcctccttcaagggaacctcccacgtccttggctccggcccctccccctcctcctcctcctcccaccccgcttcccgtccttcaaaccctagcgcaaaccccaggcccgcccctatgcggccctccccacctcccccgcccacttcaaccaccgatttcgcccccctcacgcccctcgtctcctcctcctcctgccgtccagatgcgaacggcaccgcggccgccgccgtcgcttgccccagctgcggagacgcgttcccgtccgaggtcgccgtctccgagcacctcgacggctgcctcgcgtcggcagggggcgcccgcgcgtgtgcctccgcgtacctcgccgccgacccgcccccgcccgcggcctccgtggaggtggtcaaacgcctgctgggcaacctgctgcgggagcccgagaacgacaagttcaggcgggtgaggctgagcaacccgcggatcaaagaggcggtggcggacagggaaggcgggatggagctcttggaggccgtcgggttcagggtcagagatgagggcggagaacccttcgccgtgatgaacgaagtgcccagggacgcgaggctcaatgggatcaggagggccgtcctcctgctcgagggggcacacccctctgcgcctccagtgaaggcagaggttgaggccaaggagagctgcagtaatgtggctgatctgcaggacggtgctaagaatattgatcggttcgggtatttttctctgttcctgagagttctgtggcacaaaatgatgtaccagattctttttacaatcttactggtaatgagatacggaatgaagcaaagatgaggagggaaaggttagaacaatcacgattgttgataccaaagtcttacaaggagaagcaggcattggctgctcgacagaagtataaacaagctgtcattcgagtcgagtttccagatagaatgattcttcagggcgtattcctaccaggcgaggccactggttcgctgtatgagttcgtcacatctgctctgaagcagccaggcttggagttcgaacttatctctcccgccattcctaagccgcgtgtggtgcctcattttccaaacccgggagagcgggcacgcaccttgcaagaggaggagctggtcccttccgcgctcctcaagttcattcccagggagactgattccgtggtcttcaccggtttgcttgatgagcttctgaaggccagtgagccgcttcctgctgcatcacaatgaagtgtgtgtgtatgtgtgtgtatagcagttcgttctgttgctgtttctgcttgctgcatcacaggattacttggataataacggtacatatttgtattggctgacatatcttgtggaaaggttgacatactcgagaattcgttaggcccatgctgaactggatatgggctggactggactggactgtaaaactcaatacatggcaagattgcttgatttggctgtcgcggattcttaccgatttttt

SEQ ID NO: 21782 - DNA, 331 bp, Zea Mays
caaaaaatcacatgataaaatcaagccataccgtaaacaactattgtcgcataaaattcaagttttatatcaatacatgatacaaaatttaaagaaaaaaccatataaaaaaagcaaacatgccgttaagttcttgttgaccgaggcaattgcatccttctagttttgagacgttgaaatcgtcgaataataacctcatcatcaacggatttgaagatctctttctcagtgtagcaaaccattaattattgacattattggcattattattatcctgaccaccaattgcggacccccttgaaagtggttgaaaaaatctcctcatttatct

SEQ ID NO: 21783 - DNA, 1540 bp, Zea Mays
ctcaaaacatcgtacaaaaatagcccatgtgcacggcacacatcatcctagcaaacgtccttatccggctacaactttcgcgacgtctgcgacatcagaaaactgagctcgccccctcttgccttccctcctccgccggaccgctgctgtccgcctccaaccctccagttcgacgcaggcggcgacggcggcgcgccgagatgaaggtctccgtgaagacgctcaagggatctagcttccagatcgaagtggagcccaccgacaaggttgctgctgtgaaaaaggtcatagagaatatgcaagagcaggcttcctatccagctgaccaacaagtccttatacatcaaggaaaggtgctcagcgatgacaccacattagaggaaaatcaagtgactgagaataatttccttgttataatgctcagacagaacaagggatcatcaagtgcagcaccggctaagacaactgcgaatcaggcacctcctactcagacagtgcctgttgttccacctcaaacgtcagcagccccagctgcaccagcacctattgtacctgtcagtgcactggctgcaactgctacagcctcagcagctcctgctgttgctgtatcgggattcctgaacaaatggatgttcctacatcacctccgagtatccagccagtcaatcctgtccaggctgcacaagcagctcaaactgcagctccatctggaccaaatgctaaccctctagacctctttccccaatctcttccgaatgcttccgccaatgctggcacaggaaaccttgatgttttgcgcaataacgtacaattccaaaacctgcttggtttggtgcaggctaatcctcagattttgcagccattgcttcaagaattgggtaaacaaaatccccaggttatgcagctaatccaggaaaaccaagcagagttcatgcggatgatcaatgaaccacttgagggagacgaagagaatgaaatgatgctggaccagatggcggatgcagctgagaccattgcagtgactccagaggagaacgaagctatacttcgtcttgaagggatgggctttgaccgggcactggtcctggaagtgttcttcgcgtgcaacaagaatgagcagctgaccgccaactacctcttggatcacatgcacgagttcgacaacgatgacgggctcggagggccaccgctatgagggcgctctcgatccctacatcatgcgaacgaaggctgtagggcagtagtaggaaaacgttttgggattcgtcccgtctgttcgctcactctacatattcgtttggctttgctgtttagtacagaatttctagatttacggacttactacttgatatcctgatatagaggtcacggccaagcttactttttttccccctggatcaacttgttagcttactactatgttttgtgctacttcttgccgcattgggccagcggttcaacctggcaagcgctggctgcagcagtagcaccgagatgcttgtgggtttcgcggtggttcgtttaggctttggcttctacg

SEQ ID NO: 21784 - DNA, 1955 bp, Zea Mays
gcacggcacacatcatcctagcaaacgtccttatccggctacaactttcgcgacgtctgcgacatcagaaaactgagctcgccccctcttgccttccctcctccgccggaccgctgctgtccgcctccaaccctccagttcgacgcaggcggcgacggcggcgcgccgagatgaaggtctccgtgaagacgctcaagggatctagcttccagatcgaagtggagcccaccgacaaggttgctgctgtgaaaaaggtcatagagaatatgcaagagcaggcttcctatccagctgaccaacaagtccttatacatcaaggaaaggtgctcagcgatgacaccacattagaggaaaatcaagtgactgagaataatttccttgttataatgctcagacagaacaagggatcatcaagtgcagcaccggctaagacaactgcgaatcaggcacctcctactcagacagtgcctgttgttccacctcaaacgtcagcagccccagctgcaccagcacctattgtacctgtcagtgcactggctgcaactgctacagcctcagcagctcctgctgttgctgtatccaccgaggcagatagttatggtcaggctgcctcaaacctagttgctggcagcaacttggaaggaacaattcaatccattcttgaaatgggtggcgggatatgggacagagacactgtactacgtgccctgcgggttgcgtataacaacccagagcgcgctgttgagtacttatattctgtaagaatgattctttgtcctcccttgctactttctaggccttaattataatgaactttcagcgatctatgtgtgcccaaataaatttaactagtgaatacattatctattgcataaattagattgaagccgcatgcagatatgtttaatttgaatatttggtgactgttaaaagttaattgcccttttaacctacattacgatttacgaggatacaattttgttttacaaatgtagacacactaatgtccttcctcttctgtttaggggattcctgaacaaatggatgttcctacatcacctccgagtatccagccagtcaatcctgtccaggctgcacaagcagctcaaactgcagctccatctggaccaaatgctaaccctctagacctctttccccaatctcttccgaatgcttccgccaatgctggcacaggaaaccttgatgttttgcgcaataacgtacaattccaaaacctgcttggtttggtgcaggctaatcctcagattttgcagccattgcttcaagaattgggtaaacaaaatccccaggttatgcagctaatccaggaaaaccaagcagagttcatgcggatgatcaatgaaccacttgagggagacgaagagaatgaaatgatgctggaccagatggcggatgcagctgagaccattgcagtgactccagaggagaacgaagctatacttcgtcttgaagggatgggctttgaccgggcactggtcctggaagtgttcttcgcgtgcaacaagaatgagcagctgaccgccaactacctcttggatcacatgcacgagttcgacaacgatgacgggctcggagggccaccgctatgagggcgctctcgatccctacatcatgcgaacgaaggctgtagggcagtagtaggaaaacgttttgggattcgtcccgtctgttcgctcactctacatattcgtttggctttgctgtttagtacagaatttctagatttacggacttactacttgatatcctgatatagaggtcacggccaagcttactttttttccccctggatcaacttgttagcttactactatgttttgtgctacttcttgccgcattgggccagcggttcaacctggcaagcgctggctgcagcagtagcaccgagatgcttgtgggtttcgcggtggttcgtttaggctttggcttctacg

SEQ ID NO: 21785 - DNA, 1707 bp, Zea Mays
gcacggcacacatcatcctagcaaacgtccttatccggctacaactttcgcgacgtctgcgacatcagaaaactgagctcgccccctcttgccttccctcctccgccggaccgctgctgtccgcctccaaccctccagttcgacgcaggcggcgacggcggcgcgccgagatgaaggtctccgtgaagacgctcaagggatctagcttccagatcgaagtggagcccaccgacaaggttgctgctgtgaaaaaggtcatagagaatatgcaagagcaggcttcctatccagctgaccaacaagtccttatacatcaaggaaaggtgctcagcgatgacaccacattagaggaaaatcaagtgactgagaataatttccttgttataatgctcagacagaacaagggatcatcaagtgcagcaccggctaagacaactgcgaatcaggcacctcctactcagacagtgcctgttgttccacctcaaacgtcagcagccccagctgcaccagcacctatgtgagcttcgtatttattttgtacctgtcagtgcactggctgcaactgctacagcctcagcagctcctgctgttgctgtatccaccgaggcagatagttatggtcaggctgcctcaaacctagttgctggcagcaacttggaaggaacaattcaatccattcttgaaatgggtggcgggatatgggacagagacactgtactacgtgccctgcgggttgcgtataacaacccagagcgcgctgttgagtacttatattctgggattcctgaacaaatggatgttcctacatcacctccgagtatccagccagtcaatcctgtccaggctgcacaagcagctcaaactgcagctccatctggaccaaatgctaaccctctagacctctttccccaatctcttccgaatgcttccgccaatgctggcacaggaaaccttgatgttttgcgcaataacgtacaattccaaaacctgcttggtttggtgcaggctaatcctcagattttgcagccattgcttcaagaattgggtaaacaaaatccccaggttatgcagctaatccaggaaaaccaagcagagttcatgcggatgatcaatgaaccacttgagggagacgaagagaatgaaatgatgctggaccagatggcggatgcagctgagaccattgcagtgactccagaggagaacgaagctatacttcgtcttgaagggatgggctttgaccgggcactggtcctggaagtgttcttcgcgtgcaacaagaatgagcagctgaccgccaactacctcttggatcacatgcacgagttcgacaacgatgacgggctcggagggccaccgctatgagggcgctctcgatccctacatcatgcgaacgaaggctgtagggcagtagtaggaaaacgttttgggattcgtcccgtctgttcgctcactctacatattcgtttggctttgctgtttagtacagaatttctagatttacggacttactacttgatatcctgatatagaggtcacggccaagcttactttttttccccctggatcaacttgttagcttactactatgttttgtgctacttcttgccgcattgggccagcggttcaacctggcaagcgctggctgcagcagtagcaccgagatgcttgtgggtttcgcggtggttcgtttaggctttggcttctacg

SEQ ID NO: 21786 - DNA, 1640 bp, Zea Mays
gcacggcacacatcatcctagcaaacgtccttatccggctacaactttcgcgacgtctgcgacatcagaaaactgagctcgccccctcttgccttccctcctccgccggaccgctgctgtccgcctccaaccctccagttcgacgcaggcggcgacggcggcgcgccgagatgaaggtctccgtgaagacgctcaagggatctagcttccagatcgaagtggagcccaccgacaaggttgctgctgtgaaaaaggtcatagagaatatgcaagagcaggcttcctatccagctgaccaacaagtccttatacatcaaggaaaggtgctcagcgatgacaccacattagaggaaaatcaagtgactgagaataatttccttgttataatgctcagacaggcacctcctactcagacagtgcctgttgttccacctcaaacgtcagcagccccagctgcaccagcacctattgtacctgtcagtgcactggctgcaactgctacagcctcagcagctcctgctgttgctgtatccaccgaggcagatagttatggtcaggctgcctcaaacctagttgctggcagcaacttggaaggaacaattcaatccattcttgaaatgggtggcgggatatgggacagagacactgtactacgtgccctgcgggttgcgtataacaacccagagcgcgctgttgagtacttatattctgggattcctgaacaaatggatgttcctacatcacctccgagtatccagccagtcaatcctgtccaggctgcacaagcagctcaaactgcagctccatctggaccaaatgctaaccctctagacctctttccccaatctcttccgaatgcttccgccaatgctggcacaggaaaccttgatgttttgcgcaataacgtacaattccaaaacctgcttggtttggtgcaggctaatcctcagattttgcagccattgcttcaagaattgggtaaacaaaatccccaggttatgcagctaatccaggaaaaccaagcagagttcatgcggatgatcaatgaaccacttgagggagacgaagagaatgaaatgatgctggaccagatggcggatgcagctgagaccattgcagtgactccagaggagaacgaagctatacttcgtcttgaagggatgggctttgaccgggcactggtcctggaagtgttcttcgcgtgcaacaagaatgagcagctgaccgccaactacctcttggatcacatgcacgagttcgacaacgatgacgggctcggagggccaccgctatgagggcgctctcgatccctacatcatgcgaacgaaggctgtagggcagtagtaggaaaacgttttgggattcgtcccgtctgttcgctcactctacatattcgtttggctttgctgtttagtacagaatttctagatttacggacttactacttgatatcctgatatagaggtcacggccaagcttactttttttccccctggatcaacttgttagcttactactatgttttgtgctacttcttgccgcattgggccagcggttcaacctggcaagcgctggctgcagcagtagcaccgagatgcttgtgggtttcgcggtggttcgtttaggctttggcttctacg

SEQ ID NO: 21787 - DNA, 1435 bp, Zea Mays
gcacggcacacatcatcctagcaaacgtccttatccggctacaactttcgcgacgtctgcgacatcagaaaactgagctcgccccctcttgccttccctcctccgccggaccgctgctgtccgcctccaaccctccagttcgacgcaggcggcgacggcggcgcgccgagatgaaggtctccgtgaagacgctcaagggatctagcttccagatcgaagtggagcccaccgacaaggttgctgctgtgaaaaaggtcatagagaatatgcaagagcaggcttcctatccagctgaccaacaagtccttatacatcaaggaaagaacaagggatcatcaagtgcagcaccggctaagacaactgcgaatcaggcacctcctactcagacagtgcctgttgttccacctcaaacgtcagcagccccagctgcaccagcacctattgtacctgtcagtgcactggctgcaactgctacagcctcagcagctcctgctgttgctgtatcgggattcctgaacaaatggatgttcctacatcacctccgagtatccagccagtcaatcctgtccaggctgcacaagcagctcaaactgcagctccatctggaccaaatgctaaccctctagacctctttccccaatctcttccgaatgcttccgccaatgctggcacaggaaaccttgatgttttgcgcaataacgtacaattccaaaacctgcttggtttggtgcaggctaatcctcagattttgcagccattgcttcaagaattgggtaaacaaaatccccaggttatgcagctaatccaggaaaaccaagcagagttcatgcggatgatcaatgaaccacttgagggagacgaagagaatgaaatgatgctggaccagatggcggatgcagctgagaccattgcagtgactccagaggagaacgaagctatacttcgtcttgaagggatgggctttgaccgggcactggtcctggaagtgttcttcgcgtgcaacaagaatgagcagctgaccgccaactacctcttggatcacatgcacgagttcgacaacgatgacgggctcggagggccaccgctatgagggcgctctcgatccctacatcatgcgaacgaaggctgtagggcagtagtaggaaaacgttttgggattcgtcccgtctgttcgctcactctacatattcgtttggctttgctgtttagtacagaatttctagatttacggacttactacttgatatcctgatatagaggtcacggccaagcttactttttttccccctggatcaacttgttagcttactactatgttttgtgctacttcttgccgcattgggccagcggttcaacctggcaagcgctggctgcagcagtagcaccgagatgcttgtgggtttcgcggtggttcgtttaggctttggcttctacg

SEQ ID NO: 21788 - DNA, 1403 bp, Zea Mays
gtgccataaaagaaagcttcaaaattgttgctgctgtgaaaaaggtcatagagaatatgcaagagcaggcttcctatccagctgaccaacaagtccttatacatcaaggaaagaacaagggatcatcaagtgcagcaccggctaagacaactgcgaatcaggcacctcctactcagacagtgcctgttgttccacctcaaacgtcagcagccccagctgcaccagcacctattgtacctgtcagtgcactggctgcaactgctacagcctcagcagctcctgctgttgctgtatccaccgaggcagatagttatggtcaggctgcctcaaacctagttgctggcagcaacttggaaggaacaattcaatccattcttgaaatgggtggcgggatatgggacagagacactgtactacgtgccctgcgggttgcgtataacaacccagagcgcgctgttgagtacttatattctgggattcctgaacaaatggatgttcctacatcacctccgagtatccagccagtcaatcctgtccaggctgcacaagcagctcaaactgcagctccatctggaccaaatgctaaccctctagacctctttccccaatctcttccgaatgcttccgccaatgctggcacaggaaaccttgatgttttgcgcaataacgtacaattccaaaacctgcttggtttggtgcaggctaatcctcagattttgcagccattgcttcaagaattgggtaaacaaaatccccaggttatgcagctaatccaggaaaaccaagcagagttcatgcggatgatcaatgaaccacttgagggagacgaagagaatgaaatgatgctggaccagatggcggatgcagctgagaccattgcagtgactccagaggagaacgaagctatacttcgtcttgaagggatgggctttgaccgggcactggtcctggaagtgttcttcgcgtgcaacaagaatgagcagctgaccgccaactacctcttggatcacatgcacgagttcgacaacgatgacgggctcggagggccaccgctatgagggcgctctcgatccctacatcatgcgaacgaaggctgtagggcagtagtaggaaaacgttttgggattcgtcccgtctgttcgctcactctacatattcgtttggctttgctgtttagtacagaatttctagatttacggacttactacttgatatcctgatatagaggtcacggccaagcttactttttttccccctggatcaacttgttagcttactactatgttttgtgctacttcttgccgcattgggccagcggttcaacctggcaagcgctggctgcagcagtagcaccgagatgcttgtgggtttcgcggtggttcgtttaggctttggcttctacg

SEQ ID NO: 21789 - DNA, 6925 bp, Zea Mays
gtcgtccttgccgcttgccgcttgccgccgcgtgctccgctgcgccgacggacgccgagggcggcctggttacaggcgggcactctctcttcctctgttctgtggaatcggcgggcggaaaccccggcgttcgtcaatgcgcagtcgcctgcactttttgccgcgacagtgacggttcttgaacaatagcagcagcaccagctgtcgcttgacccgctgcgctcttggtcttgtggagttcccgaccccgacgaaaattccacacccaccgcctcggcgcctccccctcccgccgctggagcctcaagcctgcctgcccgtccgccgagctaggcagctaccgcacgctggcacgcgcttccgtccccaaatcacactttccacccccacgtccggtcgccgcaagccccaagcggccgcctctgatcgatcgatataccctccccccgagtccccactcaccggccgccggcagcgaggcgctggccgacgaggccagcagcatgaagccgcgggcgctcctggagcgcctggcccgccacttcccgtcctcccgccggtcctcgtccgaccagtcccggcgcgacagggaggaggaggcggacctggaggcgatcgcggcgcgggagcagcgcgggttcaagtacgagaccctggcggcggcgacgcggggcttctcggagaagaaccggctcgggcagggcgggttcggccccgtgtaccggggccgcctcgaggacgggcgcgacgtggccgtcaagcgcctgggcgccgggtcgcggcagggcacgcgggagttccggaacgaggccacgctgctgtcccgggtgcagcaccgcaacgtggtcaacctcatcggctactgcgcgcgcggggcggaggacaagctgctggtgtacgagtacgtccccaacgagagcctcgacaagatcctcttccccccctcctccgcctcggcctcccactcccactccagcagcaacagcgaccgatcacgacgagcggagctgacctggccgcggcggcacgaggttgtggtcggcgtggcgcgtggcctgctctacctccacgaggacgcgcacacgcctatcatccaccgcgacatcaaggccagcaacatcctcctggacgaccggtgggtgcccaagatcgcggacttcggcatggcccgcctcttccccgaggccggcgatggtcactctcgcgtccatacccgtgtcgccggcactaacgggtacatggcgcccgagtacctcatgcacggcgacctctccaccaaggccgacgtcttcagcttcggcgtggttgttctcgagattgtctcgggccgcaagaactccgcctttgtcccgcccctcgacgccgaggccgacagcctcctggaatacgcctggagactgtacaagaaaggtcggagcctggagttgcttgaccccgcggtcaagtcgtcggcggtgccggagcaggtcgagctgtgcgtgcgcatcgggctgctgtgcgtgcaggccgacccgcggctgcggccggacatgaagcgcgtggtgatcatcctgtccaagaagcagagcacactcgaggagccgacgcgcccgggcgtgcccgggtcgcggtaccggcggaggccccacggcctgcggggctctcactactctgtcgggtcatcgtccggcaccagctcgccgtctacgtccgctacatcgcacgcgtcagcatcagcgtcagcgtcagcctcccacgccatgacgacgtcgagcacgcacaccatgaggagccggggcttgccctcgcaccgagaagaagagcaggagtagcaggaacagggcgagcccaactgtacatttgttaattctttcacttttttattcagtctggtgtttattccaggattgcagagttggtatagagggcatgattgttttgctaggtcataggatctgcttattggatttccttaggatgctgatcggtctatctgtgcctctgtggtagactgcaggcacgaactgctgtgaatatataaaaaaagcgaaagataaagagcgaattctctcaatgccgctacgacttccttgttggagccagcctaagtccataacagcttctgcattgccatcaaccatagaatgagaaagaccgtcttcctcatcaactacgcgccgacgcgcggacgctcccgtccccatcgcgacccgtgcgccgggtccacgctgaaccctttcaccggggcggcgaaagatatcagccgcgacgccgacgggctcgagcgccggtgagcgctcgcgcacccgggccaataaactggcaccggctcctcctctcgcgtcgcagagcctagcctcgggatgacgtggcgtaccacaacaccaccacacctcactcagccctgcgggtctccgaccaaccatttctagaagcctccaaaccctagcgcaggaggaagaggagttaggaggagctccagggatggcgaaggcgaggaagcagaagggtgacggtgccagtacgggaggaggcgccaccgtgctccaccagaagctctgcctctccatcgacatggagaaccagctgatctacgggtacactgagataaaagttctagctgaaaacaacagatttgctctacatgctgacaatatgacgattcagagcatttgatggatggtgcaactgttgagtttgactattcccctcattggaaaaatgaaagtgatcaaccgaattggtcttcagtatcatgtttgaagactgctgctgatgctgcatgttcaatgtatactttgtctctaaatcgagaagctacaccaaatcttattgtgtcatctgagagatcagtcaagtcaatgactgaacagcagttagatgaaaacagtgaaaagcatgaagaaaatagtggaaggcttgaagaacatggtggaaatcctgttcaaacttcctatgatcaaattgttaatggctgcagtggaagagggaatagaaaattctgcagtggaagaaggaaaggaaaaggaaaatgataaggaaaaagaagaggaaaatggaaatgagaagagcaaggaaactggaaatgagactgaatatgaaaaggtgaagaacataaaactggttcacatagattatattttggagaaggctgaaactggcgttcagttcgttggcaatgtcatgcgtagcagtagtcagacaaggcgggcacactgttggtttccttgtgttgatagtgccacagaacgctgtccatttgacctagaatttacagttagcatggatttcattgctgtcagcaatggtgacttgctttaccagctgttatgaagactatctttctgcaccatttcccttaggccccgtttgtttcctttcatttcgaggaattggaatcttactaacagaataggctaattttttagaatatgacattccaccactttccaaagttatcatataagcctatctcaaattcatgaggtgagagatggaaattgattctatagatttacatgctaattttccgatgtacaacttatagcacactcttctacctgcacctctataacataaatatactatataactaactctctcatatgatttaggataatatacaaatatattatatgtataaatatataaacttaattagttttgtctaaattataattattaaaatggaattcaattccaacgaaacaaacgggcccttaggtttatacaatcacatttttcttccatctgaaatgacaatattaccagcaagcttaggagcctccacatgcatcctcagttctgatatcttgcatgatgagaaagttatatagatcaggtgcgtttgtttctcttattttactaccctgtcccctctgatctagaccaatgatttgacaccatactttttaatgagatccgaatgcgtggctgctatagcatgtgcttatcaattgtgcttattctttattaaactatttttcatatcagctgttgttttgaagccctcctttcactgagagcatttagtgtcagtaagcaatccatgaatgcataatttctgctccagtatttgtgttttaactaagttagattctggtttagatgcctatatgacactacattcttgttaagttgatcatttaattagtttggtacctccagcaaatactgtaaatatgtttatggaatatgttaaatacttctgtatgtttgcttgccttatattttgtattttttctgtatagggctttgtaaacctgtcatcctttggataggagtgcatgaaaatctgcaatccatgtgtctgaatcatgacctgctattacttttactttatcttcctaagcattaaccttgcttctttgtatccccttaactggtggcttgataacactttgtattatgcattaaccttgcttctttgtatccccttaattagtggctcttggtaatgctttgtacacctgcattacattatagtcaagtattatgtttcataccttgcagtctgcactaacttgtaaaatagttcagataattggcacaagaacgaaactggcttatgcccttgcaaagcaatggtttggaatatacacaagtgcagaggagtccagtgacggctaactgctcagtatgtgaatctgatgttagtggtgcaactgctttgagctctactgctgcttcaagtgatttatatggaactcaagcaatcggttcatatgggaaagttcgttcattgaaagctgtagctgttttcaaatgttggagaagcagatgggaccagactcatttcggaagattttgcaggtgatagtggctccaagtcgtgcataaaatctaggcatgagcttcctagcctctcttctcaagcaaattgatcggttcttgcaatttgacaactttatgcctggttataatggggtcttgactgtcagctgcattcgtacccttgtacgaatagcaaagaaggtgccatcttttgtatgccttgatcacatttttgaattggttgcccctttccgcaacatggacaaaccatggaaagttcgaattgaagctagcaggattcttattgatcttgagttacaccataaaggactcgatgcagctcttttgttgttcttgaaatatgtggacgaagaaaagtctttgcgaggttggattgctagagtactttttgatggttttgtatgctttgctatcttttgacatggaagctgttgaaggagcgacaaagttggctgttcatgtcttgcgtatatgtcaaacaagtattgttcctcacgccaatgatcaaataaattttggcaactctagttaggggtggtaacgggccatttaatttagcctagcaaatttacggatcgaatcaagttagggccggatcataaaacaatacaattttgaactaacaaaattaagggctttgttggtttgtgaagcaagtattagggtcatgatccattaccacccctaactctagttggtcttcttcatctgcttgctggcacaaaggcatacaataacatatttcttcgtcatcaagtgttctgcatattgcaagttgctgctggaaggtccccaacgttatttggtgttccaaaggtcctcacaccccctctggtggtcaactacatcttcagtgatcaacacactaaagatgattcctcaattcctcaaccatcatagtctcaggaaccttccactagcactcctagtgtccgggaggtcttaccgacctctggacccactcaagatgctgataattatcttactgcagtgaaagaaggaatgtggtcaaaattagggtgaagcttactgcatcttccagtaaagcatctgatgctgaccatagaggccattctgatggcgcaagaaatgaaaatgaaccgggtcaatgcagctcaatgtcaatggatgcccccatggctggagcagcaaatgaaccattaaatgtaagcaatcataacattgaggaacaaaactcatgtcacgaccttggatcaaggatgtcggcaagtgttagcaatgctaaactaatggacagacatgatatttccaaggagctacagtgcactgctgattccaggctggatactgttcccaaggatcagttctctcctgccattaatccgccggaagttttagacaaacctggcagtcagcttgaaggtgtctccaactatgatgtaaaccaagctccagagactgaacggagtggaaacagaagagagagaaaaaaacaagaaagataaaaagctgaaacgtgacgaaaaactagataaaaaaatatgacccagagtatctagagaaaagctccttaataagaaggaaaagaaagagttggccagaaagcagctagaaggtgaagagctacccctgaacagcggagagcagtgaacccttcaggttcacaggaagttttgccttcaaggccaccagctccagttctaagtgttgaaacacctgttcgaatctctgaaccccaggtatcaagcaaggaaacagctgtagatactgcacgtgcagcagccaaaccaaggataaagatcagagtcaagcccttggtaagaaaatctgaagggaattaaaaaagattgtagaattgtggccagtctgccatcatttgtaaggattactgtacagcaggaaaaatgcgggtttagttattttgtgaatggctgatgtatcctgtaaaaaaacattgctctgctctagtaatttctggggtaatcgaaatctgagttctagggtagtccatattttctgctgcagttgctttagtatctcagcgcttattatctcacaggttttaagtgtttgttcgatttgctgggcctaaaactaaaactgaaggatcgctgtgctcaatttgtagctgttgatgcattcatttcagatttgaggaggcttgacggaattaactgctgagcttgctcaa

SEQ ID NO: 21790 - DNA, 6678 bp, Zea Mays
gtcgtccttgccgcttgccgcttgccgccgcgtgctccgctgcgccgacggacgccgagggcggcctggttacaggcgggcactctctcttcctctgttctgtggaatcggcgggcggaaaccccggcgttcgtcaatgcgcagtcgcctgcactttttgccgcgacagtgacggttcttgaacaatagcagcagcaccagctgtcgcttgacccgctgcgctcttggtcttgtggagttcccgaccccgacgaaaattccacacccaccgcctcggcgcctccccctcccgccgctggagcctcaagcctgcctgcccgtccgccgagctaggcagctaccgcacgctggcacgcgcttccgtccccaaatcacactttccacccccacgtccggtcgccgcaagccccaagcggccgcctctgatcgatcgatataccctccccccgagtccccactcaccggccgccggcagcgaggcgctggccgacgaggccagcagcatgaagccgcgggcgctcctggagcgcctggcccgccacttcccgtcctcccgccggtcctcgtccgaccagtcccggcgcgacagggaggaggaggcggacctggaggcgatcgcggcgcgggagcagcgcgggttcaagtacgagaccctggcggcggcgacgcggggcttctcggagaagaaccggctcgggcagggcgggttcggccccgtgtaccggggccgcctcgaggacgggcgcgacgtggccgtcaagcgcctgggcgccgggtcgcggcagggcacgcgggagttccggaacgaggccacgctgctgtcccgggtgcagcaccgcaacgtggtcaacctcatcggctactgcgcgcgcggggcggaggacaagctgctggtgtacgagtacgtccccaacgagagcctcgacaagatcctcttccccccctcctccgcctcggcctcccactcccactccagcagcaacagcgaccgatcacgacgagcggagctgacctggccgcggcggcacgaggttgtggtcggcgtggcgcgtggcctgctctacctccacgaggacgcgcacacgcctatcatccaccgcgacatcaaggccagcaacatcctcctggacgaccggtgggtgcccaagatcgcggacttcggcatggcccgcctcttccccgaggccggcgatggtcactctcgcgtccatacccgtgtcgccggcactaacgggtacatggcgcccgagtacctcatgcacggcgacctctccaccaaggccgacgtcttcagcttcggcgtggttgttctcgagattgtctcgggccgcaagaactccgcctttgtcccgcccctcgacgccgaggccgacagcctcctggaatacgcctggagactgtacaagaaaggtcggagcctggagttgcttgaccccgcggtcaagtcgtcggcggtgccggagcaggtcgagctgtgcgtgcgcatcgggctgctgtgcgtgcaggccgacccgcggctgcggccggacatgaagcgcgtggtgatcatcctgtccaagaagcagagcacactcgaggagccgacgcgcccgggcgtgcccgggtcgcggtaccggcggaggccccacggcctgcggggctctcactactctgtcgggtcatcgtccggcaccagctcgccgtctacgtccgctacatcgcacgcgtcagcatcagcgtcagcgtcagcctcccacgccatgacgacgtcgagcacgcacaccatgaggagccggggcttgccctcgcaccgagaagaagagcaggagtagcaggaacagggcgagcccaactgtacactgagataaaagttctagctgaaaacaacagatttgctctacatgctgacaatatgacgattcagagcatttgatggatggtgcaactgttgagtttgactattcccctcattggaaaaatgaaagtgatcaaccgaattggtcttcagtatcatgtttgaagactgctgctgatgctgcatgttcaatgtatactttgtctctaaatcgagaagctacaccaaatcttattgtgtcatctgagagatcagtcaagtcaatgactgaacagcagttagatgaaaacagtgaaaagcatgaagaaaatagtggaaggcttgaagaacatggtggaaatcctgttcaaacttcctatgatcaaattgttaatggctgcagtggaagagggaatagaaaattctgcagtggaagaaggaaaggaaaaggaaaatgataaggaaaaagaagaggaaaatggaaatgagaagagcaaggaaactggaaatgagactgaatatgaaaaggtgaagaacataaaactggttcacatagattatattttggagaaggctgaaactggcgttcagttcgttggcaatgtcatgcgtagcagtagtcagacaaggcgggcacactgttggtttccttgtgttgatagtgccacagaacgctgtccatttgacctagaatttacagttagcatggatttcattgctgtcagcaatggtgacttgctttaccaggtatgcgttcagtcttgatcaagagatctggaggaaaaatattaatttccttgtttttgaagaactaacttttgtgaagtaacaaggaagctcttttagctttaatacacttggtattacagttcatttcttttttgtgcatgttagttatgttctgtttcctgatcttagaaggtctctagtaaggaagatccttcaaaaaaacttatgtgtataaattgaacactccagttagtccacagtggatatccttggttgttggcccacttgaagttcttcctgacagaatcacagaaatgacataaatgtctcacacatatgtttattccctgctttggcaaagcttcagaacactattgcatttttccacaatgcatacaggtgctgatcaatcttttttttttctgtgaaaagtgcttagattggtgttgattttattagtatctcaataagcttattttttaattgatttctgaaatttgcatttcttttgcagctgttatgaagactatctttctgcaccatttcccttaggccccgtttgtttcctttcatttcgaggaattggaatcttactaacagaataggctaattttttagaatatgacattccaccactttccaaagttatcatataagcctatctcaaattcatgaggtgagagatggaaattgattctatagatttacatgctaattttccgatgtacaacttatagcacactcttctacctgcacctctataacataaatatactatataactaactctctcatatgatttaggataatatacaaatatattatatgtataaatatataaacttaattagttttgtctaaattataattattaaaatggaattcaattccaacgaaacaaacgggcccttaggtttatacaatcacatttttcttccatctgaaatgacaatattaccagcaagcttaggagcctccacatgcatcctcagttctgatatcttgcatgatgagaaagttatatagatcaggtgcgtttgtttctcttattttactaccctgtcccctctgatctagaccaatgatttgacaccatactttttaatgagatccgaatgcgtggctgctatagcatgtgcttatcaattgtgcttattctttattaaactatttttcatatcagctgttgttttgaagccctcctttcactgagagcatttagtgtcagtaagcaatccatgaatgcataatttctgctccagtatttgtgttttaactaagttagattctggtttagatgcctatatgacactacattcttgttaagttgatcatttaattagtttggtacctccagcaaatactgtaaatatgtttatggaatatgttaaatacttctgtatgtttgcttgccttatattttgtattttttctgtatagggctttgtaaacctgtcatcctttggataggagtgcatgaaaatctgcaatccatgtgtctgaatcatgacctgctattacttttactttatcttcctaagcattaaccttgcttctttgtatccccttaactggtggcttgataacactttgtattatgcattaaccttgcttctttgtatccccttaattagtggctcttggtaatgctttgtacacctgcattacattatagtcaagtattatgtttcataccttgcagtctgcactaacttgtaaaatagttcagataattggcacaagaacgaaactggcttatgcccttgcaaagcaatggtttggaatatacacaagtgcagaggagtccagtgacggctaactgctcagtatgtgaatctgatgttagtggtgcaactgctttgagctctactgctgcttcaagtgatttatatggaactcaagcaatcggttcatatgggaaagttcgttcattgaaagctgtagctgttttcaaatgttggagaagcagatgggaccagactcatttcggaagattttgcaggtgatagtggctccaagtcgtgcataaaatctaggcatgagcttcctagcctctcttctcaagcaaattgatcggttcttgcaatttgacaactttatgcctggttataatggggtcttgactgtcagctgcattcgtacccttgtacgaatagcaaagaaggtgccatcttttgtatgccttgatcacatttttgaattggttgcccctttccgcaacatggacaaaccatggaaagttcgaattgaagctagcaggattcttattgatcttgagttacaccataaaggactcgatgcagctcttttgttgttcttgaaatatgtggacgaagaaaagtctttgcgaggttggattgctagagtactttttgatggttttgtatgctttgctatcttttgacatggaagctgttgaaggagcgacaaagttggctgttcatgtcttgcgtatatgtcaaacaagtattgttcctcacgccaatgatcaaataaattttggcaactctagttaggggtggtaacgggccatttaatttagcctagcaaatttacggatcgaatcaagttagggccggatcataaaacaatacaattttgaactaacaaaattaagggctttgttggtttgtgaagcaagtattagggtcatgatccattaccacccctaactctagttggtcttcttcatctgcttgctggcacaaaggcatacaataacatatttcttcgtcatcaagtgttctgcatattgcaagttgctgctggaaggtccccaacgttatttggtgttccaaaggtcctcacaccccctctggtggtcaactacatcttcagtgatcaacacactaaagatgattcctcaattcctcaaccatcatagtctcaggaaccttccactagcactcctagtgtccgggaggtcttaccgacctctggacccactcaagatgctgataattatcttactgcagtgaaagaaggaatgtggtcaaaattagggtgaagcttactgcatcttccagtaaagcatctgatgctgaccatagaggccattctgatggcgcaagaaatgaaaatgaaccgggtcaatgcagctcaatgtcaatggatgcccccatggctggagcagcaaatgaaccattaaatgtaagcaatcataacattgaggaacaaaactcatgtcacgaccttggatcaaggatgtcggcaagtgttagcaatgctaaactaatggacagacatgatatttccaaggagctacagtgcactgctgattccaggctggatactgttcccaaggatcagttctctcctgccattaatccgccggaagttttagacaaacctggcagtcagcttgaaggtgtctccaactatgatgtaaaccaagctccagagactgaacggagtggaaacagaagagagagaaaaaaacaagaaagataaaaagctgaaacgtgacgaaaaactagataaaaaaatatgacccagagtatctagagaaaagctccttaataagaaggaaaagaaagagttggccagaaagcagctagaaggtgaagagctacccctgaacagcggagagcagtgaacccttcaggttcacaggaagttttgccttcaaggccaccagctccagttctaagtgttgaaacacctgttcgaatctctgaaccccaggtatcaagcaaggaaacagctgtagatactgcacgtgcagcagccaaaccaaggataaagatcagagtcaagcccttggtaagaaaatctgaagggaattaaaaaagattgtagaattgtggccagtctgccatcatttgtaaggattactgtacagcaggaaaaatgcgggtttagttattttgtgaatggctgatgtatcctgtaaaaaaacattgctctgctctagtaatttctggggtaatcgaaatctgagttctagggtagtccatattttctgctgcagttgctttagtatctcagcgcttattatctcacaggttttaagtgtttgttcgatttgctgggcctaaaactaaaactgaaggatcgctgtgctcaatttgtagctgttgatgcattcatttcagatttgaggaggcttgacggaattaactgctgagcttgctcaa

SEQ ID NO: 21791 - DNA, 7075 bp, Zea Mays
gtcgtccttgccgcttgccgcttgccgccgcgtgctccgctgcgccgacggacgccgagggcggcctggttacaggcgggcactctctcttcctctgttctgtggaatcggcgggcggaaaccccggcgttcgtcaatgcgcagtcgcctgcactttttgccgcgacagtgacggttcttgaacaatagcagcagcaccagctgtcgcttgacccgctgcgctcttggtcttgtggagttcccgaccccgacgaaaattccacacccaccgcctcggcgcctccccctcccgccgctggagcctcaagcctgcctgcccgtccgccgagctaggcagctaccgcacgctggcacgcgcttccgtccccaaatcacactttccacccccacgtccggtcgccgcaagccccaagcggccgcctctgatcgatcgatataccctccccccgagtccccactcaccggccgccggcagcgaggcgctggccgacgaggccagcagcatgaagccgcgggcgctcctggagcgcctggcccgccacttcccgtcctcccgccggtcctcgtccgaccagtcccggcgcgacagggaggaggaggcggacctggaggcgatcgcggcgcgggagcagcgcgggttcaagtacgagaccctggcggcggcgacgcggggcttctcggagaagaaccggctcgggcagggcgggttcggccccgtgtaccggggccgcctcgaggacgggcgcgacgtggccgtcaagcgcctgggcgccgggtcgcggcagggcacgcgggagttccggaacgaggccacgctgctgtcccgggtgcagcaccgcaacgtggtcaacctcatcggctactgcgcgcgcggggcggaggacaagctgctggtgtacgagtacgtccccaacgagagcctcgacaagatcctcttccccccctcctccgcctcggcctcccactcccactccagcagcaacagcgaccgatcacgacgagcggagctgacctggccgcggcggcacgaggttgtggtcggcgtggcgcgtggcctgctctacctccacgaggacgcgcacacgcctatcatccaccgcgacatcaaggccagcaacatcctcctggacgaccggtgggtgcccaagatcgcggacttcggcatggcccgcctcttccccgaggccggcgatggtcactctcgcgtccatacccgtgtcgccggcactaacgggtacatggcgcccgagtacctcatgcacggcgacctctccaccaaggccgacgtcttcagcttcggcgtggttgttctcgagattgtctcgggccgcaagaactccgcctttgtcccgcccctcgacgccgaggccgacagcctcctggaatacgcctggagactgtacaagaaaggtcggagcctggagttgcttgaccccgcggtcaagtcgtcggcggtgccggagcaggtcgagctgtgcgtgcgcatcgggctgctgtgcgtgcaggccgacccgcggctgcggccggacatgaagcgcgtggtgatcatcctgtccaagaagcagagcacactcgaggagccgacgcgcccgggcgtgcccgggtcgcggtaccggcggaggccccacggcctgcggggctctcactactctgtcgggtcatcgtccggcaccagctcgccgtctacgtccgctacatcgcacgcgtcagcatcagcgtcagcgtcagcctcccacgccatgacgacgtcgagcacgcacaccatgaggagccggggcttgccctcgcaccgagaagaagagcaggagtagcaggaacagggcgagcccaactgtacatttgttaattctttcacttttttattcagtctggtgtttattccaggattgcagagttggtatagagggcatgattgttttgctaggtcataggatctgcttattggatttccttaggatgctgatcggtctatctgtgcctctgtggtagactgcaggcacgaactgctgtgaatatataaaaaaagcgaaagataaagagcgaattctctcaatgccgctacgacttccttgttggagccagcctaagtccataacagcttctgcattgccatcaaccatagaatgagaaagaccgtcttcctcatcaactacgcgccgacgcgcggacgctcccgtccccatcgcgacccgtgcgccgggtccacgctgaaccctttcaccggggcggcgaaagatatcagccgcgacgccgacgggctcgagcgccggtgagcgctcgcgcacccgggccaataaactggcaccggctcctcctctcgcgtcgcagagcctagcctcgggatgacgtggcgtaccacaacaccaccacacctcactcagccctgcgggtctccgaccaaccatttctagaagcctccaaaccctagcgcaggaggaagaggagttaggaggagctccagggatggcgaaggcgaggaagcagaagggtgacggtgccagtacgggaggaggcgccaccgtgctccaccagaagctctgcctctccatcgacatggagaaccagctgatctacgggtacactgagataaaagttctagctgaaaacaacagatttgctctacatgctgacaatatgacgattcagagcatttgatggatggtgcaactgttgagtttgactattcccctcattggaaaaatgaaagtgatcaaccgaattggtcttcagtatcatgtttgaagactgctgctgatgctgcatgttcaatgtatactttgtctctaaatcgagaagctacaccaaatcttattgtgtcatctgagagatcagtcaagtcaatgactgaacagcagttagatgaaaacagtgaaaagcatgaagaaaatagtggaaggcttgaagaacatggtggaaatcctgttcaaacttcctatgatcaaattgttaatggctgcagtggaagagggaatagaaaattctgcagtggaagaaggaaaggaaaaggaaaatgataaggaaaaagaagaggaaaatggaaatgagaagagcaaggaaactggaaatgagactgaatatgaaaaggtgaagaacataaaactggttcacatagattatattttggagaaggctgaaactggcgttcagttcgttggcaatgtcatgcgtagcagtagtcagacaaggcgggcacactgttggtttccttgtgttgatagtgccacagaacgctgtccatttgacctagaatttacagttagcatggatttcattgctgtcagcaatggtgacttgctttaccagttagtccacagtggatatccttggttgttggcccacttgaagttcttcctgacagaatcacagaaatgacataaatgtctcacacatatgtttattccctgctttggcaaagcttcagaacactattgcatttttccacaatgcatacagctgttatgaagactatctttctgcaccatttcccttaggccccgtttgtttcctttcatttcgaggaattggaatcttactaacagaataggctaattttttagaatatgacattccaccactttccaaagttatcatataagcctatctcaaattcatgaggtgagagatggaaattgattctatagatttacatgctaattttccgatgtacaacttatagcacactcttctacctgcacctctataacataaatatactatataactaactctctcatatgatttaggataatatacaaatatattatatgtataaatatataaacttaattagttttgtctaaattataattattaaaatggaattcaattccaacgaaacaaacgggcccttaggtttatacaatcacatttttcttccatctgaaatgacaatattaccagcaagcttaggagcctccacatgcatcctcagttctgatatcttgcatgatgagaaagttatatagatcaggtgcgtttgtttctcttattttactaccctgtcccctctgatctagaccaatgatttgacaccatactttttaatgagatccgaatgcgtggctgctatagcatgtgcttatcaattgtgcttattctttattaaactatttttcatatcagctgttgttttgaagccctcctttcactgagagcatttagtgtcagtaagcaatccatgaatgcataatttctgctccagtatttgtgttttaactaagttagattctggtttagatgcctatatgacactacattcttgttaagttgatcatttaattagtttggtacctccagcaaatactgtaaatatgtttatggaatatgttaaatacttctgtatgtttgcttgccttatattttgtattttttctgtatagggctttgtaaacctgtcatcctttggataggagtgcatgaaaatctgcaatccatgtgtctgaatcatgacctgctattacttttactttatcttcctaagcattaaccttgcttctttgtatccccttaactggtggcttgataacactttgtattatgcattaaccttgcttctttgtatccccttaattagtggctcttggtaatgctttgtacacctgcattacattatagtcaagtattatgtttcataccttgcagtctgcactaacttgtaaaatagttcagataattggcacaagaacgaaactggcttatgcccttgcaaagcaatggtttggaatatacacaagtgcagaggagtccagtgacggctaactgctcagtatgtgaatctgatgttagtggtgcaactgctttgagctctactgctgcttcaagtgatttatatggaactcaagcaatcggttcatatgggaaagttcgttcattgaaagctgtagctgttttcaaatgttggagaagcagatgggaccagactcatttcggaagattttgcaggtgatagtggctccaagtcgtgcataaaatctaggcatgagcttcctagcctctcttctcaagcaaattgatcggttcttgcaatttgacaactttatgcctggttataatggggtcttgactgtcagctgcattcgtacccttgtacgaatagcaaagaaggtgccatcttttgtatgccttgatcacatttttgaattggttgcccctttccgcaacatggacaaaccatggaaagttcgaattgaagctagcaggattcttattgatcttgagttacaccataaaggactcgatgcagctcttttgttgttcttgaaatatgtggacgaagaaaagtctttgcgaggttggattgctagagtactttttgatggttttgtatgctttgctatcttttgacatggaagctgttgaaggagcgacaaagttggctgttcatgtcttgcgtatatgtcaaacaagtattgttcctcacgccaatgatcaaataaattttggcaactctagttaggggtggtaacgggccatttaatttagcctagcaaatttacggatcgaatcaagttagggccggatcataaaacaatacaattttgaactaacaaaattaagggctttgttggtttgtgaagcaagtattagggtcatgatccattaccacccctaactctagttggtcttcttcatctgcttgctggcacaaaggcatacaataacatatttcttcgtcatcaagtgttctgcatattgcaagttgctgctggaaggtccccaacgttatttggtgttccaaaggtcctcacaccccctctggtggtcaactacatcttcagtgatcaacacactaaagatgattcctcaattcctcaaccatcatagtctcaggaaccttccactagcactcctagtgtccgggaggtcttaccgacctctggacccactcaagatgctgataattatcttactgcagtgaaagaaggaatgtggtcaaaattagggtgaagcttactgcatcttccagtaaagcatctgatgctgaccatagaggccattctgatggcgcaagaaatgaaaatgaaccgggtcaatgcagctcaatgtcaatggatgcccccatggctggagcagcaaatgaaccattaaatgtaagcaatcataacattgaggaacaaaactcatgtcacgaccttggatcaaggatgtcggcaagtgttagcaatgctaaactaatggacagacatgatatttccaaggagctacagtgcactgctgattccaggctggatactgttcccaaggatcagttctctcctgccattaatccgccggaagttttagacaaacctggcagtcagcttgaaggtgtctccaactatgatgtaaaccaagctccagagactgaacggagtggaaacagaagagagagaaaaaaacaagaaagataaaaagctgaaacgtgacgaaaaactagataaaaaaatatgacccagagtatctagagaaaagctccttaataagaaggaaaagaaagagttggccagaaagcagctagaaggtgaagagctacccctgaacagcggagagcagtgaacccttcaggttcacaggaagttttgccttcaaggccaccagctccagttctaagtgttgaaacacctgttcgaatctctgaaccccaggtatcaagcaaggaaacagctgtagatactgcacgtgcagcagccaaaccaaggataaagatcagagtcaagcccttggtaagaaaatctgaagggaattaaaaaagattgtagaattgtggccagtctgccatcatttgtaaggattactgtacagcaggaaaaatgcgggtttagttattttgtgaatggctgatgtatcctgtaaaaaaacattgctctgctctagtaatttctggggtaatcgaaatctgagttctagggtagtccatattttctgctgcagttgctttagtatctcagcgcttattatctcacaggttttaagtgtttgttcgatttgctgggcctaaaactaaaactgaaggatcgctgtgctcaatttgtagctgttgatgcattcatttcagatttgaggaggcttgacggaattaactgctgagcttgctcaa

SEQ ID NO: 21792 - DNA, 6564 bp, Zea Mays
gtcgtccttgccgcttgccgcttgccgccgcgtgctccgctgcgccgacggacgccgagggcggcctggttacaggcgggcactctctcttcctctgttctgtggaatcggcgggcggaaaccccggcgttcgtcaatgcgcagtcgcctgcactttttgccgcgacagtgacggttcttgaacaatagcagcagcaccagctgtcgcttgacccgctgcgctcttggtcttgtggagttcccgaccccgacgaaaattccacacccaccgcctcggcgcctccccctcccgccgctggagcctcaagcctgcctgcccgtccgccgagctaggcagctaccgcacgctggcacgcgcttccgtccccaaatcacactttccacccccacgtccggtcgccgcaagccccaagcggccgcctctgatcgatcgatataccctccccccgagtccccactcaccggccgccggcagcgaggcgctggccgacgaggccagcagcatgaagccgcgggcgctcctggagcgcctggcccgccacttcccgtcctcccgccggtcctcgtccgaccagtcccggcgcgacagggaggaggaggcggacctggaggcgatcgcggcgcgggagcagcgcgggttcaagtacgagaccctggcggcggcgacgcggggcttctcggagaagaaccggctcgggcagggcgggttcggccccgtgtaccggggccgcctcgaggacgggcgcgacgtggccgtcaagcgcctgggcgccgggtcgcggcagggcacgcgggagttccggaacgaggccacgctgctgtcccgggtgcagcaccgcaacgtggtcaacctcatcggctactgcgcgcgcggggcggaggacaagctgctggtgtacgagtacgtccccaacgagagcctcgacaagatcctcttccccccctcctccgcctcggcctcccactcccactccagcagcaacagcgaccgatcacgacgagcggagctgacctggccgcggcggcacgaggttgtggtcggcgtggcgcgtggcctgctctacctccacgaggacgcgcacacgcctatcatccaccgcgacatcaaggccagcaacatcctcctggacgaccggtgggtgcccaagatcgcggacttcggcatggcccgcctcttccccgaggccggcgatggtcactctcgcgtccatacccgtgtcgccggcactaacgggtacatggcgcccgagtacctcatgcacggcgacctctccaccaaggccgacgtcttcagcttcggcgtggttgttctcgagattgtctcgggccgcaagaactccgcctttgtcccgcccctcgacgccgaggccgacagcctcctggaatacgcctggagactgtacaagaaaggtcggagcctggagttgcttgaccccgcggtcaagtcgtcggcggtgccggagcaggtcgagctgtgcgtgcgcatcgggctgctgtgcgtgcaggccgacccgcggctgcggccggacatgaagcgcgtggtgatcatcctgtccaagaagcagagcacactcgaggagccgacgcgcccgggcgtgcccgggtcgcggtaccggcggaggccccacggcctgcggggctctcactactctgtcgggtcatcgtccggcaccagctcgccgtctacgtccgctacatcgcacgcgtcagcatcagcgtcagcgtcagcctcccacgccatgacgacgtcgagcacgcacaccatgaggagccggggcttgccctcgcaccgagaagaagagcaggagtagcaggaacagggcgagcccaactgtacatttgttaattctttcacttttttattcagtctggtgtttattccaggattgcagagttggtatagagggcatgattgttttgctaggtcataggatctgcttattggatttccttaggatgctgatcggtctatctgtgcctctgtggtagactgcaggcacgaactgctgtgaatatataaaaaaagcgaaagataaagagcgaattctctcaatgccgctacgacttccttgttggagccagcctaagtccataacagcttctgcattgccatcaaccatagaatgagaaagaccgtcttcctcatcaactacgcgccgacgcgcggacgctcccgtccccatcgcgacccgtgcgccgggtccacgctgaaccctttcaccggggcggcgaaagatatcagccgcgacgccgacgggctcgagcgccggtgagcgctcgcgcacccgggccaataaactggcaccggctcctcctctcgcgtcgcagagcctagcctcgggatgacgtggcgtaccacaacaccaccacacctcactcagccctgcgggtctccgaccaaccatttctagaagcctccaaaccctagcgcaggaggaagaggagttaggaggagctccagggatggcgaaggcgaggaagcagaagggtgacggtgccagtacgggaggaggcgccaccgtgctccaccagaagctctgcctctccatcgacatggagaaccagctgatctacgggtacactgagataaaagttctagctgaaaacaacagatttgctctacatgctgacaatatgacgattcagagcatttgatggatggtgcaactgttgagtttgactattcccctcattggaaaaatgaaagtgatcaaccgaattggtcttcagtatcatgtttgaagactgctgctgatgctgcatgttcaatgtatactttgtctctaaatcgagaagctacaccaaatcttattgtgtcatctgagagatcagtcaagtcaatgactgaacagcagttagatgaaaacagtgaaaagcatgaagaaaatagtggaaggcttgaagaacatggtggaaatcctgttcaaacttcctatgatcaaattgttaatggctgcagtggaagagggaatagaaaattctgcagtggaagaaggaaaggaaaaggaaaatgataaggaaaaagaagaggaaaatggaaatgagaagagcaaggaaactggaaatgagactgaatatgaaaaggtgaagaacataaaactggttcacatagattatattttggagaaggctgaaactggcgttcagttcgttggcaatgtcatgcgtagcagtagtcagacaaggcgggcacactgttggtttccttgtgttgatagtgccacagaacgctgtccatttgacctagaatttacagttagcatggatttcattgctgtcagcaatggtgacttgctttaccagctgttatgaagactatctttctgcaccatttcccttaggtttatacaatcacatttttcttccatctgaaatgacaatattaccagcaagcttaggagcctccacatgcatcctcagttctgatatcttgcatgatgagaaagttatatagatcaggtgcgtttgtttctcttattttactaccctgtcccctctgatctagaccaatgatttgacaccatactttttaatgagatccgaatgcgtggctgctatagcatgtgcttatcaattgtgcttattctttattaaactatttttcatatcagctgttgttttgaagccctcctttcactgagagcatttagtgtcagtaagcaatccatgaatgcataatttctgctccagtatttgtgttttaactaagttagattctggtttagatgcctatatgacactacattcttgttaagttgatcatttaattagtttggtacctccagcaaatactgtaaatatgtttatggaatatgttaaatacttctgtatgtttgcttgccttatattttgtattttttctgtatagggctttgtaaacctgtcatcctttggataggagtgcatgaaaatctgcaatccatgtgtctgaatcatgacctgctattacttttactttatcttcctaagcattaaccttgcttctttgtatccccttaactggtggcttgataacactttgtattatgcattaaccttgcttctttgtatccccttaattagtggctcttggtaatgctttgtacacctgcattacattatagtcaagtattatgtttcataccttgcagtctgcactaacttgtaaaatagttcagataattggcacaagaacgaaactggcttatgcccttgcaaagcaatggtttggaatatacacaagtgcagaggagtccagtgacggctaactgctcagtatgtgaatctgatgttagtggtgcaactgctttgagctctactgctgcttcaagtgatttatatggaactcaagcaatcggttcatatgggaaagttcgttcattgaaagctgtagctgttttcaaatgttggagaagcagatgggaccagactcatttcggaagattttgcaggtgatagtggctccaagtcgtgcataaaatctaggcatgagcttcctagcctctcttctcaagcaaattgatcggttcttgcaatttgacaactttatgcctggttataatggggtcttgactgtcagctgcattcgtacccttgtacgaatagcaaagaaggtgccatcttttgtatgccttgatcacatttttgaattggttgcccctttccgcaacatggacaaaccatggaaagttcgaattgaagctagcaggattcttattgatcttgagttacaccataaaggactcgatgcagctcttttgttgttcttgaaatatgtggacgaagaaaagtctttgcgaggttggattgctagagtactttttgatggttttgtatgctttgctatcttttgacatggaagctgttgaaggagcgacaaagttggctgttcatgtcttgcgtatatgtcaaacaagtattgttcctcacgccaatgatcaaataaattttggcaactctagttaggggtggtaacgggccatttaatttagcctagcaaatttacggatcgaatcaagttagggccggatcataaaacaatacaattttgaactaacaaaattaagggctttgttggtttgtgaagcaagtattagggtcatgatccattaccacccctaactctagttggtcttcttcatctgcttgctggcacaaaggcatacaataacatatttcttcgtcatcaagtgttctgcatattgcaagttgctgctggaaggtccccaacgttatttggtgttccaaaggtcctcacaccccctctggtggtcaactacatcttcagtgatcaacacactaaagatgattcctcaattcctcaaccatcatagtctcaggaaccttccactagcactcctagtgtccgggaggtcttaccgacctctggacccactcaagatgctgataattatcttactgcagtgaaagaaggaatgtggtcaaaattagggtgaagcttactgcatcttccagtaaagcatctgatgctgaccatagaggccattctgatggcgcaagaaatgaaaatgaaccgggtcaatgcagctcaatgtcaatggatgcccccatggctggagcagcaaatgaaccattaaatgtaagcaatcataacattgaggaacaaaactcatgtcacgaccttggatcaaggatgtcggcaagtgttagcaatgctaaactaatggacagacatgatatttccaaggagctacagtgcactgctgattccaggctggatactgttcccaaggatcagttctctcctgccattaatccgccggaagttttagacaaacctggcagtcagcttgaaggtgtctccaactatgatgtaaaccaagctccagagactgaacggagtggaaacagaagagagagaaaaaaacaagaaagataaaaagctgaaacgtgacgaaaaactagataaaaaaatatgacccagagtatctagagaaaagctccttaataagaaggaaaagaaagagttggccagaaagcagctagaaggtgaagagctacccctgaacagcggagagcagtgaacccttcaggttcacaggaagttttgccttcaaggccaccagctccagttctaagtgttgaaacacctgttcgaatctctgaaccccaggtatcaagcaaggaaacagctgtagatactgcacgtgcagcagccaaaccaaggataaagatcagagtcaagcccttggtaagaaaatctgaagggaattaaaaaagattgtagaattgtggccagtctgccatcatttgtaaggattactgtacagcaggaaaaatgcgggtttagttattttgtgaatggctgatgtatcctgtaaaaaaacattgctctgctctagtaatttctggggtaatcgaaatctgagttctagggtagtccatattttctgctgcagttgctttagtatctcagcgcttattatctcacaggttttaagtgtttgttcgatttgctgggcctaaaactaaaactgaaggatcgctgtgctcaatttgtagctgttgatgcattcatttcagatttgaggaggcttgacggaattaactgctgagcttgctcaa

SEQ ID NO: 21793 - DNA, 7132 bp, Zea Mays
gtcgtccttgccgcttgccgcttgccgccgcgtgctccgctgcgccgacggacgccgagggcggcctggttacaggcgggcactctctcttcctctgttctgtggaatcggcgggcggaaaccccggcgttcgtcaatgcgcagtcgcctgcactttttgccgcgacagtgacggttcttgaacaatagcagcagcaccagctgtcgcttgacccgctgcgctcttggtcttgtggagttcccgaccccgacgaaaattccacacccaccgcctcggcgcctccccctcccgccgctggagcctcaagcctgcctgcccgtccgccgagctaggcagctaccgcacgctggcacgcgcttccgtccccaaatcacactttccacccccacgtccggtcgccgcaagccccaagcggccgcctctgatcgatcgatataccctccccccgagtccccactcaccggccgccggcagcgaggcgctggccgacgaggccagcagcatgaagccgcgggcgctcctggagcgcctggcccgccacttcccgtcctcccgccggtcctcgtccgaccagtcccggcgcgacagggaggaggaggcggacctggaggcgatcgcggcgcgggagcagcgcgggttcaagtacgagaccctggcggcggcgacgcggggcttctcggagaagaaccggctcgggcagggcgggttcggccccgtgtaccggggccgcctcgaggacgggcgcgacgtggccgtcaagcgcctgggcgccgggtcgcggcagggcacgcgggagttccggaacgaggccacgctgctgtcccgggtgcagcaccgcaacgtggtcaacctcatcggctactgcgcgcgcggggcggaggacaagctgctggtgtacgagtacgtccccaacgagagcctcgacaagatcctcttccccccctcctccgcctcggcctcccactcccactccagcagcaacagcgaccgatcacgacgagcggagctgacctggccgcggcggcacgaggttgtggtcggcgtggcgcgtggcctgctctacctccacgaggacgcgcacacgcctatcatccaccgcgacatcaaggccagcaacatcctcctggacgaccggtgggtgcccaagatcgcggacttcggcatggcccgcctcttccccgaggccggcgatggtcactctcgcgtccatacccgtgtcgccggcactaacgggtacatggcgcccgagtacctcatgcacggcgacctctccaccaaggccgacgtcttcagcttcggcgtggttgttctcgagattgtctcgggccgcaagaactccgcctttgtcccgcccctcgacgccgaggccgacagcctcctggaatacgcctggagactgtacaagaaaggtcggagcctggagttgcttgaccccgcggtcaagtcgtcggcggtgccggagcaggtcgagctgtgcgtgcgcatcgggctgctgtgcgtgcaggccgacccgcggctgcggccggacatgaagcgcgtggtgatcatcctgtccaagaagcagagcacactcgaggagccgacgcgcccgggcgtgcccgggtcgcggtaccggcggaggccccacggcctgcggggctctcactactctgtcgggtcatcgtccggcaccagctcgccgtctacgtccgctacatcgcacgcgtcagcatcagcgtcagcgtcagcctcccacgccatgacgacgtcgagcacgcacaccatgaggagccggggcttgccctcgcaccgagaagaagagcaggagtagcaggaacagggcgagcccaactgtacatttgttaattctttcacttttttattcagtctggtgtttattccaggattgcagagttggtatagagggcatgattgttttgctaggtcataggatctgcttattggatttccttaggatgctgatcggtctatctgtgcctctgtggtagactgcaggcacgaactgctgtgaatatataaaaaaagcgaaagataaagagcgaattctctcaatgccgctacgacttccttgttggagccagcctaagtccataacagcttctgcattgccatcaaccatagaatgagaaagaccgtcttcctcatcaactacgcgccgacgcgcggacgctcccgtccccatcgcgacccgtgcgccgggtccacgctgaaccctttcaccggggcggcgaaagatatcagccgcgacgccgacgggctcgagcgccggtgagcgctcgcgcacccgggccaataaactggcaccggctcctcctctcgcgtcgcagagcctagcctcgggatgacgtggcgtaccacaacaccaccacacctcactcagccctgcgggtctccgaccaaccatttctagaagcctccaaaccctagcgcaggaggaagaggagttaggaggagctccagggatggcgaaggcgaggaagcagaagggtgacggtgccagtacgggaggaggcgccaccgtgctccaccagaagctctgcctctccatcgacatggagaaccagctgatctacgggtacactgagataaaagttctagctgaaaacaacagatttgctctacatgctgacaatatgacgattcagagcatttgatggatggtgcaactgttgagtttgactattcccctcattggaaaaatgaaagtgatcaaccgaattggtcttcagtatcatgtttgaagactgctgctgatgctgcatgttcaatgtatactttgtctctaaatcgagaagctacaccaaatcttattgtgtcatctgagagatcagtcaagtcaatgactgaacagcagttagatgaaaacagtgaaaagcatgaagaaaatagtggaaggcttgaagaacatggtggaaatcctgttcaaacttcctatgatcaaattgttaatggctgcagtggaagagggaatagaaaattctgcagtggaagaaggaaaggaaaaggaaaatgataaggaaaaagaagaggaaaatggaaatgagaagagcaaggaaactggaaatgagactgaatatgaaaaggtgaagaacataaaactggttcacatagattatattttggagaaggctgaaactggcgttcagttcgttggcaatgtcatgcgtagcagtagtcagacaaggcgggcacactgttggtttccttgtgttgatagtgccacagaacgctgtccatttgacctagaatttacagttagcatggatttcattgctgtcagcaatggtgacttgctttaccaggtctctagtaaggaagatccttcaaaaaaacttatgtgtataaattgaacactccagttagtccacagtggatatccttggttgttggcccacttgaagttcttcctgacagaatcacagaaatgacataaatgtctcacacatatgtttattccctgctttggcaaagcttcagaacactattgcatttttccacaatgcatacagctgttatgaagactatctttctgcaccatttcccttaggccccgtttgtttcctttcatttcgaggaattggaatcttactaacagaataggctaattttttagaatatgacattccaccactttccaaagttatcatataagcctatctcaaattcatgaggtgagagatggaaattgattctatagatttacatgctaattttccgatgtacaacttatagcacactcttctacctgcacctctataacataaatatactatataactaactctctcatatgatttaggataatatacaaatatattatatgtataaatatataaacttaattagttttgtctaaattataattattaaaatggaattcaattccaacgaaacaaacgggcccttaggtttatacaatcacatttttcttccatctgaaatgacaatattaccagcaagcttaggagcctccacatgcatcctcagttctgatatcttgcatgatgagaaagttatatagatcaggtgcgtttgtttctcttattttactaccctgtcccctctgatctagaccaatgatttgacaccatactttttaatgagatccgaatgcgtggctgctatagcatgtgcttatcaattgtgcttattctttattaaactatttttcatatcagctgttgttttgaagccctcctttcactgagagcatttagtgtcagtaagcaatccatgaatgcataatttctgctccagtatttgtgttttaactaagttagattctggtttagatgcctatatgacactacattcttgttaagttgatcatttaattagtttggtacctccagcaaatactgtaaatatgtttatggaatatgttaaatacttctgtatgtttgcttgccttatattttgtattttttctgtatagggctttgtaaacctgtcatcctttggataggagtgcatgaaaatctgcaatccatgtgtctgaatcatgacctgctattacttttactttatcttcctaagcattaaccttgcttctttgtatccccttaactggtggcttgataacactttgtattatgcattaaccttgcttctttgtatccccttaattagtggctcttggtaatgctttgtacacctgcattacattatagtcaagtattatgtttcataccttgcagtctgcactaacttgtaaaatagttcagataattggcacaagaacgaaactggcttatgcccttgcaaagcaatggtttggaatatacacaagtgcagaggagtccagtgacggctaactgctcagtatgtgaatctgatgttagtggtgcaactgctttgagctctactgctgcttcaagtgatttatatggaactcaagcaatcggttcatatgggaaagttcgttcattgaaagctgtagctgttttcaaatgttggagaagcagatgggaccagactcatttcggaagattttgcaggtgatagtggctccaagtcgtgcataaaatctaggcatgagcttcctagcctctcttctcaagcaaattgatcggttcttgcaatttgacaactttatgcctggttataatggggtcttgactgtcagctgcattcgtacccttgtacgaatagcaaagaaggtgccatcttttgtatgccttgatcacatttttgaattggttgcccctttccgcaacatggacaaaccatggaaagttcgaattgaagctagcaggattcttattgatcttgagttacaccataaaggactcgatgcagctcttttgttgttcttgaaatatgtggacgaagaaaagtctttgcgaggttggattgctagagtactttttgatggttttgtatgctttgctatcttttgacatggaagctgttgaaggagcgacaaagttggctgttcatgtcttgcgtatatgtcaaacaagtattgttcctcacgccaatgatcaaataaattttggcaactctagttaggggtggtaacgggccatttaatttagcctagcaaatttacggatcgaatcaagttagggccggatcataaaacaatacaattttgaactaacaaaattaagggctttgttggtttgtgaagcaagtattagggtcatgatccattaccacccctaactctagttggtcttcttcatctgcttgctggcacaaaggcatacaataacatatttcttcgtcatcaagtgttctgcatattgcaagttgctgctggaaggtccccaacgttatttggtgttccaaaggtcctcacaccccctctggtggtcaactacatcttcagtgatcaacacactaaagatgattcctcaattcctcaaccatcatagtctcaggaaccttccactagcactcctagtgtccgggaggtcttaccgacctctggacccactcaagatgctgataattatcttactgcagtgaaagaaggaatgtggtcaaaattagggtgaagcttactgcatcttccagtaaagcatctgatgctgaccatagaggccattctgatggcgcaagaaatgaaaatgaaccgggtcaatgcagctcaatgtcaatggatgcccccatggctggagcagcaaatgaaccattaaatgtaagcaatcataacattgaggaacaaaactcatgtcacgaccttggatcaaggatgtcggcaagtgttagcaatgctaaactaatggacagacatgatatttccaaggagctacagtgcactgctgattccaggctggatactgttcccaaggatcagttctctcctgccattaatccgccggaagttttagacaaacctggcagtcagcttgaaggtgtctccaactatgatgtaaaccaagctccagagactgaacggagtggaaacagaagagagagaaaaaaacaagaaagataaaaagctgaaacgtgacgaaaaactagataaaaaaatatgacccagagtatctagagaaaagctccttaataagaaggaaaagaaagagttggccagaaagcagctagaaggtgaagagctacccctgaacagcggagagcagtgaacccttcaggttcacaggaagttttgccttcaaggccaccagctccagttctaagtgttgaaacacctgttcgaatctctgaaccccaggtatcaagcaaggaaacagctgtagatactgcacgtgcagcagccaaaccaaggataaagatcagagtcaagcccttggtaagaaaatctgaagggaattaaaaaagattgtagaattgtggccagtctgccatcatttgtaaggattactgtacagcaggaaaaatgcgggtttagttattttgtgaatggctgatgtatcctgtaaaaaaacattgctctgctctagtaatttctggggtaatcgaaatctgagttctagggtagtccatattttctgctgcagttgctttagtatctcagcgcttattatctcacaggttttaagtgtttgttcgatttgctgggcctaaaactaaaactgaaggatcgctgtgctcaatttgtagctgttgatgcattcatttcagatttgaggaggcttgacggaattaactgctgagcttgctcaa

SEQ ID NO: 21794 - DNA, 6768 bp, Zea Mays
gtcgtccttgccgcttgccgcttgccgccgcgtgctccgctgcgccgacggacgccgagggcggcctggttacaggcgggcactctctcttcctctgttctgtggaatcggcgggcggaaaccccggcgttcgtcaatgcgcagtcgcctgcactttttgccgcgacagtgacggttcttgaacaatagcagcagcaccagctgtcgcttgacccgctgcgctcttggtcttgtggagttcccgaccccgacgaaaattccacacccaccgcctcggcgcctccccctcccgccgctggagcctcaagcctgcctgcccgtccgccgagctaggcagctaccgcacgctggcacgcgcttccgtccccaaatcacactttccacccccacgtccggtcgccgcaagccccaagcggccgcctctgatcgatcgatataccctccccccgagtccccactcaccggccgccggcagcgaggcgctggccgacgaggccagcagcatgaagccgcgggcgctcctggagcgcctggcccgccacttcccgtcctcccgccggtcctcgtccgaccagtcccggcgcgacagggaggaggaggcggacctggaggcgatcgcggcgcgggagcagcgcgggttcaagtacgagaccctggcggcggcgacgcggggcttctcggagaagaaccggctcgggcagggcgggttcggccccgtgtaccggggccgcctcgaggacgggcgcgacgtggccgtcaagcgcctgggcgccgggtcgcggcagggcacgcgggagttccggaacgaggccacgctgctgtcccgggtgcagcaccgcaacgtggtcaacctcatcggctactgcgcgcgcggggcggaggacaagctgctggtgtacgagtacgtccccaacgagagcctcgacaagatcctcttccccccctcctccgcctcggcctcccactcccactccagcagcaacagcgaccgatcacgacgagcggagctgacctggccgcggcggcacgaggttgtggtcggcgtggcgcgtggcctgctctacctccacgaggacgcgcacacgcctatcatccaccgcgacatcaaggccagcaacatcctcctggacgaccggtgggtgcccaagatcgcggacttcggcatggcccgcctcttccccgaggccggcgatggtcactctcgcgtccatacccgtgtcgccggcactaacgggtacatggcgcccgagtacctcatgcacggcgacctctccaccaaggccgacgtcttcagcttcggcgtggttgttctcgagattgtctcgggccgcaagaactccgcctttgtcccgcccctcgacgccgaggccgacagcctcctggaatacgcctggagactgtacaagaaaggtcggagcctggagttgcttgaccccgcggtcaagtcgtcggcggtgccggagcaggtcgagctgtgcgtgcgcatcgggctgctgtgcgtgcaggccgacccgcggctgcggccggacatgaagcgcgtggtgatcatcctgtccaagaagcagagcacactcgaggagccgacgcgcccgggcgtgcccgggtcgcggtaccggcggaggccccacggcctgcggggctctcactactctgtcgggtcatcgtccggcaccagctcgccgtctacgtccgctacatcgcacgcgtcagcatcagcgtcagcgtcagcctcccacgccatgacgacgtcgagcacgcacaccatgaggagccggggcttgccctcgcaccgagaagaagagcaggagtagcaggaacagggcgagcccaactgtacatttgttaattctttcacttttttattcagtctggtgtttattccaggattgcagagttggtatagagggcatgattgttttgctaggtcataggatctgcttattggatttccttaggatgctgatcggtctatctgtgcctctgtggtagactgcaggcacgaactgctgtgaatatataaaaaaagcgaaagataaagagcgaattctctcaatgccgctacgacttccttgttggagccagcctaagtccataacagcttctgcattgccatcaaccatagaatgagaaagaccgtcttcctcatcaactacgcgccgacgcgcggacgctcccgtccccatcgcgacccgtgcgccgggtccacgctgaaccctttcaccggggcggcgaaagatatcagccgcgacgccgacgggctcgagcgccggtacactgagataaaagttctagctgaaaacaacagatttgctctacatgctgacaatatgacgattcagagcatttgatggatggtgcaactgttgagtttgactattcccctcattggaaaaatgaaagtgatcaaccgaattggtcttcagtatcatgtttgaagactgctgctgatgctgcatgttcaatgtatactttgtctctaaatcgagaagctacaccaaatcttattgtgtcatctgagagatcagtcaagtcaatgactgaacagcagttagatgaaaacagtgaaaagcatgaagaaaatagtggaaggcttgaagaacatggtggaaatcctgttcaaacttcctatgatcaaattgttaatggctgcagtggaagagggaatagaaaattctgcagtggaagaaggaaaggaaaaggaaaatgataaggaaaaagaagaggaaaatggaaatgagaagagcaaggaaactggaaatgagactgaatatgaaaaggtgaagaacataaaactggttcacatagattatattttggagaaggctgaaactggcgttcagttcgttggcaatgtcatgcgtagcagtagtcagacaaggcgggcacactgttggtttccttgtgttgatagtgccacagaacgctgtccatttgacctagaatttacagttagcatggatttcattgctgtcagcaatggtgacttgctttaccagttagtccacagtggatatccttggttgttggcccacttgaagttcttcctgacagaatcacagaaatgacataaatgtctcacacatatgtttattccctgctttggcaaagcttcagaacactattgcatttttccacaatgcatacagctgttatgaagactatctttctgcaccatttcccttaggccccgtttgtttcctttcatttcgaggaattggaatcttactaacagaataggctaattttttagaatatgacattccaccactttccaaagttatcatataagcctatctcaaattcatgaggtgagagatggaaattgattctatagatttacatgctaattttccgatgtacaacttatagcacactcttctacctgcacctctataacataaatatactatataactaactctctcatatgatttaggataatatacaaatatattatatgtataaatatataaacttaattagttttgtctaaattataattattaaaatggaattcaattccaacgaaacaaacgggcccttaggtttatacaatcacatttttcttccatctgaaatgacaatattaccagcaagcttaggagcctccacatgcatcctcagttctgatatcttgcatgatgagaaagttatatagatcaggtgcgtttgtttctcttattttactaccctgtcccctctgatctagaccaatgatttgacaccatactttttaatgagatccgaatgcgtggctgctatagcatgtgcttatcaattgtgcttattctttattaaactatttttcatatcagctgttgttttgaagccctcctttcactgagagcatttagtgtcagtaagcaatccatgaatgcataatttctgctccagtatttgtgttttaactaagttagattctggtttagatgcctatatgacactacattcttgttaagttgatcatttaattagtttggtacctccagcaaatactgtaaatatgtttatggaatatgttaaatacttctgtatgtttgcttgccttatattttgtattttttctgtatagggctttgtaaacctgtcatcctttggataggagtgcatgaaaatctgcaatccatgtgtctgaatcatgacctgctattacttttactttatcttcctaagcattaaccttgcttctttgtatccccttaactggtggcttgataacactttgtattatgcattaaccttgcttctttgtatccccttaattagtggctcttggtaatgctttgtacacctgcattacattatagtcaagtattatgtttcataccttgcagtctgcactaacttgtaaaatagttcagataattggcacaagaacgaaactggcttatgcccttgcaaagcaatggtttggaatatacacaagtgcagaggagtccagtgacggctaactgctcagtatgtgaatctgatgttagtggtgcaactgctttgagctctactgctgcttcaagtgatttatatggaactcaagcaatcggttcatatgggaaagttcgttcattgaaagctgtagctgttttcaaatgttggagaagcagatgggaccagactcatttcggaagattttgcaggtgatagtggctccaagtcgtgcataaaatctaggcatgagcttcctagcctctcttctcaagcaaattgatcggttcttgcaatttgacaactttatgcctggttataatggggtcttgactgtcagctgcattcgtacccttgtacgaatagcaaagaaggtgccatcttttgtatgccttgatcacatttttgaattggttgcccctttccgcaacatggacaaaccatggaaagttcgaattgaagctagcaggattcttattgatcttgagttacaccataaaggactcgatgcagctcttttgttgttcttgaaatatgtggacgaagaaaagtctttgcgaggttggattgctagagtactttttgatggttttgtatgctttgctatcttttgacatggaagctgttgaaggagcgacaaagttggctgttcatgtcttgcgtatatgtcaaacaagtattgttcctcacgccaatgatcaaataaattttggcaactctagttaggggtggtaacgggccatttaatttagcctagcaaatttacggatcgaatcaagttagggccggatcataaaacaatacaattttgaactaacaaaattaagggctttgttggtttgtgaagcaagtattagggtcatgatccattaccacccctaactctagttggtcttcttcatctgcttgctggcacaaaggcatacaataacatatttcttcgtcatcaagtgttctgcatattgcaagttgctgctggaaggtccccaacgttatttggtgttccaaaggtcctcacaccccctctggtggtcaactacatcttcagtgatcaacacactaaagatgattcctcaattcctcaaccatcatagtctcaggaaccttccactagcactcctagtgtccgggaggtcttaccgacctctggacccactcaagatgctgataattatcttactgcagtgaaagaaggaatgtggtcaaaattagggtgaagcttactgcatcttccagtaaagcatctgatgctgaccatagaggccattctgatggcgcaagaaatgaaaatgaaccgggtcaatgcagctcaatgtcaatggatgcccccatggctggagcagcaaatgaaccattaaatgtaagcaatcataacattgaggaacaaaactcatgtcacgaccttggatcaaggatgtcggcaagtgttagcaatgctaaactaatggacagacatgatatttccaaggagctacagtgcactgctgattccaggctggatactgttcccaaggatcagttctctcctgccattaatccgccggaagttttagacaaacctggcagtcagcttgaaggtgtctccaactatgatgtaaaccaagctccagagactgaacggagtggaaacagaagagagagaaaaaaacaagaaagataaaaagctgaaacgtgacgaaaaactagataaaaaaatatgacccagagtatctagagaaaagctccttaataagaaggaaaagaaagagttggccagaaagcagctagaaggtgaagagctacccctgaacagcggagagcagtgaacccttcaggttcacaggaagttttgccttcaaggccaccagctccagttctaagtgttgaaacacctgttcgaatctctgaaccccaggtatcaagcaaggaaacagctgtagatactgcacgtgcagcagccaaaccaaggataaagatcagagtcaagcccttggtaagaaaatctgaagggaattaaaaaagattgtagaattgtggccagtctgccatcatttgtaaggattactgtacagcaggaaaaatgcgggtttagttattttgtgaatggctgatgtatcctgtaaaaaaacattgctctgctctagtaatttctggggtaatcgaaatctgagttctagggtagtccatattttctgctgcagttgctttagtatctcagcgcttattatctcacaggttttaagtgtttgttcgatttgctgggcctaaaactaaaactgaaggatcgctgtgctcaatttgtagctgttgatgcattcatttcagatttgaggaggcttgacggaattaactgctgagcttgctcaa

SEQ ID NO: 21795 - DNA, 4413 bp, Zea Mays
cggagagagaactagagtagaagtccagcagcaacagcgaccgatcacgacgagcggagctgacctggccgcggcggcacgaggttgtggtcggcgtggcgcgtggcctgctctacctccacgaggacgcgcacacgcctatcatccaccgcgacatcaaggccagcaacatcctcctggacgaccggtgggtgcccaagatcgcggacttcggcatggcccgcctcttccccgaggccggcgatggtcactctcgcgtccatacccgtgtcgccggcactaacgggtacatggcgcccgagtacctcatgcacggcgacctctccaccaaggccgacgtcttcagcttcggcgtggttgttctcgagattgtctcgggccgcaagaactccgcctttgtcccgcccctcgacgccgaggccgacagcctcctggaatacgcctggagactgtacaagaaaggtcggagcctggagttgcttgaccccgcggtcaagtcgtcggcggtgccggagcaggtcgagctgtgcgtgcgcatcgggctgctgtgcgtgcaggccgacccgcggctgcggccggacatgaagcgcgtggtgatcatcctgtccaagaagcagagcacactcgaggagccgacgcgcccgggcgtgcccgggtcgcggtaccggcggaggccccacggcctgcggggctctcactactctgtcgggtcatcgtccggcaccagctcgccgtctacgtccgctacatcgcacgcgtcagcatcagcgtcagcgtcagcctcccacgccatgacgacgtcgagcacgcacaccatgaggagccggggcttgccctcgcaccgagaagaagagcaggagtagcaggaacagggcgagcccaactgtacatttgttaattctttcacttttttattcagtctggtgtttattccaggattgcagagttggtatagagggcatgattgttttgctaggtcataggatctgcttattggatttccttaggatgctgatcggtctatctgtgcctctgtggtagactgcaggcacgaactgctgtgaatatataaaaaaagcgaaagataaagagcgaattctctcaatgccgctacgacttccttgttggagccagcctaagtccataacagcttctgcattgccatcaaccatagaatgagaaagaccgtcttcctcatcaactacgcgccgacgcgcggacgctcccgtccccatcgcgacccgtgcgccgggtccacgctgaaccctttcaccggggcggcgaaagatatcagccgcgacgccgacgggctcgagcgccggtgagcgctcgcgcacccgggccaataaactggcaccggctcctcctctcgcgtcgcagagcctagcctcgggatgacgtggcgtaccacaacaccaccacacctcactcagccctgcgggtctccgaccaaccatttctagaagcctccaaaccctagcgcaggaggaagaggagttaggaggagctccagggatggcgaaggcgaggaagcagaagggtgacggtgccagtacgggaggaggcgccaccgtgctccaccagaagctctgcctctccatcgacatggagaaccagctgatctacgggtacactgagataaaagttctagctgaaaacaacagatttgctctacatgctgacaatatgacgattcagagcatttgatggatggtgcaactgttgagtttgactattcccctcattggaaaaatgaaagtgatcaaccgaattggtcttcagtatcatgtttgaagactgctgctgatgctgcatgttcaatgtatactttgtctctaaatcgagaagctacaccaaatcttattgtgtcatctgagagatcagtcaagtcaatgactgaacagcagttagatgaaaacagtgaaaagcatgaagaaaatagtggaaggcttgaagaacatggtggaaatcctgttcaaacttcctatgatcaaattgttaatggctgcagtggaagagggaatagaaaattctgcagtggaagaaggaaaggaaaaggaaaatgataaggaaaaagaagaggaaaatggaaatgagaagagcaaggaaactggaaatgagactgaatatgaaaaggtgaagaacataaaactggttcacatagattatattttggagaaggctgaaactggcgttcagttcgttggcaatgtcatgcgtagcagtagtcagacaaggcgggcacactgttggtttccttgtgttgatagtgccacagaacgctgtccatttgacctagaatttacagttagcatggatttcattgctgtcagcaatggtgacttgctttaccagttagtccacagtggatatccttggttgttggcccacttgaagttcttcctgacagaatcacagaaatgacataaatgtctcacacatatgtttattccctgctttggcaaagcttcagaacactattgcatttttccacaatgcatacaggtgctgatcaatcttttttttttctgtgaaaagtgcttagattggtgttgattttattagtatctcaataagcttattttttaattgatttctgaaatttgcatttcttttgcagctgttatgaagactatctttctgcaccatttcccttaggccccgtttgtttcctttcatttcgaggaattggaatcttactaacagaataggctaattttttagaatatgacattccaccactttccaaagttatcatataagcctatctcaaattcatgaggtgagagatggaaattgattctatagatttacatgctaattttccgatgtacaacttatagcacactcttctacctgcacctctataacataaatatactatataactaactctctcatatgatttaggataatatacaaatatattatatgtataaatatataaacttaattagttttgtctaaattataattattaaaatggaattcaattccaacgaaacaaacgggcccttaggtttatacaatcacatttttcttccatctgaaatgacaatattaccagcaagcttaggagcctccacatgcatcctcagttctgatatcttgcatgatgagaaagttatatagatcagataattggcacaagaacgaaactggcttatgcccttgcaaagcaatggtttggaatatacacaagtgcagaggagtccagtgacggctaactgctcagtatgtgaatctgatgttagtggtgcaactgctttgagctctactgctgcttcaagtgatttatatggaactcaagcaatcggttcatatgggaaagttcgttcattgaaagctgtagctgttttcaaatgttggagaagcagatgggaccagactcatttcggaagattttgcaggtgatagtggctccaagtcgtgcataaaatctaggcatgagcttcctagcctctcttctcaagcaaattgatcggttcttgcaatttgacaactttatgcctggttataatggggtcttgactgtcagctgcattcgtacccttgtacgaatagcaaagaaggatcacatttttgaattggttgcccctttccgcaacatggacaaaccatggaaagttcgaattgaagctagcaggattcttattgatcttgagttacaccataaaggactcgatgcagctcttttgttgttcttgaaatatgtggacgaagaaaagtctttgcgaggttggattgctagagtactttttgatggttttgtatgctttgctatcttttgacatggaagctgttgaaggagcgacaaagttggctgttcatgtcttgcgtatatgtcaaacaagtattgttcctcacgccaatgatcaaataaattttggcaactctagttaggggtggtaacgggccatttaatttagcctagcaaatttacggatcgaatcaagttagggccggatcataaaacaatacaattttgaactaacaaaattaagggctttgttggtttgtgaagcaagtattagggtcatgatccattaccacccctaactctagttggtcttcttcatctgcttgctggcacaaaggcatacaataacatatttcttcgtcatcaagtgttctgcatattgcaagttgctgctggaaggttagtgagtttgttattgcatatgtattcattattttgtttcgttgattacttgttattgcattgacatctgtactacataaagcaccagttttcacggttcaaatttccaccgtcgtcgtgctctcccgcatttaaatggtaaaaacgctatttttttcacaaatggggattcaaaccatgattgttggctctaaacccacttaggcaacaatgttttattttatactctatacttaagcgtaaatggaaac

SEQ ID NO: 21796 - DNA, 2687 bp, Zea Mays
ctcgcgcacccgggccaataaactggcaccggctcctcctctcgcgtcgcagagcctagcctcgggatgacgtggcgtaccacaacaccaccacacctcactcagccctgcgggtctccgaccaaccatttctagaagcctccaaaccctagcgcaggaggaagaggagttaggaggagctccagggatggcgaaggcgaggaagcagaagggtgacggtgccagtacgggaggaggcgccaccgtgctccaccagaagctctgcctctccatcgacatggagaaccagctgatctacgggtacactgagataaaagttctagctgaaaacaacagatttgctctacatgctgacaatatgacgattcagagcatttgatggatggtgcaactgttgagtttgactattcccctcattggaaaaatgaaagtgatcaaccgaattggtcttcagtatcatgtttgaagactgctgctgatgctgcatgttcaatgtatactttgtctctaaatcgagaagctacaccaaatcttattgtgtcatctgagagatcagtcaagtcaatgactgaacagcagttagatgaaaacagtgaaaagcatgaagaaaatagtggaaggcttgaagaacatggtggaaatcctgttcaaacttcctatgatcaaattgttaatggctgcagtggaagagggaatagaaaattctgcagtggaagaaggaaaggaaaaggaaaatgataaggaaaaagaagaggaaaatggaaatgagaagagcaaggaaactggaaatgagactgaatatgaaaaggtgaagaacataaaactggttcacatagattatattttggagaaggctgaaactggcgttcagttcgttggcaatgtcatgcgtagcagtagtcagacaaggcgggcacactgttggtttccttgtgttgatagtgccacagaacgctgtccatttgacctagaatttacagttagcatggatttcattgctgtcagcaatggtgacttgctttaccaggtctctagtaaggaagatccttcaaaaaaacttatgtgtataaattgaacactccagttagtccacagtggatatccttggttgttggcccacttgaagttcttcctgacagaatcacagaaatgacataaatgtctcacacatatgtttattccctgctttggcaaagcttcagaacactattgcatttttccacaatgcatacagctgttatgaagactatctttctgcaccatttcccttaggtttatacaatcacatttttcttccatctgaaatgacaatattaccagcaagcttaggagcctccacatgcatcctcagttctgatatcttgcatgatgagaaagttatatagatcagataattggcacaagaacgaaactggcttatgcccttgcaaagcaatggtttggaatatacacaagtgcagaggagtccagtgacggctaactgctcagtatgtgaatctgatgttagtggtgcaactgctttgagctctactgctgcttcaagtgatttatatggaactcaagcaatcggttcatatgggaaagttcgttcattgaaagctgtagctgttttcaaatgttggagaagcagatgggaccagactcatttcggaagattttgcaggtgatagtggctccaagtcgtgcataaaatctaggcatgagcttcctagcctctcttctcaagcaaattgatcggttcttgcaatttgacaactttatgcctggttataatggggtcttgactgtcagctgcattcgtacccttgtacgaatagcaaagaaggtgccatcttttgtatgccttgatcacatttttgaattggttgcccctttccgcaacatggacaaaccatggaaagttcgaattgaagctagcaggattcttattgatcttgagttacaccataaaggactcgatgcagctcttttgttgttcttgaaatatgtggacgaagaaaagtctttgcgaggttggattgctagagtactttttgatggttttgtatgctttgctatcttttgacatggaagctgttgaaggagcgacaaagttggctgttcatgtcttgcgtatatgtcaaacaagtattgttcctcacgccaatgatcaaataaattttggcaactctagttaggggtggtaacgggccatttaatttagcctagcaaatttacggatcgaatcaagttagggccggatcataaaacaatacaattttgaactaacaaaattaagggctttgttggtttgtgaagcaagtattagggtcatgatccattaccacccctaactctagttggtcttcttcatctgcttgctggcacaaaggcatacaataacatatttcttcgtcatcaagtgttctgcatattgcaagttgctgctggaaggttagtgagtttgttattgcatatgtattcattattttgtttcgttgattacttgttattgcattgacatctgtactacataaagcaccagttttcacggttcaaatttccaccgtcgtcgtgctctcccgcatttaaatggtaaaaacgctatttttttcacaaatggggattcaaaccatgattgttggctctaaacccacttaggcaacaatgttttattttatactctatacttaagcgtaaatggaaac

SEQ ID NO: 21797 - DNA, 2708 bp, Zea Mays
ctcgcgcacccgggccaataaactggcaccggctcctcctctcgcgtcgcagagcctagcctcgggatgacgtggcgtaccacaacaccaccacacctcactcagccctgcgggtctccgaccaaccatttctagaagcctccaaaccctagcgcaggaggaagaggagttaggaggagctccagggatggcgaaggcgaggaagcagaagggtgacggtgccagtacgggaggaggcgccaccgtgctccaccagaagctctgcctctccatcgacatggagaaccagctgatctacgggtacactgagataaaagttctagctgaaaacaacagatttgctctacatgctgacaatatgacgattcagagcatttgatggatggtgcaactgttgagtttgactattcccctcattggaaaaatgaaagtgatcaaccgaattggtcttcagtatcatgtttgaagactgctgctgatgctgcatgttcaatgtatactttgtctctaaatcgagaagctacaccaaatcttattgtgtcatctgagagatcagtcaagtcaatgactgaacagcagttagatgaaaacagtgaaaagcatgaagaaaatagtggaaggcttgaagaacatggtggaaatcctgttcaaacttcctatgatcaaattgttaatggctgcagtggaagagggaatagaaaattctgcagtggaagaaggaaaggaaaaggaaaatgataaggaaaaagaagaggaaaatggaaatgagaagagcaaggaaactggaaatgagactgaatatgaaaaggtgaagaacataaaactggttcacatagattatattttggagaaggctgaaactggcgttcagttcgttggcaatgtcatgcgtagcagtagtcagacaaggcgggcacactgttggtttccttgtgttgatagtgccacagaacgctgtccatttgacctagaatttacagttagcatggatttcattgctgtcagcaatggtgacttgctttaccaggtctctagtaaggaagatccttcaaaaaaacttatgtgtataaattgaacactccagttagtccacagtggatatccttggttgttggcccacttgaagttcttcctgacagaatcacagaaatgacataaatgtctcacacatatgtttattccctgctttggcaaagcttcagaacactattgcatttttccacaatgcatacagctgttatgaagactatctttctgcaccatttcccttaggtttatacaatcacatttttcttccatctgaaatgacaatattaccagcaagcttaggagcctccacatgcatcctcagttctgatatcttgcatgatgagaaagttatatagatcagataattggcacaagaacgaaactggcttatgcccttgcaaagcaatggtttggaatatacacaagtgcagaggagtccagtgacgaatggcttttggatggtttggctggttttctaactgagttattatcaagcgttaccttgggaataacgaggcgcgttataggcgtttcaaggctaactgctcagtatgtgaatctgatgttagtggtgcaactgctttgagctctactgctgcttcaagtgatttatatggaactcaagcaatcggttcatatgggaaagttcgttcattgaaagctgtagctgttttcaaatgttggagaagcagatgggaccagactcatttcggaagattttgcaggtgatagtggctccaagtcgtgcataaaatctaggcatgagcttcctagcctctcttctcaagcaaattgatcggttcttgcaatttgacaactttatgcctggttataatggggtcttgactgtcagctgcattcgtacccttgtacgaatagcaaagaaggtgccatcttttgtatgccttgatcacatttttgaattggttgcccctttccgcaacatggacaaaccatggaaagttcgaattgaagctagcaggattcttattgatcttgagttacaccataaaggactcgatgcagctcttttgttgttcttgaaatatgtggacgaagaaaagtctttgcgaggagcgacaaagttggctgttcatgtcttgcgtatatgtcaaacaagtattgttcctcacgccaatgatcaaataaattttggcaactctagttaggggtggtaacgggccatttaatttagcctagcaaatttacggatcgaatcaagttagggccggatcataaaacaatacaattttgaactaacaaaattaagggctttgttggtttgtgaagcaagtattagggtcatgatccattaccacccctaactctagttggtcttcttcatctgcttgctggcacaaaggcatacaataacatatttcttcgtcatcaagtgttctgcatattgcaagttgctgctggaaggttagtgagtttgttattgcatatgtattcattattttgtttcgttgattacttgttattgcattgacatctgtactacataaagcaccagttttcacggttcaaatttccaccgtcgtcgtgctctcccgcatttaaatggtaaaaacgctatttttttcacaaatggggattcaaaccatgattgttggctctaaacccacttaggcaacaatgttttattttatactctatacttaagcgtaaatggaaac

SEQ ID NO: 21798 - DNA, 3867 bp, Zea Mays
ctcgcgcacccgggccaataaactggcaccggctcctcctctcgcgtcgcagagcctagcctcgggatgacgtggcgtaccacaacaccaccacacctcactcagccctgcgggtctccgaccaaccatttctagaagcctccaaaccctagcgcaggaggaagaggagttaggaggagctccagggatggcgaaggcgaggaagcagaagggtgacggtgccagtacgggaggaggcgccaccgtgctccaccagaagctctgcctctccatcgacatggagaaccagctgatctacgggtacactgagataaaagttctagctgaaaacaacagatttgctctacatgctgacaatatgacgattcagagcatttgatggatggtgcaactgttgagtttgactattcccctcattggaaaaatgaaagtgatcaaccgaattggtcttcagtatcatgtttgaagactgctgctgatgctgcatgttcaatgtatactttgtctctaaatcgagaagctacaccaaatcttattgtgtcatctgagagatcagtcaagtcaatgactgaacagcagttagatgaaaacagtgaaaagcatgaagaaaatagtggaaggcttgaagaacatggtggaaatcctgttcaaacttcctatgatcaaattgttaatggctgcagtggaagagggaatagaaaattctgcagtggaagaaggaaaggaaaaggaaaatgataaggaaaaagaagaggaaaatggaaatgagaagagcaaggaaactggaaatgagactgaatatgaaaaggtgaagaacataaaactggttcacatagattatattttggagaaggctgaaactggcgttcagttcgttggcaatgtcatgcgtagcagtagtcagacaaggcgggcacactgttggtttccttgtgttgatagtgccacagaacgctgtccatttgacctagaatttacagttagcatggatttcattgctgtcagcaatggtgacttgctttaccaggtctctagtaaggaagatccttcaaaaaaacttatgtgtataaattgaacactccagttagtccacagtggatatccttggttgttggcccacttgaagttcttcctgacagaatcacagaaatgacataaatgtctcacacatatgtttattccctgctttggcaaagcttcagaacactattgcatttttccacaatgcatacagctgttatgaagactatctttctgcaccatttcccttaggtttatacaatcacatttttcttccatctgaaatgacaatattaccagcaagcttaggagcctccacatgcatcctcagttctgatatcttgcatgatgagaaagttatatagatcagataattggcacaagaacgaaactggcttatgcccttgcaaagcaatggtttggaatatacacaagtgcagaggagtccagtgacgaatggcttttggatggtttggctggttttctaactgagttattatcaagcgttaccttgggaataacgaggcgcgttataggcgtttcaaggctaactgctcagtatgtgaatctgatgttagtggtgcaactgctttgagctctactgctgcttcaagtgatttatatggaactcaagcaatcggttcatatgggaaagttcgttcattgaaagctgtagctgttttcaaatgttggagaagcagatgggaccagactcatttcggaagattttgcaggtgatagtggctccaagtcgtgcataaaatctaggcatgagcttcctagcctctcttctcaagcaaattgatcggttcttgcaatttgacaactttatgcctggttataatggggtcttgactgtcagctgcattcgtacccttgtacgaatagcaaagaaggatcacatttttgaattggttgcccctttccgcaacatggacaaaccatggaaagttcgaattgaagctagcaggattcttattgatcttgagttacaccataaaggactcgatgcagctcttttgttgttcttgaaatatgtggacgaagaaaagtctttgcgaggttggattgctagagtactttttgatggttttgtatgctttgctatcttttgacatggaagctgttgaaggagcgacaaagttggctgttcatgtcttgcgtatatgtcaaacaagtattgttcctcacgccaatgatcaaataaattttggcaactctagttaggggtggtaacgggccatttaatttagcctagcaaatttacggatcgaatcaagttagggccggatcataaaacaatacaattttgaactaacaaaattaagggctttgttggtttgtgaagcaagtattagggtcatgatccattaccacccctaactctagttggtcttcttcatctgcttgctggcacaaaggcatacaataacatatttcttcgtcatcaagtgttctgcatattgcaagttgctgctggaaggtccccaacgttatttggtgttccaaaggtcctcacaccccctctggtggtcaactacatcttcagtgatcaacacactaaagatgattcctcaattcctcaaccatcatagtctcaggaaccttccactagcactcctagtgtccgggaggtcttaccgacctctggacccactcaagatgctgataattatcttactgcagtgaaagaaggaatgtggtcaaaattagggtgaagcttactgcatcttccagtaaagcatctgatgctgaccatagaggccattctgatggcgcaagaaatgaaaatgaaccgggtcaatgcagctcaatgtcaatggatgcccccatggctggagcagcaaatgaaccattaaatgtaagcaatcataacattgaggaacaaaactcatgtcacgaccttggatcaaggatgtcggcaagtgttagcaatgctaaactaatggacagacatgatatttccaaggagctacagtgcactgctgattccaggctggatactgttcccaaggatcagttctctcctgccattaatccgccggaagttttagacaaacctggcagtcagcttgaaggtgtctccaactatgatgtaaaccaagctccagagactgaacggagtggaaacagaagagagagaaaaaaacaagaaagataaaaagctgaaacgtgacgaaaaactagataaaaaaatatgacccagagtatctagagaaaagctccttaataagaaggaaaagaaagagttggccagaaagcagctagaaggtgaagagctacccctgaacagcggagagcagtgaacccttcaggttcacaggaagttttgccttcaaggccaccagctccagttctaagtgttgaaacacctgttcgaatctctgaaccccaggtatcaagcaaggaaacagctgtagatactgcacgtgcagcagccaaaccaaggataaagatcagagtcaagcccttggtaagaaaatctgaagggaattaaaaaagattgtagaattgtggccagtctgccatcatttgtaaggattactgtacagcaggaaaaatgcgggtttagttattttgtgaatggctgatgtatcctgtaaaaaaacattgctctgctctagtaatttctggggtaatcgaaatctgagttctagggtagtccatattttctgctgcagttgctttagtatctcagcgcttattatctcacaggttttaagtgtttgttcgatttgctgggcctaaaactaaaactgaaggatcgctgtgctcaatttgtagctgttgatgcattcatttcagatttgaggaggcttgacggaattaactgctgagcttgctcaa

SEQ ID NO: 21799 - DNA, 3987 bp, Zea Mays
tcctcctctcgcgtcgcagagcctagcctcgggatgacgtggcgtaccacaacaccaccacacctcactcagccctgcgggtctccgaccaaccatttctagaagcctccaaaccctagcgcaggaggaagaggagttaggaggagctccagggatggcgaaggcgaggaagcagaagggtgacggtgccagtacgggaggaggcgccaccgtgctccaccagaagctctgcctctccatcgacatggagaaccagctgatctacgggtacactgagataaaagttctagctgaaaacaacagatttgctctacatgctgacaatatgacgattcagagcatttgatggatggtgcaactgttgagtttgactattcccctcattggaaaaatgaaagtgatcaaccgaattggtcttcagtatcatgtttgaagactgctgctgatgctgcatgttcaatgtatactttgtctctaaatcgagaagctacaccaaatcttattgtgtcatctgagagatcagtcaagtcaatgactgaacagcagttagatgaaaacagtgaaaagcatgaagaaaatagtggaaggcttgaagaacatggtggaaatcctgttcaaacttcctatgatcaaattgttaatggctgcagtggaagagggaatagaaaattctgcagtggaagaaggaaaggaaaaggaaaatgataaggaaaaagaagaggaaaatggaaatgagaagagcaaggaaactggaaatgagactgaatatgaaaaggtgaagaacataaaactggttcacatagattatattttggagaaggctgaaactggcgttcagttcgttggcaatgtcatgcgtagcagtagtcagacaaggcgggcacactgttggtttccttgtgttgatagtgccacagaacgctgtccatttgacctagaatttacagttagcatggatttcattgctgtcagcaatggtgacttgctttaccagctgttatgaagactatctttctgcaccatttcccttaggtttatacaatcacatttttcttccatctgaaatgacaatattaccagcaagcttaggagcctccacatgcatcctcagttctgatatcttgcatgatgagaaagttatatagatcaggtgcgtttgtttctcttattttactaccctgtcccctctgatctagaccaatgatttgacaccatactttttaatgagatccgaatgcgtggctgctatagcatgtgcttatcaattgtgcttattctttattaaactatttttcatatcagctgttgttttgaagccctcctttcactgagagcatttagtgtcagtaagcaatccatgaatgcataatttctgctccagtatttgtgttttaactaagttagattctggtttagatgcctatatgacactacattcttgttaagttgatcatttaattagtttggtacctccagcaaatactgtaaatatgtttatggaatatgttaaatacttctgtatgtttgcttgccttatattttgtattttttctgtatagggctttgtaaacctgtcatcctttggataggagtgcatgaaaatctgcaatccatgtgtctgaatcatgacctgctattacttttactttatcttcctaagcattaaccttgcttctttgtatccccttaactggtggcttgataacactttgtattatgcattaaccttgcttctttgtatccccttaattagtggctcttggtaatgctttgtacacctgcattacattatagtcaagtattatgtttcataccttgcagtctgcactaacttgtaaaatagttcagataattggcacaagaacgaaactggcttatgcccttgcaaagcaatggtttggaatatacacaagtgcagaggagtccagtgacgaatggcttttggatggtttggctggttttctaactgagttattatcaagcgttaccttgggaataacgaggcgcgttataggcgtttcaaggctaactgctcagtatgtgaatctgatgttagtggtgcaactgctttgagctctactgctgcttcaagtgatttatatggaactcaagcaatcggttcatatgggaaagttcgttcattgaaagctgtagctgttttcaaatgttggagaagcagatgggaccagactcatttcggaagattttgcaggtgatagtggctccaagtcgtgcataaaatctaggcatgagcttcctagcctctcttctcaagcaaattgatcggttcttgcaatttgacaactttatgcctggttataatggggtcttgactgtcagctgcattcgtacccttgtacgaatagcaaagaaggtgccatcttttgtatgccttgatcacatttttgaattggttgcccctttccgcaacatggacaaaccatggaaagttcgaattgaagctagcaggattcttattgatcttgagttacaccataaaggactcgatgcagctcttttgttgttcttgaaatatgtggacgaagaaaagtctttgcgaggcatacaataacatatttcttcgtcatcaagtgttctgcatattgcaagttgctgctggaaggtccccaacgttatttggtgttccaaaggtcctcacaccccctctggtggtcaactacatcttcagtgatcaacacactaaagatgattcctcaattcctcaaccatcatagtctcaggaaccttccactagcactcctagtgtccgggaggtcttaccgacctctggacccactcaagatgctgataattatcttactgcagtgaaagaaggaatgtggtcaaaattagggtgaagcttactgcatcttccagtaaagcatctgatgctgaccatagaggccattctgatggcgcaagaaatgaaaatgaaccgggtcaatgcagctcaatgtcaatggatgcccccatggctggagcagcaaatgaaccattaaatgtaagcaatcataacattgaggaacaaaactcatgtcacgaccttggatcaaggatgtcggcaagtgttagcaatgctaaactaatggacagacatgatatttccaaggagctacagtgcactgctgattccaggctggatactgttcccaaggatcagttctctcctgccattaatccgccggaagttttagacaaacctggcagtcagcttgaaggtgtctccaactatgatgtaaaccaagctccagagactgaacggagtggaaacagaagagagagaaaaaaacaagaaagataaaaagctgaaacgtgacgaaaaactagataaaaaaatatgacccagagtatctagagaaaagctccttaataagaaggaaaagaaagagttggccagaaagcagctagaaggtgaagagctacccctgaacagcggagagcagtgaacccttcaggttcacaggaagttttgccttcaaggccaccagctccagttctaagtgttgaaacacctgttcgaatctctgaaccccaggtatcaagcaaggaaacagctgtagatactgcacgtgcagcagccaaaccaaggataaagatcagagtcaagcccttggtaagaaaatctgaagggaattaaaaaagattgtagaattgtggccagtctgccatcatttgtaaggattactgtacagcaggaaaaatgcgggtttagttattttgtgaatggctgatgtatcctgtaaaaaaacattgctctgctctagtaatttctggggtaatcgaaatctgagttctagggtagtccatattttctgctgcagttgctttagtatctcagcgcttattatctcacaggttttaagtgtttgttcgatttgctgggcctaaaactaaaactgaaggatcgctgtgctcaatttgtagctgttgatgcattcatttcagatttgaggaggcttgacggaattaactgctgagcttgctcaa

SEQ ID NO: 21800 - DNA, 1607 bp, Zea Mays
ctcccatgtcttggcgtctcccggcgccgggcgcgacgctcacgccaatgactatttatccgccctccttgcgatcggacagccaggcagcgacgacgaccgcgaccggtgggcggcggaggcaagctgggtctcaagctagagcacaggtggtttcatcagctcacacacagagaacaggatcaggatcaggacagatgggagccgagaacggtagcaacaacccttcgtcgaccgtcttggatggcctctacggggtgcagctcggccgtccatcggatccggcacagaccgacggtggggcgtcgtcgtcaccagcagcttgtgaacaccaccacaagcgtggccgtggtggtacagcacaggcacagcagaggttgcagatccgaaggctatggcagcacagaccgtcttgcttcaagcccatccactgcaccattacgtgtgacaagcatgctggcgagactgtcgcgaacgtcgtcacctcgctgcccttcatcgttcttggactgcaggctccaaggaagaacctgaacgccgctatctacgccaactccctggtcgggatgggagtagcgtcgagcctgtaccattcttccagaggaggaatccggaggctcctgcgttgggccgactacactatgattgccaccacaactctgtgtttgtcgagagcagtaggcaacgagaacccaagattgctcatggccgcttcagcgttgctcctgccgtttcagccactggtggtttcggctgtccacactggactcatggaggtttcatttgcgagaagagcgtcgatggaaccggagctcaggatggcgcataacctgcacaaggtgtcgtctctgctgggaggtgcgctgttcatcgccgacgactgcttcccggagactccctatatccacgccgcgtggcatcttgctgctgccatcggcgttggcacgtgcaacaagcttcttgaatgacaacagcccggcctccactcatgctgatatcaatgagcagttgatttcagcacctatcacgacctacgctacgtagaatgcacacagtatagcagcttgtcgacatttataacagaaaacaccatatgtctattatttgatagcctaggctgaactccttcgtctgacacatggtgtgggagggagtaacgtttgagaccatcttacaggcaatctgaaggtggtgaagatttgttaaagactgatccatttgcatctatgtcagtgcactgaggaaaattgtcaagacatcaacacccgatgaccaagtatttgcagttctacttcaagtatggtgtggatacagtttgcacattcttcatataaaggattttggcttttgagtcacggatcaaccacttgggcctgtgttaccaacatgtaggactcattctgattcacccagcttcttcgtgttaagtaaccctagttaaggttatgtgggcaaataccgactttgcccctgaggggtctcatatctctatataaggaacctgtacaccccttcataatacagagaagagaaagaggccagaggcccaaccctatatccagtgtctcgtgtgtttcctctgtcgtgtttatgggaagggagacggg

SEQ ID NO: 21801 - DNA, 1624 bp, Zea Mays
ctcccatgtcttggcgtctcccggcgccgggcgcgacgctcacgccaatgactatttatccgccctccttgcgatcggacagccaggcagcgacgacgaccgcgaccggtgggcggcggaggcaagctggtgtacttagtttgacaggtctcaagctagagcacaggtggtttcatcagctcacacacagagaacaggatcaggatcaggacagatgggagccgagaacggtagcaacaacccttcgtcgaccgtcttggatggcctctacggggtgcagctcggccgtccatcggatccggcacagaccgacggtggggcgtcgtcgtcaccagcagcttgtgaacaccaccacaagcgtggccgtggtggtacagcacaggcacagcagaggttgcagatccgaaggctatggcagcacagaccgtcttgcttcaagcccatccactgcaccattacgtgtgacaagcatgctggcgagactgtcgcgaacgtcgtcacctcgctgcccttcatcgttcttggactgcaggctccaaggaagaacctgaacgccgctatctacgccaactccctggtcgggatgggagtagcgtcgagcctgtaccattcttccagaggaggaatccggaggctcctgcgttgggccgactacactatgattgccaccacaactctgtgtttgtcgagagcagtaggcaacgagaacccaagattgctcatggccgcttcagcgttgctcctgccgtttcagccactggtggtttcggctgtccacactggactcatggaggtttcatttgcgagaagagcgtcgatggaaccggagctcaggatggcgcataacctgcacaaggtgtcgtctctgctgggaggtgcgctgttcatcgccgacgactgcttcccggagactccctatatccacgccgcgtggcatcttgctgctgccatcggcgttggcacgtgcaacaagcttcttgaatgacaacagcccggcctccactcatgctgatatcaatgagcagttgatttcagcacctatcacgacctacgctacgtagaatgcacacagtatagcagcttgtcgacatttataacagaaaacaccatatgtctattatttgatagcctaggctgaactccttcgtctgacacatggtgtgggagggagtaacgtttgagaccatcttacaggcaatctgaaggtggtgaagatttgttaaagactgatccatttgcatctatgtcagtgcactgaggaaaattgtcaagacatcaacacccgatgaccaagtatttgcagttctacttcaagtatggtgtggatacagtttgcacattcttcatataaaggattttggcttttgagtcacggatcaaccacttgggcctgtgttaccaacatgtaggactcattctgattcacccagcttcttcgtgttaagtaaccctagttaaggttatgtgggcaaataccgactttgcccctgaggggtctcatatctctatataaggaacctgtacaccccttcataatacagagaagagaaagaggccagaggcccaaccctatatccagtgtctcgtgtgtttcctctgtcgtgtttatgggaagggagacggg

SEQ ID NO: 21802 - DNA, 1599 bp, Zea Mays
ctcccatgtcttggcgtctcccggcgccgggcgcgacgctcacgccaatgactatttatccgccctccttgcgatcggacagccaggcagcgacgacgaccgcgaccggtgggcggcggaggcaagctggctagagcacaggtggtttcatcagctcacacacagagaacaggatcaggatcaggacagatgggagccgagaacggtagcaacaacccttcgtcgaccgtcttggatggcctctacggggtgcagctcggccgtccatcggatccggcacagaccgacggtggggcgtcgtcgtcaccagcagcttgtgaacaccaccacaagcgtggccgtggtggtacagcacaggcacagcagaggttgcagatccgaaggctatggcagcacagaccgtcttgcttcaagcccatccactgcaccattacgtgtgacaagcatgctggcgagactgtcgcgaacgtcgtcacctcgctgcccttcatcgttcttggactgcaggctccaaggaagaacctgaacgccgctatctacgccaactccctggtcgggatgggagtagcgtcgagcctgtaccattcttccagaggaggaatccggaggctcctgcgttgggccgactacactatgattgccaccacaactctgtgtttgtcgagagcagtaggcaacgagaacccaagattgctcatggccgcttcagcgttgctcctgccgtttcagccactggtggtttcggctgtccacactggactcatggaggtttcatttgcgagaagagcgtcgatggaaccggagctcaggatggcgcataacctgcacaaggtgtcgtctctgctgggaggtgcgctgttcatcgccgacgactgcttcccggagactccctatatccacgccgcgtggcatcttgctgctgccatcggcgttggcacgtgcaacaagcttcttgaatgacaacagcccggcctccactcatgctgatatcaatgagcagttgatttcagcacctatcacgacctacgctacgtagaatgcacacagtatagcagcttgtcgacatttataacagaaaacaccatatgtctattatttgatagcctaggctgaactccttcgtctgacacatggtgtgggagggagtaacgtttgagaccatcttacaggcaatctgaaggtggtgaagatttgttaaagactgatccatttgcatctatgtcagtgcactgaggaaaattgtcaagacatcaacacccgatgaccaagtatttgcagttctacttcaagtatggtgtggatacagtttgcacattcttcatataaaggattttggcttttgagtcacggatcaaccacttgggcctgtgttaccaacatgtaggactcattctgattcacccagcttcttcgtgttaagtaaccctagttaaggttatgtgggcaaataccgactttgcccctgaggggtctcatatctctatataaggaacctgtacaccccttcataatacagagaagagaaagaggccagaggcccaaccctatatccagtgtctcgtgtgtttcctctgtcgtgtttatgggaagggagacggg

SEQ ID NO: 21803 - DNA, 1615 bp, Zea Mays
ctcccatgtcttggcgtctcccggcgccgggcgcgacgctcacgccaatgactatttatccgccctccttgcgatcggacagccaggcagcgacgacgaccgcgaccggtgggcggcggaggcaagctggtttgacaggtctcaagctagagcacaggtggtttcatcagctcacacacagagaacaggatcaggatcaggacagatgggagccgagaacggtagcaacaacccttcgtcgaccgtcttggatggcctctacggggtgcagctcggccgtccatcggatccggcacagaccgacggtggggcgtcgtcgtcaccagcagcttgtgaacaccaccacaagcgtggccgtggtggtacagcacaggcacagcagaggttgcagatccgaaggctatggcagcacagaccgtcttgcttcaagcccatccactgcaccattacgtgtgacaagcatgctggcgagactgtcgcgaacgtcgtcacctcgctgcccttcatcgttcttggactgcaggctccaaggaagaacctgaacgccgctatctacgccaactccctggtcgggatgggagtagcgtcgagcctgtaccattcttccagaggaggaatccggaggctcctgcgttgggccgactacactatgattgccaccacaactctgtgtttgtcgagagcagtaggcaacgagaacccaagattgctcatggccgcttcagcgttgctcctgccgtttcagccactggtggtttcggctgtccacactggactcatggaggtttcatttgcgagaagagcgtcgatggaaccggagctcaggatggcgcataacctgcacaaggtgtcgtctctgctgggaggtgcgctgttcatcgccgacgactgcttcccggagactccctatatccacgccgcgtggcatcttgctgctgccatcggcgttggcacgtgcaacaagcttcttgaatgacaacagcccggcctccactcatgctgatatcaatgagcagttgatttcagcacctatcacgacctacgctacgtagaatgcacacagtatagcagcttgtcgacatttataacagaaaacaccatatgtctattatttgatagcctaggctgaactccttcgtctgacacatggtgtgggagggagtaacgtttgagaccatcttacaggcaatctgaaggtggtgaagatttgttaaagactgatccatttgcatctatgtcagtgcactgaggaaaattgtcaagacatcaacacccgatgaccaagtatttgcagttctacttcaagtatggtgtggatacagtttgcacattcttcatataaaggattttggcttttgagtcacggatcaaccacttgggcctgtgttaccaacatgtaggactcattctgattcacccagcttcttcgtgttaagtaaccctagttaaggttatgtgggcaaataccgactttgcccctgaggggtctcatatctctatataaggaacctgtacaccccttcataatacagagaagagaaagaggccagaggcccaaccctatatccagtgtctcgtgtgtttcctctgtcgtgtttatgggaagggagacggg

SEQ ID NO: 21804 - DNA, 1637 bp, Zea Mays
ctcccatgtcttggcgtctcccggcgccgggcgcgacgctcacgccaatgactatttatccgccctccttgcgatcggacagccaggcagcgacgacgaccgcgaccggtgggcggcggaggcaagctgggtgggtttctacttctactactactaccacacgcgcgcgcgatctcgcggtggtttcatcagctcacacacagagaacaggatcaggatcaggacagatgggagccgagaacggtagcaacaacccttcgtcgaccgtcttggatggcctctacggggtgcagctcggccgtccatcggatccggcacagaccgacggtggggcgtcgtcgtcaccagcagcttgtgaacaccaccacaagcgtggccgtggtggtacagcacaggcacagcagaggttgcagatccgaaggctatggcagcacagaccgtcttgcttcaagcccatccactgcaccattacgtgtgacaagcatgctggcgagactgtcgcgaacgtcgtcacctcgctgcccttcatcgttcttggactgcaggctccaaggaagaacctgaacgccgctatctacgccaactccctggtcgggatgggagtagcgtcgagcctgtaccattcttccagaggaggaatccggaggctcctgcgttgggccgactacactatgattgccaccacaactctgtgtttgtcgagagcagtaggcaacgagaacccaagattgctcatggccgcttcagcgttgctcctgccgtttcagccactggtggtttcggctgtccacactggactcatggaggtttcatttgcgagaagagcgtcgatggaaccggagctcaggatggcgcataacctgcacaaggtgtcgtctctgctgggaggtgcgctgttcatcgccgacgactgcttcccggagactccctatatccacgccgcgtggcatcttgctgctgccatcggcgttggcacgtgcaacaagcttcttgaatgacaacagcccggcctccactcatgctgatatcaatgagcagttgatttcagcacctatcacgacctacgctacgtagaatgcacacagtatagcagcttgtcgacatttataacagaaaacaccatatgtctattatttgatagcctaggctgaactccttcgtctgacacatggtgtgggagggagtaacgtttgagaccatcttacaggcaatctgaaggtggtgaagatttgttaaagactgatccatttgcatctatgtcagtgcactgaggaaaattgtcaagacatcaacacccgatgaccaagtatttgcagttctacttcaagtatggtgtggatacagtttgcacattcttcatataaaggattttggcttttgagtcacggatcaaccacttgggcctgtgttaccaacatgtaggactcattctgattcacccagcttcttcgtgttaagtaaccctagttaaggttatgtgggcaaataccgactttgcccctgaggggtctcatatctctatataaggaacctgtacaccccttcataatacagagaagagaaagaggccagaggcccaaccctatatccagtgtctcgtgtgtttcctctgtcgtgtttatgggaagggagacggg

SEQ ID NO: 21805 - DNA, 1581 bp, Zea Mays
ctacttctactactactaccacacgcgcgcgcgatctcgcgctcacacacagagaacaggatcaggatcaggacagatgggagccgagaacggtagcaacaacccttcgtcgaccgtcttggatggcctctacggggtgcagctcggccgtccatcggatccggcacagaccgacggtggggcgtcgtcgtcaccagcagcttgtgaacaccaccacaagcgtggccgtggtggtacagcacaggcacagcagaggttgcagatccgaaggctatggcagcacagaccgtcttgcttcaagcccatccactgcaccattacgtgtgacaagcatgctggcgagactgtcgcgaacgtcgtcacctcgctgcccttcatcgttcttggactgcaggctccaaggaagaacctgaacgccgctatctacgccaactccctggtcgggatgggagtagcgtcgagcctgtaccattcttccagaggaggaatccggaggctcctgcgttgggccgactacactatgattgccaccacaactctggtaggtcgtcggcatcgaggatagctactagtcgagggattaattcgcacgtcgttcatgacaacaacaactatgtatgtacgtgttccacgcagtgtttgtcgagagcagtaggcaacgagaacccaagattgctcatggccgcttcagcgttgctcctgccgtttcagccactggtggtttcggctgtccacactggactcatggaggtttcatttgcgagaagagcgtcgatggaaccggagctcaggatggcgcataacctgcacaaggtgtcgtctctgctgggaggtgcgctgttcatcgccgacgactgcttcccggagactccctatatccacgccgcgtggcatcttgctgctgccatcggcgttggcacgtgcaacaagcttcttgaatgacaacagcccggcctccactcatgctgatatcaatgagcagttgatttcagcacctatcacgacctacgctacgtagaatgcacacagtatagcagcttgtcgacatttataacagaaaacaccatatgtctattatttgatagcctaggctgaactccttcgtctgacacatggtgtgggagggagtaacgtttgagaccatcttacaggcaatctgaaggtggtgaagatttgttaaagactgatccatttgcatctatgtcagtgcactgaggaaaattgtcaagacatcaacacccgatgaccaagtatttgcagttctacttcaagtatggtgtggatacagtttgcacattcttcatataaaggattttggcttttgagtcacggatcaaccacttgggcctgtgttaccaacatgtaggactcattctgattcacccagcttcttcgtgttaagtaaccctagttaaggttatgtgggcaaataccgactttgcccctgaggggtctcatatctctatataaggaacctgtacaccccttcataatacagagaagagaaagaggccagaggcccaaccctatatccagtgtctcgtgtgtttcctctgtcgtgtttatgggaagggagacggg

SEQ ID NO: 21806 - DNA, 1185 bp, Zea Mays
aagagggggaacagaccctagctttagcgctttcttttcagcttgtcacggacaaggcgtcgatgctggacgagatcgtcgactacgtcaagttccttcagctccaagtcaaggtgctgagcatgagccggctaggtggtgccgctgccgtcgcgccgctggtggccgacatgtcctcggagggtcgaggcggcgtggcggtcgcggccgggagcgatgatgggctggcggtgacggagcagcaggtggcgaagctgatggaggaggacatgggcaccgccatgcagtacctgcaagggaagggcctgtgcctcatgccggtctccctcgcctccgccatatcctccgcgacgtgccacatgcgacctccggtgggaggaccgggcctcggggtcgccgccgccgccgcgcaccacatggccgctatgcggttgccgccccacgccatgaacggcggcgccggagccggagccgacgccgtgccggcctcacccagcatgtccgtgctcacggcgcagtcggccatggcgcccaacggcgccgggggtgggactgatggcgagggctcgcactcgcagcagcagcagcggcatcatcccaaggacgccgcgtccgtgtcgaagccgtgatccgctcgtgaacgtgaaggcaacggccgccgtgacactaacggcgcaaccatgacatgacactcggagctgacaaagtgggctctttggcgggcccacccacgggctctcggcactgcagctggccctccgaccttcccccttttcgcattttattcccagtgtaaccattgtttttttttccttgtttaatattaatcccatgtattatcgattcgcaaatgcaaggctggttctcctctgcttgctttgcgccagctttaccctctcttttcccgccatccgcatcaacctttttctgttgctgccctcgctttggccacggcccgctgccagatttgtcctttgcggttggacggggaatttggtctcccagcttcggctgctgacccaattttattatgttttttatattctcccccgtgtatcttgctatatcttgtgtactctcggccccaccggtgaagaacaaaatgtgctggctgctgctggtattctagctcgctagggacttaagggatgcatcgatatatgatgcttggaattttaggttgtc

SEQ ID NO: 21807 - DNA, 2244 bp, Zea Mays
ctccattatacgaacagtgcaatctacagtgcagaacaacagctaaagtatggatagactactggacatggttttagtaacatccacaattataaaaaaaactaatatgatatgagcatatatatctctaaatagcgcatcacacaactagatcaaacaaagtgcataccacagataatctatatcatcaaccaaagtgtacaacgcagaaagtctatatcgtcatccatagtccatagcacaaaaaagccaaagcagaagacatgcaccatcatgtttccctcgcatccttctagttaccgttgcccttggccccaagagcgttgatgcctggggtgttagggttgcgcgatcgtcgccatcgtctgcgtggtataggctgtgaaggttgtcttaggagcatcctatggtccaatcttgtcgagaggaatcttaatgtcatcctcgtcctccttgtggctcgcaaacgcatctcgtgtcgtacgtgacgagccctgtgcaacggtgatagctccaagtcctagcgaggtgtcaccatggtgctgcagagtatgttgtatgttaactacggcgctaatcctgcaaccacaacgagcagcagcacaacgtaggcgacgtgatagcctctgttgttcaaaagctagttagccaccaaggtttcaacattaactttatagtgatgttagggtaatatttagtacttactgagagaaaggcaagtgtcctgtcgtcagaagtggtcttagagaaatgctcgatgtcgaccacagactgcatcatggagttgccctgcgcacaagataaaacatgagatagaaccaacaaaaggtatgacaatctatttacaaaaattaaaatagagaagaataagtaccactctatctaggattggtgcagcctccacgtgtgtcccatgccgagtaactaggtcataggatgtgtcttcgtcatctgaagactctagttcggcgtagtccgctgatgtccactggcccttcaacttgcaccgagttacaccgacataccaagagatgtactcgcgaaagttgtagttggtgtgggactgatcgctctggtagaggaggtcatgcatttggtcccattcgtcaatgtacacttggtggtgcgcctcaaagtcagtgatcttcttctgcttttggcggtcgaacctgaaaatgggaaacatctcttatgatattggattgcacatttcacataagagttagagaagaaagagaatgaagacacttacttgtggagttctaccgatgtcgagaagggctccacagggaactcctgacgtagaccgaactggcgtgctactctatgaggcaagtggtactcaacggcatagaaacaaatcagtggacaccttaataaataaatgtcttcatctgtcgtgcacgcggagctcaactgaatgtgtggcaacggtggctcatcatatggttgccagctaacctgaaaacagaaaaacatttgcaggttatatttatagggccaacgacatactaaccaagttaaaagacatactaaatacaaacaactcaccatcgacggtgtaagtgcgtccagctcgtttgagtactcgacgtaggcgcgctggtgacgtgcgaacggagcctggacctggtcccaacggtaagccgccgtcggtcgtagtcgcaagccgacgacgtcgaaccaaggtcgaggagcaaactcaatagggcgaccaaccggtaggtgcgaccacatccacaactggagtaggtacacgcaaccgcctaaacttgcgttctttgccgtccgacgacaagcctcacaaagttgtctgtacaggaaggatagcactgcagaagcccagctgtagcctcctgccatgtcccaatcagtgaggcaaggaaggaacatccaggacgcgctatcacccgtcgcgtctggaaaaaggacggagccaaacaagtgtaggacccaagctcggcagtagtagctaaccgtctggtcatctgctgcagctggacactccccgaacgactgcctaagccaggcgagagaaaccccagatgtgtggctacctggtgtgtctgtgggaacctcccttccaagaaaggcctcgactctctgtctccagccaccgggcgctgcctgaccggtcactggacgcccacgaatactgagaccaagttgcttctggctgtctcgcagtgtcacggtcatctcgccgcaaggaagatggaaagtgtgagtctccggccgccacct

SEQ ID NO: 21808 - DNA, 607 bp, Zea Mays
acgttacctatcgaccaaagctgtgatcgccgcaatgttgattgtgggcaacccgcggcgaacctggaacgatacgacgtccaagccagccctctcaaggagaggagtgtacctgtcgtcgtaccgcatgtctagaaacctgtcatgggtcctggaccgcagaacgggcaacacctagcaataagatttatttgattagacaaacggcagttacatttagtattctcaaatttaataaatggactcagccattacctgcccttctgcgatgagtcgtcccctatggtgctcgtcatagtgagggtccaacaagtggaactgtgttgtcctacaaaataagaaaaatataccgttagtacattgtaaaaatgtaaataattataacaacaattcagacgtacttggggcgagaagtaaagtggcactgcgacgaactcaaggcggggagcggcgaacgaggcgactatgcgcaagggccaagggtgaggttagggggcgaggcggcgagcaagcttagggtcgggacggtgtgggcgagcttgaggttgaggcaacgggcaagcttagggccgagacggtgtaggcgagctctaggcttagggcgtgg

SEQ ID NO: 21809 - DNA, 2600 bp, Zea Mays
cctccgtcaatccccgctccactgcctctgcttctccgccgcgtcagggtgtaaaactactcgaaccgatcaccgacgcgacgaaccccgaacccgaaccctccaagccggcaggccggagcagagcgcgctccaagctgaatccccccatctcctatcgccgtcgaaagccgcagatgaccgtgggtttcgggtacctgcgattggaggagcgtccttcaataagcctttcattgcatagtgcaaattttggcttgtttcggcctacatgagtttgcggatttggtgtatttgcaaatagcttgaaatggagctagatcttttctgctatgattatcgtatttttttcagccgatgacatacgcgacgctaggagtagcgtcaattgaagaaaagtttattcaacaccggttgagatggtttgggcatgtccatcggagatcaggcaccggtgcatagaggcatcataagacaggacactaatgtgaagagagaggtccattataactttttatgaccttgtctgggatggctgttgctttcaaagcaagtacaagttctgtcacacagcaacattggtcaagtccaacaaaggaccagtgtcaatatggtttcactcatttaagcaggcaaaagtgcagaaaaagagcactgtgtgtgacagctatatcagggaagctagacctagatttcactgatccttcttggaaccaaaagtaccaggaagactggaacaggcgttttagtttgccacatattaatgatatatatgatttggaaccaagaagaactacattctctttgaagaaaaacagaattcccctgggtgatggtgatggctcatcaactgatatgtggaacggttatgtaaataagaatgatagagcccttttgaaggtgataaagtatgcatctcctacttctgctggagctgagtgcattgatcctgattgtagctgggtggaacactgggttcatcgtgcaggtcctcgtaaggagatatattacgaacctgaagaagtaaaggctgccattgttacctgtggagggctctgtcctggtctaaatgatgtcattaggcagatagtatttactttggagacttatggggtgaagaatattgttggaatcccatttggttatcgtggattttttgagaaaggcttaaaagaaatgccgctctcgcgtgacgtggtggaaaacataaatctttctggaggaagtttcctaggagtctctcgtggaggagctaaaactagtgagattgtagatagcatacaagccagaagaattgacatgctatttgtaattggtggaaatggtagccatgcaggagctaatgctattcatgaggagtgtcgaaagagaaaactgaaagtttcagttgtagcagttccaaagacaattgataatgatatactttttatggataagacgtttggttttgatacagctgtagaagaagctcagcgtgctatcaattctgcctatatagaggcacgtagtgcataccacggaattgggttagtaaaattaatgggaagaagtagtggattcatagccatgcatgcttctctttccagtggacagattgatgtttgcctgatacctgaggtatccttcacacttgatggagaacatggtgtcttgcgacaccttgagcatttacttaatacaaagggattttgtgtggtttgtgttgctgaaggtgcagggcaggatttactgcaaaaatcaaatgcaactgacgcttcaggaaatgtgatacttagtgactttggtgtccacatgcagcagaagatcaagaagcatttcaaggacatcggtgttcccgctgatctaaaatacattgatccaacatatatggttcgggcctgccgggcaaatgcatctgatgctattctctgcaccgtacttgggcaaaatgctgtccatggagcatttgctgggttcagtggcatcacgtcaggtgtttgcaacacacattatgtctaccttcccatcacagaggtcattacaacaccaaagcacgtcaaccccaacagcagaatgtggcaccgctgcctcacatccactggccagccagacttccattgactacttcattaacacctgagagcaaggcgccaggagaatatttaatcccacaagggactgctaacaggaaacttgaataaatctggctaacccaaaattttgtgaggctggaggagctcataacgaaattgccagagccaccccctggtcatccagacgttgtaagcatgcataccctttctattggtttgcaatcccaagtgaaattaaaagttagaagttgtttgtgctgcaaacaattcaccataatcccaccagtacaaaactggctccagccttgtgagatgttttattgatgatgtactatgcataataggcaattggatattcttactgggaagtgcagtgatcagagatgagcttaggtgctgttccaatttggttgcagcgttttgatgtttgtggtgttcgtctcgggaggtcaagtattgtgaacttgtaattctcttcttgaaggtatgttacagcaaatagtgctcatgcctatagattagaaaaaaaaa

SEQ ID NO: 21810 - DNA, 1523 bp, Zea Mays
gggtacgcaagatttagccggtagcgggatgcaggatgggcttgctttgaggatagggcctgcgcagtgtcgaaagagaaaactgaaagtttcagttgtagcagttccaaagacaattgataatgatatactttttatggataagacgtttggttttgatacagctgtagaagaagctcagcgtgctatcaattctgcctatatagaggcacgtagtgcataccacggaattgggttagtaaaattaatgggaagaagtagtggattcatagccatgcatgcttctctttccagtggacagattgatgtttgcctgatacctgaggtatccttcacacttgatggagaacatggtgtcttgcgacaccttgagcatttacttaatacaaagggattttgtgtggtttgtgttgctgaaggtgcagggcaggatttactgcaaaaatcaaatgcaactgacgcttcaggaaatgtgatacttagtgactttggtgtccacatgcagcagaagatcaagaagcatttcaaggacatcggtgttcccgctgatctaaaatacattgatccaacatatatggttcgggcctgccgggcaaatgcatctgatgctattctctgcaccgtacttgggcaaaatgctgtccatggagcatttgctgggttcagtggcatcacgtcaggtgtttgcaacacacattatgtctaccttcccatcacagaggtcattacaacaccaaagcacgtcaaccccaacagcagaatgtggcaccgctgcctcacatccactggccagccagacttccattgactacttcattaacacctgagagcaaggcgccaggagaatatttaatcccacaagggactgctaacaggaaacttgaataaatctggctaacccaaaattttgtgaggctggaggagctcataacgaaattgccagagccaccccctggtcatccagacgttgcaattggatattcttactgggaagtgcagtgatcagagatgagcttaggtgctgttccaatttggttgcagcgttttgatgtttgtggtgttcgtctcgggaggtcaagtattgtgaacttgtaattctcttcttgaaggaggagacacaggcaagggtgatgacccttcgtctaggagtcgaaaggacagagaacgtgggaacgtgctcaacagtcacgtcccaagaagccctgtggaccaggagccgtagactaaaatgagtgtacatagtaactgcttatatcctgtaacacattcttctctgcgggcgcatggaagtggtgcactattcgcgaggattcagatggcttcgtgatctttctaggagggatcccgtcgtgaatgaaagatgttacattgggattatagattatgatggggtctcgatccatgattctcgggaaactcctaaattaggggatagaaatggagcaatttcttcccacgaggatgtaaatggggatagggacgtgaaagcattctccatccccgtttcccgtggggacccgtta

SEQ ID NO: 21811 - DNA, 1403 bp, Zea Mays
caagatttagccggtagcgggatgcaggatgggcttgctttgaggatagggcctgcgcagtgtcgaaagagaaaactgaaagtttcagttgtagcagttccaaagacaattgataatgatatactttttatggataagacgtttggttttgatacagctgtagaagaagctcagcgtgctatcaattctgcctatatagaggcacgtagtgcataccacggaattgggttagtaaaattaatgggaagaagtagtggattcatagccatgcatgcttctctttccagtggacagattgatgtttgcctgatacctgaggtatccttcacacttgatggagaacatggtgtcttgcgacaccttgagcatttacttaatacaaagggattttgtgtggtttgtgttgctgaaggtgcagggcagaaatgtatttttgtactcttggcacaggatttactgcaaaaatcaaatgcaactgacgcttcaggaaatgtgatacttagtgactttggtgtccacatgcagcagaagatcaagaagcatttcaaggacatcggtgttcccgctgatctaaaatacattgatccaacatatatggttcgggcctgccgggcaaatgcatctgatgctattctctgcaccgtacttgggcaaaatgctgtccatggagcatttgctgggttcagtggcatcacgtcaggtgtttgcaacacacattatgtctaccttcccatcacagaggtcattacaacaccaaagcacgtcaaccccaacagcagaatgtggcaccgctgcctcacatccactggccagccagacttccattgactacttcattaacacctgagagcaaggcgccaggagaatatttaatcccacaagggactgctaacaggaaacttgaataaatctggctaacccaaaattttgtgaggctggaggagctcataacgaaattgccagagccaccccctggtcatccagacgttgaggagacacaggcaagggtgatgacccttcgtctaggagtcgaaaggacagagaacgtgggaacgtgctcaacagtcacgtcccaagaagccctgtggaccaggagccgtagactaaaatgagtgtacatagtaactgcttatatcctgtaacacattcttctctgcgggcgcatggaagtggtgcactattcgcgaggattcagatggcttcgtgatctttctaggagggatcccgtcgtgaatgaaagatgttacattgggattatagattatgatggggtctcgatccatgattctcgggaaactcctaaattaggggatagaaatggagcaatttcttcccacgaggatgtaaatggggatagggacgtgaaagcattctccatccccgtttcccgtggggacccgtta

SEQ ID NO: 21812 - DNA, 4017 bp, Zea Mays
agccagagcctccccaggcacccagtcgctactctatctctcttctttctcctctcgtctccactctccactgcccgctcgatacgggcgggcacgactggtgccaagttgttttcttcgccctccccccttccgcggcgcgttgtagaaagcgagcggggggtagtaggatccatcggtaggtcgtcccatcccgtcgcaccgcccgctacatacgccgcggcgggtaccttgcttccgttcatggcatgtttgtctcggacggtgggttagccatggacgccggaggccgtgcgggcgtgagcggccccgccgcggcgaacggctcgttcggactcgtccgcaccgtggtggggtactccacctcgcccctcttcttctggctcctcaccgtcgcgctcgtcgccgccatccacatcgtctccggctcgtcctccaagcctgccaggaacaatgagacggaggagaggaagaaggcgcgccgcgataggttcctcccggccgccgaggaacgggaggcgtcgggcaggggagatgaccgggttctggagatgatgcgcagtttcagcttcatgcaggcgaccgaggaggatttcatggagggcatgaccgcatacgagcacaacggcgttggcgacggcacagcgcacgggcctgtcgcgccggagccgcctgcgctgacggcgactagcctcagcttcaggtttcagcaccagatgcccgaagttccaacggagacggcgctggtttcgagagaattcactgcggcaagacaagagacggcggtagtttcgagagaactgacagcagcgagagacgatgatggacgacaacgagaggaagagaaggaaccacactttcctttggaaccattcgctccgttgcagacggcggcagacatgcaagaacaccggcacgacgaagcagaggaaacagagttcctggcggaggagccggcagaagagcggagcggagaggttgcgcaggaggaggcagcgccacccaagaccgtcgcggccacgcacaactatcagttcctgactgagcgcgacttccgggggttcgtcagggagccggaggccgtgacggtgcgcgtccaggaatctttcgtgccgtcgccgcctccggcgcaccagcccgaggagcgacgggtggtcgacgtctcctcccgcagcggccggttcctcacggcgagggacttccggccggcgaacgagcccgacgtgtgcgagagcgtggcgtcgtccgggaagtggacgccgccgcctccgaggccgaggccgaagccgaagccgaagcctgcgagctccccgtccgctgcttccatgggcggcggcggcggcttcacgtcggagttctccggtttcggcgactcggactccgagtccagcgccagcgacggctactcggtgaaggatctcgtcgtcgactccgacagcgattggttcctctcagagaaggagttcccggcgtctgcacttggctccggcaacctcaaaacttacaaggccaaggtgctcagggcgatcgaagccatggaggcggcgtccaacctggagccgtcttaccaggaggactcagcgacgacagtgtcgccgagctcggtccggcagcgctcaccggacaccgttcccgatggttctcccaagttccctgaggacgtgtggtctcgcagcccttcgccggacgtcgagtacaaagaggacgaggaggaggtaacgagagaagctgaagcacagtatgatgaggacatcgaacagcgaagcacgggggaagaggaggagggcaagggcatcgacatgagcgatgacgagcactcgtcgggcggcaaggaggtagaatccgcaccaatctatgatctggctcctgttgctgacgactgtatggatcattcagagaaggggatcatcactctaaatgatcattcaggaggtcaagctgcttctgatgctcaaagaagtccagaggcagtctctgccagacaattagctgccgtaccatcagatcaagttgctggcccagtcaagagaagtccggagccaccggagcaggaatttgttggtatggttgatcattcactcgagcacagttcttacgaccggaaacaaactgccagcgaaagcgatcagtcatatgaaatagtatttgatgacaaaagaaggccgcagcgtgcagagacaggatttcttggtacgagcagcccctcacatgaactcgtttctgaagtttgggaagagatcgtcaccagaaacgatcaaccgcccctagggccccatgctgatgagcaaggcctggatacagcagaggaagagtatgtgggcacaggtgatcagccacatggtgcagtttctgatgagaagagcggtgcagagactccggagcaagaattcagccttaccgaccaccgaaacgtagcagttcctgacgccaggaacatctcggagaccagagaagatgaggaacaagccagtgcagatgatcattcggacaatgcagtcaccgggaaggcaaaggtatatgacgaagacggggaggaccgggaagcgaggtggaaggatctgacagacgaggaggaggacgagctggagtcgctgtgggagcaccaggatctggtagagcagctgaagctcgagctgaaaaaggttcggtcgtcggtcgggctgcccacgatcctcgaggagtcggacacaccaaaggctccggtggaggacctcaagccatggagtatggatgctaagttccttcgcgaggaccccatggacgagctgaacaagttctacaagagctacagggagaggatgaggaagttggacattttgtgctaccagaagatgtacgcaatagatttcctacagctcagagggtcccagcagtccaacaacaacaacaacaactctgtaaagtccttgtcgcctacggtggcgtccatcctgtcgcataacttccggtcatcgcgccggagatctcccgaggacccgtcggaacggttcctcagggagctccgctacgacctggagacggtgtacgtcgggcagatgtgcctgtcgtgggagttcctccggtggcagtacgagcaggcgcgcgacctcccggagtccgactcctaccacagccaccagtacaaccaggtggccggcgagttccagcagttccaggtcgtggtgcagaggttcgtggaggacgagtcgttcaaaggccctaggctgtcgaactacatcaacaaccggtgcgtcctccgcaacctgctgcaggtgcccgtgatcaaagcctgaaggacaggatggaggaccagcgcaaggggaactacgtgataaccagcgaggagctggaggacgtcatggaagaggcgatgcacgtcctgtgggagttcatcaaggccgacagggccgagacgacgacgacggcggcggcggcatcggtgctcaagggcctgtcgagcagcaacgtcgagctccaggaccctctggatcatggcctcatggcgcacatccattccgcgttacagaagaaagagaagaggctcaaggacctgctcaggacgggcaactgcatcgcgaagaagtttaagaagcccaaggaggacaggtccaaccagaacctcttcttctcgcaggtggacatgaagctggtggcgcgggtgctgaggatgcccaggatcaccagcgagcagctgcagtggtgcagggccaagctcgacaagatcgtactggtagataggaagatccacagggaggcttcatttttgttgtttccctgctgagagagagagagagagagtacagcatatatgttttcttctttttctcttgttcccttttgctcgatgaaaccagtccacgagtatagggtttctttagccttttggcaatccagtcttttacgcatgtctgtccatagttaccctgaaattacatccaccgcaatgtacatgcatactccattgcctcttcagtagaatgaaccgtcttcttttctgtcgctgaacaccgccgcgtgctgtggatgtgcagtgcaaag

SEQ ID NO: 21813 - DNA, 3894 bp, Zea Mays
agccagagcctccccaggcacccagtcgctactctatctctcttctttctcctctcgtctccactctccactgcccgctcgatacgggcgggcacgactggtgccaagttgttttcttcgccctccccccttccgcggcgcgttgtagaaagcgagcggggggtagtaggatccatcggtaggtcgtcccatcccgtcgcaccgcccgctacatacgccgcggcgggtaccttgcttccgttcatggcatgtttgtctcggacggtgggttagccatggacgccggaggccgtgcgggcgtgagcggccccgccgcggcgaacggctcgttcggactcgtccgcaccgtggtggggtactccacctcgcccctcttcttctggctcctcaccgtcgcgctcgtcgccgccatccacatcgtctccggctcgtcctccaagcctgccaggaacaatgagacggaggagaggaagaaggcgcgccgcgataggttcctcccggccgccgaggaacgggaggcgtcgggcaggggagatgaccgggttctggagatgatgcgcagtttcagcttcatgcaggcgaccgaggaggatttcatggagggcatgaccgcatacgagcacaacggcgttggcgacggcacagcgcacgggcctgtcgcgccggagccgcctgcgctgacggcgactagcctcagcttcaggtttcagcaccagatgcccgaagttccaacggagacggcgctggtttcgagagaattcactgcggcaagacaagagacggcggtagtttcgagagaactgacagcagcgagagacgatgatggacgacaacgagaggaagagaaggaaccacactttcctttggaaccattcgctccgttgcagacggcggcagacatgcaagaacaccggcacgacgaagcagaggaaacagagttcctggcggaggagccggcagaagagcggagcggagaggttgcgcaggaggaggcagcgccacccaagaccgtcgcggccacgcacaactatcagttcctgactgagcgcgacttccgggggttcgtcagggagccggaggccgtgacggtgcgcgtccaggaatctttcgtgccgtcgccgcctccggcgcaccagcccgaggagcgacgggtggtcgacgtctcctcccgcagcggccggttcctcacggcgagggacttccggccggcgaacgagcccgacgtgtgcgagagcgtggcgtcgtccgggaagtggacgccgccgcctccgaggccgaggccgaagccgaagccgaagcctgcgagctccccgtccgctgcttccatgggcggcggcggcggcttcacgtcggagttctccggtttcggcgactcggactccgagtccagcgccagcgacggctactcggtgaaggatctcgtcgtcgactccgacagcgattggttcctctcagagaaggagttcccggcgtctgcacttggctccggcaacctcaaaacttacaaggccaaggtgctcagggcgatcgaagccatggaggcggcgtccaacctggagccgtcttaccaggaggactcagcgacgacagtgtcgccgagctcggtccggcagcgctcaccggacaccgttcccgatggttctcccaagttccctgaggacgtgtggtctcgcagcccttcgccggacgtcgagtacaaagaggacgaggaggaggtaacgagagaagctgaagcacagtatgatgaggacatcgaacagcgaagcacgggggaagaggaggagggcaagggcatcgacatgagcgatgacgagcactcgtcgggcggcaaggaggaggtcaagctgcttctgatgctcaaagaagtccagaggcagtctctgccagacaattagctgccgtaccatcagatcaagttgctggcccagtcaagagaagtccggagccaccggagcaggaatttgttggtatggttgatcattcactcgagcacagttcttacgaccggaaacaaactgccagcgaaagcgatcagtcatatgaaatagtatttgatgacaaaagaaggccgcagcgtgcagagacaggatttcttgtttgggaagagatcgtcaccagaaacgatcaaccgcccctagggccccatgctgatgagcaaggcctggatacagcagaggaagagtatgtgggcacaggtgatcagccacatggtgcagtttctgatgagaagagcggtgcagagactccggagcaagaattcagccttaccgaccaccgaaacgtagcagttcctgacgccaggaacatctcggagaccagagaagatgaggaacaagccagtgcagatgatcattcggacaatgcagtcaccgggaaggcaaaggtatatgacgaagacggggaggaccgggaagcgaggtggaaggatctgacagacgaggaggaggacgagctggagtcgctgtgggagcaccaggatctggtagagcagctgaagctcgagctgaaaaaggttcggtcgtcggtcgggctgcccacgatcctcgaggagtcggacacaccaaaggctccggtggaggacctcaagccatggagtatggatgctaagttccttcgcgaggaccccatggacgagctgaacaagttctacaagagctacagggagaggatgaggaagttggacattttgtgctaccagaagatgtacgcaatagatttcctacagctcagagggtcccagcagtccaacaacaacaacaacaactctgtaaagtccttgtcgcctacggtggcgtccatcctgtcgcataacttccggtcatcgcgccggagatctcccgaggacccgtcggaacggttcctcagggagctccgctacgacctggagacggtgtacgtcgggcagatgtgcctgtcgtgggagttcctccggtggcagtacgagcaggcgcgcgacctcccggagtccgactcctaccacagccaccagtacaaccaggtggccggcgagttccagcagttccaggtcgtggtgcagaggttcgtggaggacgagtcgttcaaaggccctaggctgtcgaactacatcaacaaccggtgcgtcctccgcaacctgctgcaggtgcccgtgatcaaagaggacagcctgaaggacaggatggaggaccagcgcaaggggaactacgtgataaccagcgaggagctggaggacgtcatggaagaggcgatgcacgtcctgtgggagttcatcaaggccgacagggccgagacgacgacgacggcggcggcggcatcggtgctcaagggcctgtcgagcagcaacgtcgagctccaggaccctctggatcatggcctcatggcgcacatccattccgcgttacagaagaaagagaagaggctcaaggacctgctcaggacgggcaactgcatcgcgaagaagtttaagaagcccaaggaggacaggtccaaccagaacctcttcttctcgcaggtggacatgaagctggtggcgcgggtgctgaggatgcccaggatcaccagcgagcagctgcagtggtgcagggccaagctcgacaagatcgtactggtagataggaagatccacagggaggcttcatttttgttgtttccctgctgagagagagagagagagagtacagcatatatgttttcttctttttctcttgttcccttttgctcgatgaaaccagtccacgagtatagggtttctttagccttttggcaatccagtcttttacgcatgtctgtccatagttaccctgaaattacatccaccgcaatgtacatgcatactccattgcctcttcagtagaatgaaccgtcttcttttctgtcgctgaacaccgccgcgtgctgtggatgtgcagtgcaaag

SEQ ID NO: 21814 - DNA, 3926 bp, Zea Mays
ccaggcacccagtcgctactctatctctcttctttctcctctcgtctccactctccactgcccgctcgatacgggcgggcacgactggtgccaagttgttttcttcgccctccccccttccgcggcgcgttgtagaaagcgagcggggggtagtaggatccatcggtaggtcgtcccatcccgtcgcaccgcccgctacatacgccgcggcgggtaccttgcttccgttcatggcatgtttgtctcggacggtgggttagccatggacgccggaggccgtgcgggcgtgagcggccccgccgcggcgaacggctcgttcggactcgtccgcaccgtggtggggtactccacctcgcccctcttcttctggctcctcaccgtcgcgctcgtcgccgccatccacatcgtctccggctcgtcctccaagcctgccaggaacaatgagacggaggagaggaagaaggcgcgccgcgataggttcctcccggccgccgaggaacgggaggcgtcgggcaggggagatgaccgggttctggagatgatgcgcagtttcagcttcatgcaggcgaccgaggaggatttcatggagggcatgaccgcatacgagcacaacggcgttggcgacggcacagcgcacgggcctgtcgcgccggagccgcctgcgctgacggcgactagcctcagcttcaggtttcagcaccagatgcccgaagttccaacggagacggcgctggtttcgagagaattcactgcggcaagacaagagacggcggtagtttcgagagaactgacagcagcgagagacgatgatggacgacaacgagaggaagagaaggaaccacactttcctttggaaccattcgctccgttgcagacggcggcagacatgcaagaacaccggcacgacgaagcagaggaaacagagttcctggcggaggagccggcagaagagcggagcggagaggttgcgcaggaggaggcagcgccacccaagaccgtcgcggccacgcacaactatcagttcctgactgagcgcgacttccgggggttcgtcagggagccggaggccgtgacggtgcgcgtccaggaatctttcgtgccgtcgccgcctccggcgcaccagcccgaggagcgacgggtggtcgacgtctcctcccgcagcggccggttcctcacggcgagggacttccggccggcgaacgagcccgacgtgtgcgagagcgtggcgtcgtccgggaagtggacgccgccgcctccgaggccgaggccgaagccgaagccgaagcctgcgagctccccgtccgctgcttccatgggcggcggcggcggcttcacgtcggagttctccggtttcggcgactcggactccgagtccagcgccagcgacggctactcggtgaaggatctcgtcgtcgactccgacagcgattggttcctctcagagaaggagttcccggcgtctgcacttggctccggcaacctcaaaacttacaaggccaaggtgctcagggcgatcgaagccatggaggcggcgtccaacctggagccgtcttaccaggaggactcagcgacgacagtgtcgccgagctcggtccggcagcgctcaccggacaccgttcccgatggttctcccaagttccctgaggacgtgtggtctcgcagcccttcgccggacgtcgagtacaaagaggacgaggaggaggtaacgagagaagctgaagcacagtatgatgaggacatcgaacagcgaagcacgggggaagaggaggagggcaagggcatcgacatgagcgatgacgagcactcgtcgggcggcaaggaggaggtcaagctgcttctgatgctcaaagaagtccagaggcagtctctgccagacaattagctgccgtaccatcagatcaagttgctggcccagtcaagagaagtccggagccaccggagcaggaatttgttggtatggttgatcattcactcgagcacagttcttacgaccggaaacaaactgccagcgaaagcgatcagtcatatgaaatagtatttgatgacaaaagaaggccgcagcgtgcagagacaggatttcttgtttgggaagagatcgtcaccagaaacgatcaaccgcccctagggccccatgctgatgagcaaggcctggatacagcagaggaagagtatgtgggcacaggtgatcagccacatggtgcagtttctgatgagaagagcggtgcagagactccggagcaagaattcagccttaccgaccaccgaaacgtagcagttcctgacgccaggaacatctcggagaccagagaagatgaggaacaagccagtgcagatgatcattcggacaatgcagtcaccgggaaggcaaaggtatatgacgaagacggggaggaccgggaagcgaggtggaaggatctgacagacgaggaggaggacgagctggagtcgctgtgggagcaccaggatctggtagagcagctgaagctcgagctgaaaaaggttcggtcgtcggtcgggctgcccacgatcctcgaggagtcggacacaccaaaggctccggtggaggacctcaagccatggagtatggatgctaagttccttcgcgaggaccccatggacgagctgaacaagttctacaagagctacagggagaggatgaggaagttggacattttgtgctaccagaagatgtacgcaatagatttcctacagctcagagggtcccagcagtccaacaacaacaacaacaactctgtaaagtccttgtcgcctacggtggcgtccatcctgtcgcataacttccggtcatcgcgccggagatctcccgaggacccgtcggaacggttcctcagggagctccgctacgacctggagacggtgtacgtcgggcagatgtgcctgtcgtgggagttcctccggtggcagtacgagcaggcgcgcgacctcccggagtccgactcctaccacagccaccagtacaaccaggtggccggcgagttccagcagttccaggtcgtggtgcagaggttcgtggaggacgagtcgttcaaaggccctaggctgtcgaactacatcaacaaccggtgcgtcctccgcaacctgctgcaggtgcccgtgatcaaagacgcgctgaccgtagcaatgcatgcacttccgggctgttgtgtagaggacagcctgaaggacaggatggaggaccagcgcaaggggaactacgtgataaccagcgaggagctggaggacgtcatggaagaggcgatgcacgtcctgtgggagttcatcaaggccgacagggccgagacgacgacgacggcggcggcggcatcggtgctcaagggcctgtcgagcagcaacgtcgagctccaggaccctctggatcatggcctcatggcgcacatccattccgcgttacagaagaaagagaagaggctcaaggacctgctcaggacgggcaactgcatcgcgaagaagtttaagaagcccaaggaggacaggtccaaccagaacctcttcttctcgcaggtggacatgaagctggtggcgcgggtgctgaggatgcccaggatcaccagcgagcagctgcagtggtgcagggccaagctcgacaagatcgtactggtagataggaagatccacagggaggcttcatttttgttgtttccctgctgagagagagagagagagagtacagcatatatgttttcttctttttctcttgttcccttttgctcgatgaaaccagtccacgagtatagggtttctttagccttttggcaatccagtcttttacgcatgtctgtccatagttaccctgaaattacatccaccgcaatgtacatgcatactccattgcctcttcagtagaatgaaccgtcttcttttctgtcgctgaacaccgccgcgtgctgtggatgtgcagtgcaaag

SEQ ID NO: 21815 - DNA, 3942 bp, Zea Mays
cttctttctcctctcgtctccactctccactgcccgctcgatacgggcgggcacgactggtgccaagttgttttcttcgccctccccccttccgcggcgcgttgtagaaagcgagcggggggtagtaggatccatcggtaggtcgtcccatcccgtcgcaccgcccgctacatacgccgcggcgggtaccttgcttccgttcatggcatgtttgtctcggacggtgggttagccatggacgccggaggccgtgcgggcgtgagcggccccgccgcggcgaacggctcgttcggactcgtccgcaccgtggtggggtactccacctcgcccctcttcttctggctcctcaccgtcgcgctcgtcgccgccatccacatcgtctccggctcgtcctccaagcctgccaggaacaatgagacggaggagaggaagaaggcgcgccgcgataggttcctcccggccgccgaggaacgggaggcgtcgggcaggggagatgaccgggttctggagatgatgcgcagtttcagcttcatgcaggcgaccgaggaggatttcatggagggcatgaccgcatacgagcacaacggcgttggcgacggcacagcgcacgggcctgtcgcgccggagccgcctgcgctgacggcgactagcctcagcttcaggtttcagcaccagatgcccgaagttccaacggagacggcgctggtttcgagagaattcactgcggcaagacaagagacggcggtagtttcgagagaactgacagcagcgagagacgatgatggacgacaacgagaggaagagaaggaaccacactttcctttggaaccattcgctccgttgcagacggcggcagacatgcaagaacaccggcacgacgaagcagaggaaacagagttcctggcggaggagccggcagaagagcggagcggagaggttgcgcaggaggaggcagcgccacccaagaccgtcgcggccacgcacaactatcagttcctgactgagcgcgacttccgggggttcgtcagggagccggaggccgtgacggtgcgcgtccaggaatctttcgtgccgtcgccgcctccggcgcaccagcccgaggagcgacgggtggtcgacgtctcctcccgcagcggccggttcctcacggcgagggacttccggccggcgaacgagcccgacgtgtgcgagagcgtggcgtcgtccgggaagtggacgccgccgcctccgaggccgaggccgaagccgaagccgaagcctgcgagctccccgtccgctgcttccatgggcggcggcggcggcttcacgtcggagttctccggtttcggcgactcggactccgagtccagcgccagcgacggctactcggtgaaggatctcgtcgtcgactccgacagcgattggttcctctcagagaaggagttcccggcgtctgcacttggctccggcaacctcaaaacttacaaggccaaggtgctcagggcgatcgaagccatggaggcggcgtccaacctggagccgtcttaccaggaggactcagcgacgacagtgtcgccgagctcggtccggcagcgctcaccggacaccgttcccgatggttctcccaagttccctgaggacgtgtggtctcgcagcccttcgccggacgtcgagtacaaagaggacgaggaggaggtaacgagagaagctgaagcacagtatgatgaggacatcgaacagcgaagcacgggggaagaggaggagggcaagggcatcgacatgagcgatgacgagcactcgtcgggcggcaaggaggtagaatccgcaccaatctatgatctggctcctgttgctgacgactgtatggatcattcagagaaggggatcatcactctaaatgatcattcaggaggtcaagctgcttctgatgctcaaagaagtccagaggcagtctctgccagacaattagctgccgtaccatcagatcaagttgctggcccagtcaagagaagtccggagccaccggagcaggaatttgttggtatggttgatcattcactcgagcacagttcttacgaccggaaacaaactgccagcgaaagcgatcagtcatatgaaatagtatttgatgacaaaagaaggccgcagcgtgcagagacaggatttcttggtacgagcagcccctcacatgaactcgtttctgaagtttgggaagagatcgtcaccagaaacgatcaaccgcccctagggccccatgctgatgagcaaggcctggatacagcagaggaagagtatgtgggcacaggtgatcagccacatggtgcagtttctgatgagaagagcggtgcagagactccggagcaagaattcagccttaccgaccaccgaaacgtagcagttcctgacgccaggaacatctcggagaccagagaagatgaggaacaagccagtgcagatgatcattcggacaatgcagtcaccgggaaggcaaaggtatatgacgaagacggggaggaccgggaagcgaggtggaaggatctgacagacgaggaggaggacgagctggagtcgctgtgggagcaccaggatctggtagagcagctgaagctcgagctgaaaaaggttcggtcgtcggtcgggctgcccacgatcctcgaggagtcggacacaccaaaggctccggtggaggacctcaagccatggagtatggatgctaagttccttcgcgaggaccccatggacgagctgaacaagttctacaagagctacagggagaggatgaggaagttggacattttgtgctaccagaagatgtacgcaatagatttcctacagctcagagggtcccagcagtccaacaacaacaacaacaactctgtaaagtccttgtcgcctacggtggcgtccatcctgtcgcataacttccggtcatcgcgccggagatctcccgaggacccgtcggaacggttcctcagggagctccgctacgacctggagacggtgtacgtcgggcagatgtgcctgtcgtgggagttcctccggtggcagtacgagcaggcgcgcgacctcccggagtccgactcctaccacagccaccagtacaaccaggtggccggcgagttccagcagttccaggtcgtggtgcagaggttcgtggaggacgagtcgttcaaaggccctaggctgtcgaactacatcaacaaccgaggacagcctgaaggacaggatggaggaccagcgcaaggggaactacgtgataaccagcgaggagctggaggacgtcatggaagaggcgatgcacgtcctgtgggagttcatcaaggccgacagggccgagacgacgacgacggcggcggcggcatcggtgctcaagggcctgtcgagcagcaacgtcgagctccaggaccctctggatcatggcctcatggcgcacatccattccgcgttacagaagaaagagaagaggctcaaggacctgctcaggacgggcaactgcatcgcgaagaagtttaagaagcccaaggaggacaggtccaaccagaacctcttcttctcgcaggtggacatgaagctggtggcgcgggtgctgaggatgcccaggatcaccagcgagcagctgcagtggtgcagggccaagctcgacaagatcgtactggtagataggaagatccacagggaggcttcatttttgttgtttccctgctgagagagagagagagagagtacagcatatatgttttcttctttttctcttgttcccttttgctcgatgaaaccagtccacgagtatagggtttctttagccttttggcaatccagtcttttacgcatgtctgtccatagttaccctgaaattacatccaccgcaatgtacatgcatactccattgcctcttcagtagaatgaaccgtcttcttttctgtcgctgaacaccgccgcgtgctgtggatgtgcagtgcaaag

SEQ ID NO: 21816 - DNA, 4000 bp, Zea Mays
ctccactctccactgcccgctcgatacgggcgggcacgactggtgccaagttgttttcttcgccctccccccttccgcggcgcgttgtagaaagcgagcggggggtagtaggatccatcggtaggtcgtcccatcccgtcgcaccgcccgctacatacgccgcggcgggtaccttgcttccgttcatggcatgtttgtctcggacggtgggttagccatggacgccggaggccgtgcgggcgtgagcggccccgccgcggcgaacggctcgttcggactcgtccgcaccgtggtggggtactccacctcgcccctcttcttctggctcctcaccgtcgcgctcgtcgccgccatccacatcgtctccggctcgtcctccaagcctgccaggaacaatgagacggaggagaggaagaaggcgcgccgcgataggttcctcccggccgccgaggaacgggaggcgtcgggcaggggagatgaccgggttctggagatgatgcgcagtttcagcttcatgcaggcgaccgaggaggatttcatggagggcatgaccgcatacgagcacaacggcgttggcgacggcacagcgcacgggcctgtcgcgccggagccgcctgcgctgacggcgactagcctcagcttcaggtttcagcaccagatgcccgaagttccaacggagacggcgctggtttcgagagaattcactgcggcaagacaagagacggcggtagtttcgagagaactgacagcagcgagagacgatgatggacgacaacgagaggaagagaaggaaccacactttcctttggaaccattcgctccgttgcagacggcggcagacatgcaagaacaccggcacgacgaagcagaggaaacagagttcctggcggaggagccggcagaagagcggagcggagaggttgcgcaggaggaggcagcgccacccaagaccgtcgcggccacgcacaactatcagttcctgactgagcgcgacttccgggggttcgtcagggagccggaggccgtgacggtgcgcgtccaggaatctttcgtgccgtcgccgcctccggcgcaccagcccgaggagcgacgggtggtcgacgtctcctcccgcagcggccggttcctcacggcgagggacttccggccggcgaacgagcccgacgtgtgcgagagcgtggcgtcgtccgggaagtggacgccgccgcctccgaggccgaggccgaagccgaagccgaagcctgcgagctccccgtccgctgcttccatgggcggcggcggcggcttcacgtcggagttctccggtttcggcgactcggactccgagtccagcgccagcgacggctactcggtgaaggatctcgtcgtcgactccgacagcgattggttcctctcagagaaggagttcccggcgtctgcacttggctccggcaacctcaaaacttacaaggccaaggtgctcagggcgatcgaagccatggaggcggcgtccaacctggagccgtcttaccaggaggactcagcgacgacagtgtcgccgagctcggtccggcagcgctcaccggacaccgttcccgatggttctcccaagttccctgaggacgtgtggtctcgcagcccttcgccggacgtcgagtacaaagaggacgaggaggaggtaacgagagaagctgaagcacagtatgatgaggacatcgaacagcgaagcacgggggaagaggaggagggcaagggcatcgacatgagcgatgacgagcactcgtcgggcggcaaggaggtagaatccgcaccaatctatgatctggctcctgttgctgacgactgtatggatcattcagagaaggggatcatcactctaaatgatcattcaggaggtcaagctgcttctgatgctcaaagaagtccagaggcagtctctgccagacaattagctgccgtaccatcagatcaagttgctggcccagtcaagagaagtccggagccaccggagcaggaatttgttggtatggttgatcattcactcgagcacagttcttacgaccggaaacaaactgccagcgaaagcgatcagtcatatgaaatagtatttgatgacaaaagaaggccgcagcgtgcagagacaggatttcttggtacgagcagcccctcacatgaactcgtttctgaagtttgggaagagatcgtcaccagaaacgatcaaccgcccctagggccccatgctgatgagcaaggcctggatacagcagaggaagagtatgtgggcacaggtgatcagccacatggtgcagtttctgatgagaagagcggtgcagagactccggagcaagaattcagccttaccgaccaccgaaacgtagcagttcctgacgccaggaacatctcggagaccagagaagatgaggaacaagccagtgcagatgatcattcggacaatgcagtcaccgggaaggcaaaggtatatgacgaagacggggaggaccgggaagcgaggtggaaggatctgacagacgaggaggaggacgagctggagtcgctgtgggagcaccaggatctggtagagcagctgaagctcgagctgaaaaaggttcggtcgtcggtcgggctgcccacgatcctcgaggagtcggacacaccaaaggctccggtggaggacctcaagccatggagtatggatgctaagttccttcgcgaggaccccatggacgagctgaacaagttctacaagagctacagggagaggatgaggaagttggacattttgtgctaccagaagatatttcctacagctcagagggtcccagcagtccaacaacaacaacaacaactctgtaaagtccttgtcgcctacggtggcgtccatcctgtcgcataacttccggtcatcgcgccggagatctcccgaggacccgtcggaacggttcctcagggagctccgctacgacctggagacggtgtacgtcgggcagatgtgcctgtcgtgggagttcctccggtggcagtacgagcaggcgcgcgacctcccggagtccgactcctaccacagccaccagtacaaccaggtggccggcgagttccagcagttccaggtcgtggtgcagaggttcgtggaggacgagtcgttcaaaggccctaggctgtcgaactacatcaacaaccggtgcgtcctccgcaacctgctgcaggtgcccgtgatcaaagacgcgctgaccgtagcaatgcatgcacttccgggctgttgtgtagaggacagcctgaaggacaggatggaggaccagcgcaaggggaactacgtgataaccagcgaggagctggaggacgtcatggaagaggcgatgcacgtcctgtgggagttcatcaaggccgacagggccgagacgacgacgacggcggcggcggcatcggtgctcaagggcctgtcgagcagcaacgtcgagctccaggaccctctggatcatggcctcatggcgcacatccattccgcgttacagaagaaagagaagaggctcaaggacctgctcaggacgggcaactgcatcgcgaagaagtttaagaagcccaaggaggacaggtccaaccagaacctcttcttctcgcaggtggacatgaagctggtggcgcgggtgctgaggatgcccaggatcaccagcgagcagctgcagtggtgcagggccaagctcgacaagatcgtactggtagataggaagatccacagggaggcttcatttttgttgtttccctgctgagagagagagagagagagtacagcatatatgttttcttctttttctcttgttcccttttgctcgatgaaaccagtccacgagtatagggtttctttagccttttggcaatccagtcttttacgcatgtctgtccatagttaccctgaaattacatccaccgcaatgtacatgcatactccattgcctcttcagtagaatgaaccgtcttcttttctgtcgctgaacaccgccgcgtgctgtggatgtgcagtgcaaag

SEQ ID NO: 21817 - DNA, 1209 bp, Zea Mays
agaattcaactctaatatattccggactaaaaggttttgttgttgatgactgacaattcaggcgatagttcaatttttgacattgtggagatcatagaacccagatgtctctgttacaaaatatattatatacacatcccgttagtcccgggacgacatgcaaaatgcactagccaactcgcacgaacacgcaagtacattaatgacaggaaacttgggcagaaattatctgcttctgcactagacagccataaatccttgggtaacccatggaaataatcgatcggcggcggccacagccactcctagatagatgtaattatggttgtggtggttcatgctgtggtgtggccggggagtccggtgcgatggtgaaatgcactccccttccttggcctgactgcaggatgaatgccacctccgctgcagctagagcagctgcctcctggacagacaccatacgtaattagggatttatataaaaggccctagagctgaaccagatgcagtaaatagcagtaacaaggaagcacggaaggtgatgcagagtttcattctcaaactgaattttcattaaacaaaaaaaaaatcgaccagtagggaaaagattgcctccagtcctccacagtaattatattaagttcaattgaagccccgaccgagaaaggtcacgaaagctagccccccgtgcagcatgagggtccaccccttatagatcggatctttactcatgctttgagccctcccaggctatcacaaggatccactctccataggtcagttcatctgatatgcacacaactaggggaaccagcgagtgaccttttttagcctcaacctgaaattcgcacccactagaattcgaactcaggagtgctactcagaacatctaaccaactcagataaatgccgtttcgcgaattttcatcaaatcagtttccaaattattcgatcgcacaggttacaaccaagtgtcagcttcaaccatgtttagacaattaatcaataattcactaataaagattcaataggttgcatagtttagttcctgatcttgattttcatgacgagcatgacacgtcaaattcaaactactagtgaagtattaaatatgtcaactcaatttcaaagtattcggtgtatggcaagaaatacgttaggtgttcccggaaccttcaaaaaataagaaaaggaagatgcaaatattca

SEQ ID NO: 21818 - DNA, 1166 bp, Zea Mays
gcggaaaacaggtggaggccgttgcaactgcacacacatccaactccggctccatgccgctccaacccaagcagccagcagctgcagcctgccctcctctccgactccaacccaatccaatggctctccgcccctgttgtctcacctcacgcgctctctgccctgatctgccgccaggcgccagaacgacgcgctgctccgcaccgcgtcaggtagaatggtagatggaccatggacgatatcgcttgggagcggggaaggaacgcagacgactcttcccgtgccgtgctgacgccaccacgcggccccggtctcctctcgccctcctctccgtctggatctggtcctatcccctccgccgccgtccttgccctcccggcctcagccacgagccagagcgccgggctcctggcctcgtctcgcctcgccggcgacatggacggaggcggggagacgctgctggtgcggaggagcaagggcaagaagagaccgcagccggcggcgcccgcggaggagggctccggcagcgggggcagacacattacaggttgaagaagcaggctcggtacatgccatctccattgggaagcaataaggctgcagcgttagccgatcatggtgcaggggacccaagtgccttctaccagcaaaaactcaaaacttgacttgaatcaagactctgttctggcaagtgatggagttcatgaatcgacataaaatgtacaagagaagtgtttttatggcaattaaaagggttttcttgtctgcagaatgatggcatccataagtcgaaaagtttgatcaggtctcaaattatcagtttgtagggataaaggaaactctcctgcaattgaaggtaagaggacggttccatggcaagaccggctagcgttgaaggccgaggccctcagttgatttggccaagaaataagctgcttctctgatagctggctttgcaacagtatccctcagatgcacagtaatgctttgtatagaacaataggacacgatagttatatacatgatacattgcctaattgacaaactcagatggttgcaccatgctcctaagcaagttagacaaataaactgtgattttatgaatggttctgtccagattttggattgactgctttgaacatgccaaatgctttagcatgaacaag

SEQ ID NO: 21819 - DNA, 1734 bp, Zea Mays
aacaggtggaggccgttgcaactgcacacacatccaactccggctccatgccgctccaacccaagcagccagcagctgcagcctgccctcctctccgactccaacccaatccaatggctctccgcccctgttgtctcacctcacgcgctctctgccctgatctgccgccaggcgccagaacgacgcgctgctccgcaccgcgtcaggtagaatggtagatggaccatggacgatatcgcttgggagcggggaaggaacgcagacgactcttcccgtgccgtgctgacgccaccacgcggccccggtctcctctcgccctcctctccgtctggatctggtcctatcccctccgccgccgtccttgccctcccggcctcagccacgagccagagcgccgggctcctggcctcgtctcgcctcgccggcgacatggacggaggcggggagacgctgctggtgcggaggagcaagggcaagaagagaccgcagccggcggcgcccgcggaggagggctccggcagcgggggcaggttccgcgcgatctggcgggactaccacgacctgctgcaggtgagtgtcgctagtcgattcttgctgcacccactgatctatttcgccctttccagttttcgtgccgttcacctgtttcgacctgttcttgatggaccgcaagggcactgcccccattttcattacgaaatggtaaaaagtcttacaacccagaaagcaagttcgaccagagatatgaggcttagcataaacctgcatactcaacatgcaacggattaacttaggttcaaaataccagacgatgataggagtaagcacacaaagtactaggaccaactgaatactgctcataatactcagacttgacacctcgcactacttcaaaaacaaccaagacttttaaaactgagctaattataaagcacagtttgcacaggttcgatctgatcatcaaagccaccggagaaacttcaacttacatcttgaaaacgccagaatcatccaagaactccatccaatagcatggtcatgtgtgtgaatagacttgaatctgatatacaaacatttgatgcaggagactgaggcaaagaggaagaggctggcaagcacgaagcggagaagcctcgccttgcttgctgaagtcaagttcttgagaaggaagtaccagtcctttctgaggggtggctcgcagcagacacattacaggttgaagaagcaggctcggtacatgccatctccattgggaagcaataaggctgcagcgttagccgatcatggtgcaggggacccaagtgccttctaccagcaaaaactcaaaacttgacttgaatcaagactctgttctggcaagtgatggagttcatgaatcgacataaaattttgtagggataaaggaaactctcctgcaattgaaggtaagaggacggttccatggcaagaccggctagcgttgaaggccgaggccctcagttgatttggccaagaaataagctgcttctctgatagctggctttgcaacagtatccctcagatgcacagtaatgctttgtatagaacaataggacacgatagttatatacatgatacattgcctaattgacaaactcagatggttgcaccatgctcctaagcaagttagacaaataaactgtgattttatgaatggttctgtccagattttggattgactgctttgaacatgccaaatgctttagcatgaacaag

SEQ ID NO: 21820 - DNA, 1751 bp, Zea Mays
aacaggtggaggccgttgcaactgcacacacatccaactccggctccatgccgctccaacccaagcagccagcagctgcagcctgccctcctctccgactccaacccaatccaatggctctccgcccctgttgtctcacctcacgcgctctctgccctgatctgccgccaggcgccagaacgacgcgctgctccgcaccgcgtcaggtagaatggtagatggaccatggacgatatcgcttgggagcggggaaggaacgcagacgactcttcccgtgccgtgctgacgccaccacgcggccccggtctcctctcgccctcctctccgtctggatctggtcctatcccctccgccgccgtccttgccctcccggcctcagccacgagccagagcgccgggctcctggcctcgtctcgcctcgccggcgacatggacggaggcggggagacgctgctggtgcggaggagcaagggcaagaagagaccgcagccggcggcgcccgcggaggagggctccggcagcgggggcaggttccgcgcgatctggcgggactaccacgacctgctgcaggtgagtgtcgctagtcgattcttgctgcacccactgatctatttcgccctttccagttttcgtgccgttcacctgtttcgacctgttcttgatggaccgcaagggcactgcccccattttcattacgaaatggtaaaaagtcttacaacccagaaagcaagttcgaccagagatatgaggcttagcataaacctgcatactcaacatgcaacggattaacttaggttcaaaataccagacgatgataggagtaagcacacaaagtactaggaccaactgaatactgctcataatactcagacttgacacctcgcactacttcaaaaacaaccaagacttttaaaactgagctaattataaagcacagtttgcacaggttcgatctgatcatcaaagccaccggagaaacttcaacttacatcttgaaaacgccagaatcatccaagaactccatccaatagcatggtcatgtgtgtgaatagacttgaatctgatatacaaacatttgatgcaggagactgaggcaaagaggaagaggctggcaagcacgaagcggagaagcctcgccttgcttgctgaagtcaagttcttgagaaggaagtaccagtcctttctgaggggtggctcgcagcagacacattacaggttgaagaagcaggctcggtacatgccatctccattgggaagcaataaggctgcagcgttagccgatcatggtgcaggggacccaagtgccttctaccagcaaaaactcaaaacttgacttgaatcaagactctgttctgaatgatggcatccataagtcgaaaagtttgatcaggtctcaaattatcagtttgtagggataaaggaaactctcctgcaattgaaggtaagaggacggttccatggcaagaccggctagcgttgaaggccgaggccctcagttgatttggccaagaaataagctgcttctctgatagctggctttgcaacagtatccctcagatgcacagtaatgctttgtatagaacaataggacacgatagttatatacatgatacattgcctaattgacaaactcagatggttgcaccatgctcctaagcaagttagacaaataaactgtgattttatgaatggttctgtccagattttggattgactgctttgaacatgccaaatgctttagcatgaacaag

SEQ ID NO: 21821 - DNA, 1237 bp, Zea Mays
aacaggtggaggccgttgcaactgcacacacatccaactccggctccatgccgctccaacccaagcagccagcagctgcagcctgccctcctctccgactccaacccaatccaatggctctccgcccctgttgtctcacctcacgcgctctctgccctgatctgccgccaggcgccagaacgacgcgctgctccgcaccgcgtcaggtagaatggtagatggaccatggacgatatcgcttgggagcggggaaggaacgcagacgactcttcccgtgccgtgctgacgccaccacgcggccccggtctcctctcgccctcctctccgtctggatctggtcctatcccctccgccgccgtccttgccctcccggcctcagccacgagccagagcgccgggctcctggcctcgtctcgcctcgccggcgacatggacggaggcggggagacgctgctggtgcggaggagcaagggcaagaagagaccgcagccggcggcgcccgcggaggagggctccggcagcgggggcaggttccgcgcgatctggcgggactaccacgacctgctgcaggagactgaggcaaagaggaagaggctggcaagcacgaagcggagaagcctcgccttgcttgctgaagtcaagttcttgagaaggaagtaccagtcctttctgaggggtggctcgcagcagacacattacaggttgaagaagcaggctcggtacatgccatctccattgggaagcaataaggctgcagcgttagccgatcatggtgcaggggacccaagtgccttctaccagcaaaaactcaaaacttgacttgaatcaagactctgttctgaatgatggcatccataagtcgaaaagtttgatcaggtctcaaattatcagtttgtagggataaaggaaactctcctgcaattgaaggtaagaggacggttccatggcaagaccggctagcgttgaaggccgaggccctcagttgatttggccaagaaataagctgcttctctgatagctggctttgcaacagtatccctcagatgcacagtaatgctttgtatagaacaataggacacgatagttatatacatgatacattgcctaattgacaaactcagatggttgcaccatgctcctaagcaagttagacaaataaactgtgattttatgaatggttctgtccagattttggattgactgctttgaacatgccaaatgctttagcatgaacaag

SEQ ID NO: 21822 - DNA, 7235 bp, Zea Mays
tagccatacagggaaaacgtcaaagccagccccaactcgaccacagatccaacgcggtggcaagcgagatggcagccgcagcccgcagcccacaagcgcagggtgccatgtctgaaccatgcgtccacgcctgtcaccatgatcagccgatcactgctagtgctagcagactagcatcacaccgcgacccaccggcgtgttttagctttcaaggctactctccgtcatagtagcaccatcctcttccggagggaagtcgagcccgccacctgcttgtgcaaatgcgcaagacgacggccgtaacggcagcgccactcgtcatgcaccagattactctgggaaccacagtggataacgggggaccgaggacaagattgacattaggggaaccgaattccagcactcagacgcacttctgctttactcgtagtttgaagctaggcaattcgtcaagagccaggtacatgcagctccttgctgacgaggggcgcgcaggagcagcaattttcgcatgtgcagatatgttccaatgagaccatctcatggaaccacagaagaaagaaaagaccggcgatcttctctctctcaagtggatggcacagaactagcacacggttacatgctgagctatgccccatggatcacttccgtcgtaaaggtcagaactatcaactgccagttcgtcttgtagatgtgtcactaattaggcatttagatagtagatgatgcttcagacagatagcgtcgcacttgggcaattgagctatccgtaggcatagctgggactcatagccatagggttgtctcgaatggtgtaaaggtatgaatctgattgactattactgattaggctttgctctcacacagttttagtactagaagctgtactccgctttgcctaattacagagaacacgtgtcagaaaccattggagtactaggagcggcagactctgctttatctattcccttgcacatacctaaactttattttaaacaaatatgcccgagattgtgcctatttctgttaaaattatcttagaaactagtgcataaactattagtatctttaatcgtgctgctgttcatgggaatgtggtgaaactctgaatagaaatactgcatgtgatctgcttaacaaccggtatatctgccaaggtggaatagtgccagaacccagaagtatgctaactaagcatgtttttttaatgagaaacatcagaggacaaattggacaccacaaaaatcacactagatttggtgaaaagggaaggcatgatgtacctataagcaggcatgatgtagctataaaccagttaacaatatcatgtagatgtatagtctggtctttctagccacagttctgcttcgctaaatgttaatcattctttgacatttcttagtcacctaggcataaataatgtgtggtaggtttagctttgtggcccaccaattcatgcatggcaatataacaattgtaggctgatatttattagcttaggtgtggaccgaaccatctaaaagcgtaaatatgaatcacatttatctagtgcatgctggcttaccctccggtgggtgggcatgttgggcacaacaagatgggaccatatcctggaattctctgatggcaacaaggatataaatgaccttttcccctgatattggttgaccattaagtcagatcactgcagcatatctatgactgagcagaactttggctgcattctctggtagccttgtccttcccagttctcttttgcaaaattcccaaactcagaacattctaaccttctgtatccactgagcagaacttttgcaaaattccaaaaatcatactttaaaattgctccgtgtccatttcttacagtcttccaactctccttctcaacttgtatatacaagcactcactagattgctatttaagctgaacaccttctcaacgagtgtactgtgtactatgtgatactagtcctactcatacttaacacttgttatggccttttaatttttctttattaattgctagactagttataggctaagccaagttaaagtaacgaatacagtctagaattgattgtatgtggttagggggtacggcagaatacatagtcggtgcttgccagtagtttgagaaggtcagcttgttagtttgggttaccccaagaaagtaagtagcttgacctctcggccttaaaaacacaatgccaataggcatgaaaaattctcagcattggtagtgatatcatctagcatcgtactaaattgtcaactcaaactctgaatatacaagagaaaccaaaaatacaaatttgaatgctcgttattgtcctttcctgattccatgaaaagttatcctttttctcgtttcctcctggtcactgtttgaattggaatatgtttggatgtttgatgctagcatactgcacaccaatgatttttcttgaaacttttcatgactcgtttaggccctgtttgtttccttccaggattatataatccagcttatggattatataagcacctagacctgcttatggattatcataatctaggtatctagattacataatccacataataatgtatattgtttgtttacctctcaacttatttggtgtttcaaagcttgggatagtttttggaatgcaggattatctcctaatgccgtctaagaactgaaatgcttggatattctgttgcctaggccatttatggtgtgtttggtttgtggagtcactatgcttcatgaggtgatgcatcataagttcattccataaattttagtggaatcaacccactcctcatgtatatactaattattagcttatgaggaatgaggtggtgatagatcaacccattctattccacaaaccaaataaaaaagtgagcagtgagaagaaaatagatcacttcattactcgaaccaaacacactcttaataggtgcttggcaggcaccacttcaggtgggtgcatacactgacctactggcgctgagtgcggcagcaaacctgaaacgaagtgcacagtcctgttgcttcgtttcagtcctgttgcaatccttcccacaatcttctgtgctgtgctcgccggagcccaccagcgctgctgacacccgtcactttcgccaccgtcgctgtctcctggcgcggctgcgcacagctgctccccgtcctccccaacccactcatcatgcacaaaccgggttaaaaagccgcgcgtcgtgcgctgggcaatcatggcatccccgaagacgtctgctacatccgttccaacccacggaaggcagacctgcagcagcaccaatgcttcgctctctccagtttggttgtttcataacaaggtcggttgatctcgatcgagctagcggccgatctgattgtccgtcgttgccacccccgtggtgttttacaagtgccatccgacgaggagacgatgagggtccgcatggacattctcctcctgctaatccttgtcgtccccttcctcgccgcatcgacgtcggcggacgggaaggccggagacatgcagcggcggcggcggcgacaggtcctgctgcgggacaaggcgactctgctggacctgaagcaggggctcaggctgtcatcttcagcggccctggcggactggaacgagtccaacggcgacgtctgcggcttcaccggcgtcacctgcgactggcggcgggagcacgttgttgggctctctctcgccaacttgggcatcagtgttgctattccacgggtcattggcaatctctcgcacctccggggcctcgacgtgtccaacaacacaatctctggccagataccgacgtccgtcggcaacctcacgcgactggagcgcctcttcatgaacaacaacgacatctcgggcaccatctcttcaatcttcagcaacctcttaccactccagaggctccggaaactagacctctcctacaatagcatctccggtgccattccgctggacatcggcagatttgggcaactccaaagctttaacatcacctacaacaacatctccggcgccgtccctccgtccatcggcaacctgactctccttgagtacctctacgtgcaaaccaacttcatctctggagaaatatctctggccatctgcaacctaacaagcctcgtggagcttgaaatgtccggcaaccacctcacggggcagattccagccgagctctccaacctccgcaacattcaggcgattcatctcggcaccaacaatttccacggggggataccaccttccctgtccgagctgacgggcttgttctatctcggactcgagcaaaacaacctgtccgggaccatcccaccagctatcttcctgaacctcacagggttgcatctcttcgacgtcggcagtaacgatgtttctggcgagatccccggcgccatctcgagcaccggctgcgcgttcttcgtcatcaacctctactccaacaagctccatgggacgcttccacggtggatcgccaactgcaccgatcttatgacgctagatgtagagagcaacttgctggacgacgagctgcctacgagtatcatctcgggcaagaaggggttcaagttcctgcatttgtctaacaaccgtttccagagccatgacggcaacagcaacctggagccattcttcgtcgcgctgtccagctgcacgagcttgcaggaggtggaggccgccgccgtcggcatgggagggcagctgccaagtcggctgggctcgctgctcccgagcaacatgtggcacctcaacctggagctgaacgccatcgagggcccaatcccggagtctatcggggaagttatcaacatgacgtggatgaacctgtcgagcaacttcctgaacgggacgatcccgacgtccctttgccggctgaagtgcctgcagcagctcgtgctgtcaaacaactccctgacaggcgaaattccggcgtgtattggcagcgccacgcagcttatcgcgctcgatctgtcggccaacgtgctgtcaggggccatcccaagcagcatagggagccttgccgagctccaatctctcttcctgcagggaaacaagctgtctggggtcatacctccgagcctcggccattgtgccgctctgttgcacatcgacctctccagcaacagcttgactggggtgatatcagaggagatcgccggcatcgtgacactgaacctgtcgcgcaatcagcttgggggcatgctgccggctggcctcagcagcatgcagcatgtgcaagagatcgacctgtcctggaataacttcaacggtgagatcttggccaacatcggaaactgcattgagttgacagtgctcgacctctcacacaactcgcttgccggcaacctcccttcgacactcagccagctgaagaacctggaaagcctcaatgtcgcgaacaacaacctcagtggtgagatccccattagcctggccaattgcgacaggctgaaatatctcaatctgtcatacaacgacttcagcggcggcgtccccaccaccggccctttcgtgaatttcagctgtctctcctacctcggcaaccgtcgcctctctggtcctgtgctcaggcgttgcggaggtcgccaccgctcgtggtaccagtcccggaagttcgtagtcatcttgtgtgtctgctcggcggctctggcgttcgcgctgacgatcctctgcactgtcagcgtccgcaagatccgcgagcgggtcgcggcaatgcgggaggacatgttcagtggccgccgcggcggcggctcgtcgccagtgatgaagtacaagttcccccggatcacgtacagggagctggtcgaggccaccgaggagttcagcgaggaccggcttgtcgggacgggcagctacgggcgggtgtaccgcggcacgctacgcgacggcaccatggtggccgtgaaggtgctgcagctccagacggggaactcgaccaagagcttcaaccgcgagtgccaggtcctgaagcgcatccggcaccggaacctcatgcgcatcgtcacggcgtgtagcctgccggacttcaaggcgctggtgctgccgttcatggccaacggcagcctcgagcggtgcctctacgcggggccaccggcggagctgagccttgtgcagcgggtcaacatctgtagcgacatcgccgaggggatggcctacctgcaccaccactcgccggtcaaggtcatccactgcgacctcaagccgagcaacgtcctcatcaacgacgacatgaccgcgctcgtctctgacttcggcatctccaggctcgtcatgagcatcggcggggtggccaacactgccgacgtcggcgcctccacggcgaacatgctgtgcggctccatcggatacatccctccagagtacggctacggctcgaatccgacgacaaagggcgacgcgtacagcttcggtgtgctggtgctggaaatggtgacaaggaggaagccaaccgacgacatgttcgacgccggactgagcctgcacaagtgggttaagacccactaccacggccgcgccgacgcagtggtcgaccaggcactggtgcgcatggtccgggaccagacgcccgaggtgagaaggatgtcggacgtggccatcggtgagctactggagcttggcatcctctgtacccaagagcaatcgtccgctcggccaaccatgatggacgcagccgacgacctggaccgcctcaagcggtacctcggcggcgacaccacggccaccttcgcgtcatcgctgggattctcctccaccacgctagaagtggaagacatcgattgaccacgaggtaaggtataatttttttaagcggatgcaaaaacacataggattaattcgttgaaggtgtctgattgatgtaataatataagccttggccatagatctatctatatggcttatacatatgatttctgttccacaaggagttactgaattgctcgctcgtctgtttctctttctgggacgtgctgctccgttcgcgttcgacaatatccgcgagcgatcgcagatccataggcgtgtgtggcgtaagcggctccctcagacgcgagcgatacttagacgcgagcatggctctgtttttgttatattttgtatacatatttatatcaatgtcaatagattttttacgatatattttagtttatagctccgcttccatctattatctgtttattgtacacaaacgatttattgattttataaattatcttgttacct

SEQ ID NO: 21823 - DNA, 7013 bp, Zea Mays
tagccatacagggaaaacgtcaaagccagccccaactcgaccacagatccaacgcggtggcaagcgagatggcagccgcagcccgcagcccacaagcgcagggtgccatgtctgaaccatgcgtccacgcctgtcaccatgatcagccgatcactgctagtgctagcagactagcatcacaccgcgacccaccggcgtgttttagctttcaaggctactctccgtcatagtagcaccatcctcttccggagggaagtcgagcccgccacctgcttgtgcaaatgcgcaagacgacggccgtaacggcagcgccactcgtcatgcaccagattactctgggaaccacagtggataacgggggaccgaggacaagattgacattaggggaaccgaattccagcactcagacgcacttctgctttactcgtagtttgaagctaggcaattcgtcaagagccaggtacatgcagctccttgctgacgaggggcgcgcaggagcagcaattttcgcatgtgcagatatgttccaatgagaccatctcatggaaccacagaagaaagaaaagaccggcgatcttctctctctcaagtggatggcacagaactagcacacggttacatgctgagctatgccccatggatcacttccgtcgtaaaggtcagaactatcaactgccagttcgtcttgtagatgtgtcactaattaggcatttagatagtagatgatgcttcagacagatagcgtcgcacttgggcaattgagctatccgtaggcatagctgggactcatagccatagggttgtctcgaatggtgtaaaggtatgaatctgattgactattactgattaggctttgctctcacacagttttagtactagaagctgtactccgctttgcctaattacagagaacacgtgtcagaaaccattggagtactaggagcggcagactctgctttatctattcccttgcacatacctaaactttattttaaacaaatatgcccgagattgtgcctatttctgttaaaattatcttagaaactagtgcataaactattagtatctttaatcgtgctgctgttcatgggaatgtggtgaaactctgaatagaaatactgcatgtgatctgcttaacaaccggtatatctgccaaggtggaatagtgccagaacccagaagtatgctaactaagcatgtttttttaatgagaaacatcagaggacaaattggacaccacaaaaatcacactagatttggtgaaaagggaaggcatgatgtacctataagcaggcatgatgtagctataaaccagttaacaatatcatgtagatgtatagtctggtctttctagccacagttctgcttcgctaaatgttaatcattctttgacatttcttagtcacctaggcataaataatgtgtggtaggtttagctttgtggcccaccaattcatgcatggcaatataacaattgtaggctgatatttattagcttaggtgtggaccgaaccatctaaaagcgtaaatatgaatcacatttatctagtgcatgctggcttaccctccggtgggtgggcatgttgggcacaacaagatgggaccatatcctggaattctctgatggcaacaaggatataaatgaccttttcccctgatattggttgaccattaagtcagatcactgcagcatatctatgactgagcagaactttggctgcattctctggtagccttgtccttcccagttctcttttgcaaaattcccaaactcagaacattctaaccttctgtatccactgagcagaacttttgcaaaattccaaaaatcatactttaaaattgctccgtgtccatttcttacagtcttccaactctccttctcaacttgtatatacaagcactcactagattgctatttaagctgaacaccttctcaacgagtgtactgtgtactatgtgatactagtcctactcatacttaacacttgttatggccttttaatttttctttattaattgctagactagttataggctaagccaagttaaagtaacgaatacagtctagaattgattgtatgtggttagggggtacggcagaatacatagtcggtgcttgccagtagtttgagaaggtcagcttgttagtttgggttaccccaagaaagtaagtagcttgacctctcggccttaaaaacacaatgccaataggcatgaaaaattctcagcattggtagtgatatcatctagcatcgtactaaattgtcaactcaaactctgaatatacaagagaaaccaaaaatacaaatttgaatgctcgttattgtcctttcctgattccatgaaaagttatcctttttctcgtttcctcctggtcactgtttgaattggaatatgtttggatgtttgatgctagcatactgcacaccaatgatttttcttgaaacttttcatgactcgtttaggccctgtttgtttccttccaggattatataatccagcttatggattatataagcacctagacctgcttatggattatcataatctaggtatctagattacataatccacataataatgtatattgtttgtttacctctcaacttatttggtgtttcaaagcttgggatagtttttggaatgcaggattatctcctaatgccgtctaagaactgaaatgcttggatattctgttgcctaggccatttatggtgtgtttggtttgtggagtcactatgcttcatgaggtgatgcatcataagttcattccataaattttagtggaatcaacccactcctcatgtatatactaattattagcttatgaggaatgaggtggtgatagatcaacccattctattccacaaaccaaataaaaaagtgagcagtgagaagaaaatagatcacttcattactcgaaccaaacacactcttaataggtgcttggcaggcaccacttcaggtgggtgcatacactgacctactggcgctgagtgcggcagcaaacctgaaacgaagtgcacagtcctgttgcttcgtttcagtcctgttgcaatccttcccacaatcttctgtgctgtgctcgccggagcccaccagcgctgctgacacccgtcactttcgccaccgtcgctgtctcctggcgcggctgcgcacagctgctccccgtcctccccaacccactcatcatgcacaaaccgggttaaaaagccgcgcgtcgtgcgctgggcaatcatggcatccccgaagacgtctgctacatccgttccaacccacggaaggcagacctgcagcagcaccaatgcttcgctctctccagtttggttgtttcataacaaggtcggttgatctcgatcgagctagcggccgatctgattgtccgtcgttgccacccccgtggtgttttacaagtgccatccgacgaggagacgatgagggtccgcatggacattctcctcctgctaatccttgtcgtccccttcctcgccgcatcgacgtcggcggacgggaaggccggagacatgcagcggcggcggcggcgacaggtcctgctgcgggacaaggcgactctgctggacctgaagcaggggctcaggctgtcatcttcagcggccctggcggactggaacgagtccaacggcgacgtctgcggcttcaccggcgtcacctgcgactggcggcgggagcacgttgttgggctctctctcgccaacttgggcatcagtgttgctattccacgggtcattggcaatctctcgcacctccggggcctcgacgtgtccaacaacacaatctctggccagataccgacgtccgtcggcaacctcacgcgactggagcgcctcttcatgaacaacaacgacatctcgggcaccatctcttcaatcttcagcaacctcttaccactccagaggctccggaaactagacctctcctacaatagcatctccggtgccattccgctggacatcggcagatttgggcaactccaaagctttaacatcacctacaacaacatctccggcgccgtccctccgtccatcggcaacctgactctccttgagtacctctacgtgcaaaccaacttcatctctggagaaatatctctggccatctgcaacctaacaagcctcgtggagcttgaaatgtccggcaaccacctcacggggcagattccagccgagctctccaacctccgcaacattcaggcgattcatctcggcaccaacaatttccacggggggataccaccttccctgtccgagctgacgggcttgttctatctcggactcgagcaaaacaacctgtccgggaccatcccaccagctatcttcctgaacctcacagggttgcatctcttcgacgtcggcagtaacgatgtttctggcgagatccccggcgccatctcgagcaccggctgcgcgttcttcgtcatcaacctctactccaacaagctccatgggacgcttccacggtggatcgccaactgcaccgatcttatgacgctagatgtagagagcaacttgctggacgacgagctgcctacgagtatcatctcgggcaagaaggggttcaagttcctgcatttgtctaacaaccgtttccagagccatgacggcaacagcaacctggagccattcttcgtcgcgctgtccagctgcacgagcttgcaggaggtggaggccgccgccgtcggcatgggagggcagctgccaagtcggctgggctcgctgctcccgagcaacatgtggcacctcaacctggagctgaacgccatcgagggcccaatcccggagtctatcggggaagttatcaacatgacgtggatgaacctgtcgagcaacttcctgaacgggacgatcccgacgtccctttgccggctgaagtgcctgcagcagctcgtgctgtcaaacaactccctgacaggcgaaattccggcgtgtattggcagcgccacgcagcttatcgcgctcgatctgtcggccaacgtgctgtcaggggccatcccaagcagcatagggagccttgccgagctccaatctctcttcctgcagggaaacaagctgtctggggtcatacctccgagcctcggccattgtgccgctctgttgcacatcgacctctccagcaacagcttgactggggtgatatcagaggagatcgccggcatcgtgacactgaacctgtcgcgcaatcagcttgggggcatgctgccggctggcctcagcagcatgcagcatgtgcaagagatcgacctgtcctggaataacttcaacggtgagatcttggccaacatcggaaactgcattgagttgacagtgctcgacctctcacacaactcgcttgccggcaacctcccttcgacactcagccagctgaagaacctggaaagcctcaatgtcgcgaacaacaacctcagtggtgagatccccattagcctggccaattgcgacaggctgaaatatctcaatctgtcatacaacgacttcagcggcggcgtccccaccaccggccctttcgtgaatttcagctgtctctcctacctcggcaaccgtcgcctctctggtcctgtgctcaggcgttgcggaggtcgccaccgctcgtggtaccagtcccggaagttcgtagtcatcttgtgtgtctgctcggcggctctggcgttcgcgctgacgatcctctgcactgtcagcgtccgcaagatccgcgagcgggtcgcggcaatgcgggaggacatgttcagtggccgccgcggcggcggctcgtcgccagtgatgaagtacaagttcccccggatcacgtacagggagctggtcgaggccaccgaggagttcagcgaggaccggcttgtcgggacgggcagctacgggcgggtgtaccgcggcacgctacgcgacggcaccatggtggccgtgaaggtgctgcagctccagacggggaactcgaccaagagcttcaaccgcgagtgccaggtcctgaagcgcatccggcaccggaacctcatgcgcatcgtcacggcgtgtagcctgccggacttcaaggcgctggtgctgccgttcatggccaacggcagcctcgagcggtgcctctacgcggggccaccggcggagctgagccttgtgcagcgggtcaacatctgtagcgacatcgccgaggggatggcctacctgcaccaccactcgccggtcaaggtcatccactgcgacctcaagccgagcaacgtcctcatcaacgacgacatgaccgcgctcgtctctgacttcggcatctccaggctcgtcatgagcatcggcggggtggccaacactgccgacgtcggcgcctccacggcgaacatgctgtgcggctccatcggatacatccctccagagtacggctacggctcgaatccgacgacaaagggcgacgcgtacagcttcggtgtgctggtgctggaaatggtgacaaggaggaagccaaccgacgacatgttcgacgccggactgagcctgcacaagtgggttaagacccactaccacggccgcgccgacgcagtggtcgaccaggcactggtgcgcatggtccgggaccagacgcccgaggtgagaaggatgtcggacgtggccatcggtgagctactggagcttggcatcctctgtacccaagagcaatcgtccgctcggccaaccatgatggacgcagccgacgacctggaccgcctcaagcggtacctcggcggcgacaccacggccaccttcgcgtcatcgctgggattctcctccaccacgctagaagtggaagacatcgattgaccacgagatccataggcgtgtgtggcgtaagcggctccctcagacgcgagcgatacttagacgcgagcatggctctgtttttgttatattttgtatacatatttatatcaatgtcaatagattttttacgatatattttagtttatagctccgcttccatctattatctgtttattgtacacaaacgatttattgattttataaattatcttgttacct

SEQ ID NO: 21824 - DNA, 7332 bp, Zea Mays
cctgtttctaccgttctcattcccattcccggttctttctccaccccgatgcccctccccctcccccgtgtgatcccctctccagatcgatgtctgccccggccgtaacccccgcggctcaccgcacgaaaccgccgcgagatcttggagctcagcctctgacgatggctacgactacctcgccaacctccgcgagctctgtccccctccctctcctccaccggcggcgggggatccttggccatgttcctcccgaggcgccggtccacgcgcttcggcctccgcgtggtcatcaagcctttctgatggctcggaacagaggtcagctatgcgatgtggcgtggcgaggttaccgcgggcgccgcggaggtggagggggaaggggaggacgagggcacgggcaagagagcgcatcgctgtggacggtctcgtgagtgagtgctgctgcctgcccctctctctctgcctgcgttctcctggtgctgctctccctctcctcccctgcttcgacctcccgcctttccccaccgtttcttggatttctaggatccagacaaccgcccttgtgagcctgccttcctgcctactacctgcgtacgtacaggagggaccttgggtgatccgggtgcttggtttcttggttctacggctttcgctgctgttggatttgccgagccggagccgacggagatgaccgtcgacgagctgaagctgcaggcaagggccagcggcggccacgacctaaggaccagttccccgtcggcatgcgcgtgctcgccgtcgacgacgacccgacctgcctcaaggtcctcgagaacctcttgttccgctgccagtaccatgtgacaacaatgggccaggcagccactgccctgagctgctgagggagaagaaggaccagtttgaccctgtgatcagcaacgtccacatgccggacatggacggcttcaagctcctcgagcttgtgggcctcgagatggaccttccggggattaacagctgaaaacctcgcccgatttgtaaagaagttttcttgttcaatgcggcattgaatttgggaggaatgacaagtctcatgaaaacttctgtatgccctacacgtgaccactaaaagaaagagttagacaggacaaaaggctgcagcggcagaagaagagcttttacatacccttacaatgctgattttgatggagatgaaatgaatttgcatgtccctcggacggaggaagctcgcactgaagcgcttaattctcataggggttcaaaataatttatgtactcctaagaatggtgagatactggttgcttccgcgcaagacttcttgacctcatctttcttagatatgttttcgaattagattgggatggaaattcacatttgttatcacattttctgttagcaagcacaaccattgtgacattattttgcatgcactcagcctctcaccatggctatgagaatgaaattcaacttatagatataccaaaatgttatagaatcaatataattagatatgtcaagatgacaacacatatttcattcaactactatggatttttcattgataaaatacatgcttgatggctgcttgtctaaaatttatttgtttaatattctttgtttgtaagcccaagaatttgtaaaccaggaaataattccaatgaaagatcggtgcggggcggaattttcttggctttttgtagtggctaccgtagtacatcaacttgggcacttggcgacatgtccggtgcccagctccatcacatatcaatctgaaattaaacatgtgtctgagttctgaatgaaaaaattcagctaacagctaacactacgcactactaacagacctcaagcataatactgttgatttgatgtccttatatttatcttgaagcattgcattcatgcagtcatgtaaatagtactttatttatcttctgaccaacacactaataaccaacctttgcagtgatgggggatacttcaatgcaataatgagcttcccacaaaattacccaaacagcccaccatcagtcagatttacctctgaaatgtggcatccaaatggtcaactttttattagtgaaaatagtatttatttactccatctacagttatgttttctgacatcatgcataatatttgaggaaacgccagtctaacctgatgggcgggtttgtatctctattcttcatccacccagtgaagatccaaacggttatgagctcgcaagtgagcgatggacacctgtgcacacagtatggcttcgtatactttgtttacatatcttttccccattgtaatgttactcatctcccttttatgtgtatactttttagagagaaaattaccttgtagtctcattgtttcagtttatggtccaatttacaatggcttcactgtaaatgggaaaacaactcggtaggaatgcttttttgaattataaattatttctatttcatacgatgcttataggtatgtgatgagtcctccaatctgagaagtagagcatggtaaagcactccaagctgctctttcatcgggaaatttatagcttgtaggtactgatcacagcacattcaactccacacagattgtccatgtttctttcagtcaccatgatttatcactagggtactttcaccacttctggtatggttctgtctgtaatgtgccagggattattatattgtttttggtttggatttggaatggtttggggtccacaacgatgatgcgtcagagctgttccaaggattggatgatttccattcccctgctgccaattcgactaggctcgccgtctccgctctgcccaactggcaccaagcagccaatggaacttgagcagccaatggatgatttccattcccctgctgccaattctccgaactgctttgacccttcaactcaatccgcatgtacccaggattctttgcttgctcttctacttctgaaaattcgcaaaatggatagataattccagttaattttaatccattacaggtatggtgatgcttgcaaacgctctattttcatttgaactactatacaccacttctggatgggagttgtttcactgcgtcaactattctttagtagcctgttcgtgcgtcaattattctttagtagcctattgtggcagcaaacagcgactgggtgcggaagccggaagggagaggcgcttggttgacccagaacggacgacaagacaccgccgggggttcgctgcaaccgcacgcgtggtggccggtgtgggaaggagcccactgctcaagcagcgacgacttccgtaacttctcaggccaagttgtagggagggagggcagcaaagaaagcaagcaagaaagaagccgattccactggtggttaaggttttggattaaaggagagaggtgcagagaaaaaaaggcaatcttactcttaatctctgtgtccacatcacttccgatcatgccgtgatcgacagaagtacgggtgccatgtataagtgccccctccaactcaccaaagtaataaggagcagctgctgcaggttgcaactccctgggccaagcagtagcccagcaagttcagcaccaatggcagccatatgaaatataaggcaaagcagataaaaagcttaatttttttcaataaggtaaaggcaatgacagaaaagtgaggagggtcagaggtgtacagataaggatgagggctgaaaagaggagcaggaaggtaagatcacttgcaccaataatagggatcaccgtgaattaaaagatgagtagtgatcatgtcagttaaatgctcatcatgtttcttcttaggctttcttatttatatctacatctgtgtgaattttttgtactataaatttgtgccttctcgctaatataatgttttattactgtcagtatattaagtggtaactggccaatgcaattagaagcaggaaagccttgtgcatttgtttttttatctcgatgctgtttgcgcctctgccgtatctgtgttcaagcctcagtggacatatactcacctatcttggagatatgatatatagtaatatagctcattgggttctttccatttgctgccaagctttagtagggtattgtttactaccctggcttttcttgtcctagcagaagcacaaaactaatcaggatcaaccactgcaaaatgtgattgacatagatctcacacatctcttcaacattgcacaaacatgggtgcctttttcattccttgtgctaagacaataattttagctcattcggggtactgtataatccagagtttctttttcgatgccataccaatcgtttgtctctgcttgctgagacttgaagaaaactttggtgcgttgtctctttttgtttctgtcagattcattgctgccttccagcaatccagctctttaccctttacagtatttcctttccatttgataaatctgtacttttttaggcttgaaatcttctttctctgttctgaggactgctgcaaacttgtaacagatggattaatcgcttcttttcttattttttagggcatgatgaaatcagtgtttgctatttagcctccttcacaactaagatcatcctacataatagatttagacaacaaaaacttatggagtttgctgaaatgccctttcaggcatgctccatctgtgctacaagggtcagaatggacttgataggacatttgactatacaacatggaagttatttcaagatatccttttttaactatgctgtcgttgctgatcatttgcatttttacatttttcacattatactatagttgaagatacattcctgaggacgaatgggtgcagttatgggcttcctgcttgctgccagcagtcttttggtgcttttatattgctattaatttgtttgaaatttattatggtgatgactgggaaggtctttttgaggctattactggttatggccttggtggctctttggccgtgttggtggtggtatttataccaaggctgctgatgttggtgccgaccttgtggggaaggtagaaagaaacattcctgaggacgatccaagaaacccagctgtcattgctgacaatgttggtgataatgttggagatattgttggaatgggatcatatctctttggctcatatgctgaatcgtcatgtgctgctcttgttgtggcctcgatctcgtcttttggaatcaaccatcaatttactccaatggtgtatccccttcttgtcagctctgttggtattatagcatgtctcataacaacgctgtttgcaactgatttcttcgagataaaggctgtgagtgaaatagagcctgctctcaagaaacaacttataatatccactgttgtgatgaccattggcattgcgctcatgttggcttggcaattgttcttgtgtgtggcggttggtctctgggctggcttagtcattggttttattactgagtactacacaagcaatgcctacagaactggagctgccactaatgtcatttttgggcttgctctgggttacaaatcagtcattatcccaatttttgctattgcgtttagtatcttccttagcttcagccttgctgccatgtatggtgttgttgtggctgctcttggaatgctgagtaccattgccacagaccttgctattgatgcctatggccctatcagtgataatgctggaagcttaagtctctccaccgccaccaccataggcggcgctccaaacacggtggcgccatgcgcgccggcgtggtgcggggacttggccatctcctacccgttctggctcgcaggcacgcatctgcccaagtgtggctacgaccaagggttcaaggttacctgtgacaaagccaaggacgatggcacttgcaacatcgacaagttcgtcaatgcctccttcgtccccagcccgccgttcgaaatcgagccccaacaaaaccaggagctgttcttcgtctacgactgcaacctgcgagcgccgcagctgcctcggtcttggacacccttgcgctgtggcaataatggctcgttcacctggctttctggggagtacaggcccgaagacagctccatggcgatgccggggaactgcaacgttgcgatgataccggtggtggcgtacgagggggcgaccgcggcagattatcagtggttcgtggagggaggtttttttcttagttactacctcacggacactgaggacgacgactactacgaccagtgccaagcttgctcgtaccgcgctggccacggccaatgccggacaattgtcagtgacaatgggttccagtgctactgctctgacggcgtctactcgacgacggcctgcggaaccaagagggctaactggaagacaacaattgtagaaagatatggcaacaaatgtggcaaacacgatctatctaattctaagaccatttttgtagttgaatcgaagcgggaactgaatcaagaatgttctatttatatcggtctcaggatgaacgagcaccaggagagagtccgggaggaggcatatactgttgggacgtgtccaagccagtggagatgcagtggagatggaggagatcgacattggcatggagaagctgcgaaacccaccgcagcagaaccccacctagaggaagaagtagaaaacttgtgccggtatgagcttcctaatgagagctgggaagtaaatttgcctcctgaaaaggtgtctcctgagctcccagtaccaacattaggcataaactttgcaagagatggaatccagaaaaaagagtggttgtccatggttgctgcacacagtgatgcatggttactttctgttgcattttatcttggtgctcaatttggtttcaataaaaattacagtaattctgaaaatatgaggcaaactgacctcaacagggttgagatgattccatcatacttatacgaagattttcctagcaaggcaagggataatgggtacttgctctgtgatgactcaaaaagaatgagattgatcgattgtgtagctgttgtagctccaattgagaaatattatcagtattaagctgctttgatggttgcccggtctattgcttgcatgtagcatgcatctccgcggagatccaagttgttatgctttgagctattgcatcaagagtttaagatagtctttatatattttactaaaacttgtgcatgtacatggagtgcgtgaatgaatcatcaaaggctataatgtctacccgtgtgatatatttagaaaccgtagcaacacacgggcatctaactataaaacatatacatcaatattgtttgaattcactaattttctaaaatgattaatattttagaacagag

SEQ ID NO: 21825 - DNA, 3049 bp, Zea Mays
ggttctttctccaccccgatgcccctccccctcccccgtgtgatcccctctccagatcgatgtctgccccggccgtaacccccgcggctcaccgcacgaaaccgccgcgagatcttggagctcagcctctgacgatggctacgactacctcgccaacctccgcgagctctgtccccctccctctcctccaccggcggcgggggatccttggccatgttcctcccgaggcgccggtccacgcgcttcggcctccgcgtggtcatcaaggtcctaccaccgcctcacctcctccttgccgccgtgcggttgagcgccgacgacgttcgggctccggcggttcctgcatggaccggaagagccatctcatactctttctctacagcctttctgatggctcggaacagagccggagccgacggagatgaccgtcgacgagctgaagctgcaggcaagggccagcggcggccacgacctaaggaccagttccccgtcggcatgcgcgtgctcgccgtcgacgacgacccgacctgcctcaaggtcctcgagaacctcttgttccgctgccagtaccatggtacttcccctgacaacaatgggccaggcagccactgccctgagctgctgagggagaagaaggaccagtttgaccctgtgatcagcaacgtccacatgccggacatggacggcttcaagctcctcgagcttgtgggcctcgagatggaccttccggggattaggtactttcaccacttctggtatggttctgtctgtaatgtgccagggattattatattgtttttggtttggatttggaatggtttggggtccacaacgatgatgcgtcagagctgttccaaggattggatgatttccattcccctgctgccaattcgactaggctcgccgtctccgctctgcccaactggcaccaagcagccaatggaacttgagcagccaatggatgatttccattcccctgctgccaattctccgaactgctttgacccttcaactcaatccgcatgtacccagcctattgtggcagcaaacagcgactgggtgcggaagccggaagggagaggcgcttggttgacccagaacggacgacaagacaccgccgggggttcgctgcaaccgcacgcgtggtggccggtgtgggaaggagcccactgctcaagcagcgacgacttccgtaacttctcaggccaagttgtagggagggagggcagcaaagaaagcaagcaagaaagaagccgattccactggtggttaaggttttggattaaaggagagagctgctgcaggttgcaactccctgggccaagcagtagcccagcaagttcagcaccaatggcagccatatgaaatataaggcaaagcagataaaaagcttaatttttttcaataaggtaaaggcaatgacagaaaagtgaggagggtcagaggtgtacagataaggatgagggctgaaaagaggagcaggaagggcatgatgaaatcagtgtttgctatttagcctccttcacaactaagatcatcctacataatagatttagacaacaaaaacttatggagtttgctgaaatgccctttcaggcatgctccatctgtgctacaaggttatgggcttcctgcttgctgccagcagtcttttggtgcttttatattgctattaatttgtttgaaatttattatggtgatgactgggaaggtctttttgaggctattactggttatggccttggtggctctttggccgtgttggtggtggtatttataccaaggctgctgatgttggtgccgaccttgtggggaaggtagaaagaaacattcctgaggacgatccaagaaacccagctgtcattgctgacaatgttggtgataatgttggagatattgttggaatgggatcatatctctttggctcatatgctgaatcgtcatgtgctgctcttgttgtggcctcgatctcgtcttttggaatcaaccatcaatttactccaatggtgtatccccttcttgtcagctctgttggtattatagcatgtctcataacaacgctgtttgcaactgatttcttcgagataaaggctgtgagtgaaatagagcctgctctcaagaaacaacttataatatccactgttgtgatgaccattggcattgcgctcatgttggcttggtcttccatacaccttcaccatttataactttggagcccagaagacagtgcaaagctggcaattgttcttgtgtgtggcggttggtctctgggctggcttagtcattggttttattactgagtactacacaagcaatgcctacagaactggagctgccactaatgtcatttttgggcttgctctgggttacaaatcagtcattatcccaatttttgctattgcgtttagtatcttccttagcttcagccttgctgccatgtatggtgttgttgtggctgctcttggaatgctgagtaccattgccacagaccttgctattgatgcctatggccctatcagtgataatgctggaagcttaagtctgtatgggtgcatcttatcatttatatgtatatctgaaagcttaagtatttttttaaatagaagatgtctggaaactttagtaacgacatgagtttcaggctttcagctatagcagtcttattcgcttttaagacagagaagatttttatttagagtttagaaagagtaggtgctatgggtgcatgttatcatttatgtggggaacatctctggtggaaattaatcagtaacgacatgagttaagacagagaagcttaagtattttttcagctatagcagtcttattcgcttttaagacagagaagcttaagtattttttgaatagaagatgtctggaaactttagtaacgacatgagttaatcagaagagatggaagggtagtttatcaacatgtatttggcacttcgccgaaaatgtcacttggactatcttgcaaactgaattttcagattggcttcttctgtctgaacattcagttcagtcttgcaggatttatttggtgtgc

SEQ ID NO: 21826 - DNA, 3741 bp, Zea Mays
ggttctttctccaccccgatgcccctccccctcccccgtgtgatcccctctccagatcgatgtctgccccggccgtaacccccgcggctcaccgcacgaaaccgccgcgagatcttggagctcagcctctgacgatggctacgactacctcgccaacctccgcgagctctgtccccctccctctcctccaccggcggcgggggatccttggccatgttcctcccgaggcgccggtccacgcgcttcggcctccgcgtggtcatcaagcctttctgatggctcggaacagagccggagccgacggagatgaccgtcgacgagctgaagctgcaggcaagggccagcggcggccacgacctaaggaccagttccccgtcggcatgcgcgtgctcgccgtcgacgacgacccgacctgcctcaaggtcctcgagaacctcttgttccgctgccagtaccatgtgacaacaatgggccaggcagccactgccctgagctgctgagggagaagaaggaccagtttgaccctgtgatcagcaacgtccacatgccggacatggacggcttcaagctcctcgagcttgtgggcctcgagatggaccttccggggattaacagctgaaaacctcgcccgatttgtaaagaagttttcttgttcaatgcggcattgaatttgggaggaatgacaagtctcatgaaaacttctgtatgccctacacgtgaccactaaaagaaagagttagacaggacaaaaggctgcagcggcagaagaagagcttttacatacccttacaatgctgattttgatggagatgaaatgaatttgcatgtccctcggacggaggaagctcgcactgaagcgcttaattctcataggggttcaaaataatttatgtactcctaagaatgtgatgggggatacttcaatgcaataatgagcttcccacaaaattacccaaacagcccaccatcagtcagatttacctctgaaatgtggcatccaaatgtctaacctgatgggcgggtttgtatctctattcttcatccacccagtgaagatccaaacggttatgagctcgcaagtgagcgatggacacctgtgcacacacttgtaggtactgatcacagcacattcaactccacacagattgtccatgtttctttcagtcaccatgatttatcactaggtcattgtgtttgtggccaacgagtattgttctaacagttatgttcccatagctagctagattcattgttgtgttttgttcagggtactttcaccacttctggtatggttctgtctgtaatgtgccagggattattatattgtttttggtttggatttggaatggtttggggtccacaacgatgatgcgtcagagctgttccaaggattggatgatttccattcccctgctgccaattcgactaggctcgccgtctccgctctgcccaactggcaccaagcagccaatggaacttgagcagccaatggatgatttccattcccctgctgccaattctccgaactgctttgacccttcaactcaatccgcatgtacccagcctattgtggcagcaaacagcgactgggtgcggaagccggaagggagaggcgcttggttgacccagaacggacgacaagacaccgccgggggttcgctgcaaccgcacgcgtggtggccggtgtgggaaggagcccactgctcaagcagcgacgacttccgtaacttctcaggccaagttgtagggagggagggcagcaaagaaagcaagcaagaaagaagccgattccactggtggttaaggttttggattaaaggagagaggtgcagagaaaaaaaggcaatcttactcttaatctctgtgtccacatcacttccgatcatgccgtgatcgacagaagtacgggtgccatgtataagtgccccctccaactcaccaaagtaataaggagcagctgctgcaggttgcaactccctgggccaagcagtagcccagcaagttcagcaccaatggcagccatatgaaatataaggcaaagcagataaaaagcttaatttttttcaataaggtaaaggcaatgacagaaaagtgaggagggtcagaggtgtacagataaggatgagggctgaaaagaggagcaggaagggcatgatgaaatcagtgtttgctatttagcctccttcacaactaagatcatcctacataatagatttagacaacaaaaacttatggagtttgctgaaatgccctttcaggcatgctccatctgtgctacaaggttatgggcttcctgcttgctgccagcagtcttttggtgcttttatattgctattaatttgtttgaaatttattatggtgatgactgggaaggtctttttgaggctattactggttatggccttggtggctctttggccgtgttggtggtggtatttataccaaggctgctgatgttggtgccgaccttgtggggaaggtagaaagaaacattcctgaggacgatccaagaaacccagctgtcattgctgacaatgttggtgataatgttggagatattgttggaatgggatcatatctctttggctcatatgctgaatcgtcatgtgctgctcttgttgtggcctcgatctcgtcttttggaatcaaccatcaatttactccaatggtgtatccccttcttgtcagctctgttggtattatagcatgtctcataacaacgctgtttgcaactgatttcttcgagataaaggctgtgagtgaaatagagcctgctctcaagaaacaacttataatatccactgttgtgatgaccattggcattgcgctcatgttggcttggtcttccatacaccttcaccatttataactttggagcccagaagacagtgcaaagctggcaattgttcttgtgtgtggcggttggtctctgggctggcttagtcattggttttattactgagtactacacaagcaatgcctacagccctgtataagatgttgctgattcctgcagaactggagctgccactaatgtcatttttgggcttgctctgggttacaaatcagtcattatcccaatttttgctattgcgtttagtatcttccttagcttcagccttgctgccatgtatggtgttgttgtggctgctcttggaatgctgagtaccattgccacagaccttgctattgatgcctatggccctatcagtgataatgctggaagcttaagtctgtatgggtgcatcttatcatttatatgtatatctgaaagcttaagtatttttttaaatagaagatgtctggaaactttagtaacgacatgagtttcaggctttcagctatagcagtcttattcgcttttaagacagagaagatttttatttagagtttagaaagagtaggtgctatgggtgcatgttatcatttatgtggggaacatctctggtggaaattaatcagtaacgacatgagttaagacagagaagcttaagtattttttcagctatagcagtcttattcgcttttaagacagagaagcttaagtattttttgaatagaagatgtctggaaactttagtaacgacatgagttaatcagaagagatggaagggtagtttatcaacatgtatttggcacttcgccgaaaatgtcacttggactatcttgcaaactgaattttcagattggcttcttctgtctgaacattcagttcagtcttgcaggatttatttggtgtgc

SEQ ID NO: 21827 - DNA, 4197 bp, Zea Mays
ggttctttctccaccccgatgcccctccccctcccccgtgtgatcccctctccagatcgatgtctgccccggccgtaacccccgcggctcaccgcacgaaaccgccgcgagatcttggagctcagcctctgacgatggctacgactacctcgccaacctccgcgagctctgtccccctccctctcctccaccggcggcgggggatccttggccatgttcctcccgaggcgccggtccacgcgcttcggcctccgcgtggtcatcaagcctttctgatggctcggaacagaggtcagctatgcgatgtggcgtggcgaggttaccgcgggcgccgcggaggtggagggggaaggggaggacgagggcacgggcaagagagcgcatcgctgtggacggtctcgtgagagggaccttgggtgatccgggtgcttggtttcttggttctacggctttcgctgctgttggatttgccgagccggagccgacggagatgaccgtcgacgagctgaagctgcaggcaagggccagcggcggccacgacctaaggaccagttccccgtcggcatgcgcgtgctcgccgtcgacgacgacccgacctgcctcaaggtcctcgagaacctcttgttccgctgccagtaccatgtgacaacaatgggccaggcagccactgccctgagctgctgagggagaagaaggaccagtttgaccctgtgatcagcaacgtccacatgccggacatggacggcttcaagctcctcgagcttgtgggcctcgagatggaccttccggggattagtgaagcggcagaagaagagcttttacatacccttacaatgctgattttgatggagatgaaatgaatttgcatgtccctcggacggaggaagctcgcactgaagcgcttaattctcataggggttcaaaataatttatgtactcctaagaatgtgatgggggatacttcaatgcaataatgagcttcccacaaaattacccaaacagcccaccatcagtcagatttacctctgaaatgtggcatccaaatgtctaacctgatgggcgggtttgtatctctattcttcatccacccagtgaagatccaaacggttatgagctcgcaagtgagcgatggacacctgtgcacacagtatggcttcgtatactttgtttacatatcttttccccattgtaatgttactcatctcccttttatgtgtatactttttagagagaaaattaccttgtagtctcattgtttcagtttatggtccaatttacaatggcttcactgtaaatgggaaaacaactcggtaggaatgcttttttgaattataaattatttctatttcatacgatgcttataggtatgtgatgagtcctccaatctgagaagtagagcatggtaaagcactccaagctgctctttcatcgggaaatttataggtgacacttgtgtcatacattgaactatggagtcaaacaaattacatattatccttcaacatttttcaccagtgggaactgtagttattgcgtagaatagatggtatattaatcgttgagagccaatgtttacattaactgttatgcagaagacaatttatgttttattttatatctaactgtactttgttgcagcttgtaggtactgatcacagcacattcaactccacacagattgtccatgtttctttcagtcaccatgatttatcactaggtcattgtgtttgtggccaacgagtattgttctaacagttatgttcccatagctagctagattcattgttgtgttttgttcagggtactttcaccacttctggtatggttctgtctgtaatgtgccagggattattatattgtttttggtttggatttggaatggtttggggtccacaacgatgatgcgtcagagctgttccaaggattggatgatttccattcccctgctgccaattcgactaggctcgccgtctccgctctgcccaactggcaccaagcagccaatggaacttgagcagccaatggatgatttccattcccctgctgccaattctccgaactgctttgacccttcaactcaatccgcatgtacccagcctattgtggcagcaaacagcgactgggtgcggaagccggaagggagaggcgcttggttgacccagaacggacgacaagacaccgccgggggttcgctgcaaccgcacgcgtggtggccggtgtgggaaggagcccactgctcaagcagcgacgacttccgtaacttctcaggccaagttgtagggagggagggcagcaaagaaagcaagcaagaaagaagccgattccactggtggttaaggttttggattaaaggagagaggtgcagagaaaaaaaggttgcaactccctgggccaagcagtagcccagcaagttcagcaccaatggcagccatatgaaatataaggcaaagcagataaaaagcttaatttttttcaataaggtaaaggcaatgacagaaaagtgaggagggtcagaggtgtacagataaggatgagggctgaaaagaggagcaggaaggcatgctccatctgtgctacaagggtcagaatggacttgataggacatttgactatacaacatggaagttatttcaagatatccttttttaactatgctgtcgttgctgatcatttgcatttttacatttttcacattatactatagttgaagatacattcctgaggacgaatgggtgcagttatgggcttcctgcttgctgccagcagtcttttggtgcttttatattgctattaatttgtttgaaatttattatggtgatgactgggaaggtctttttgaggctattactggttatggccttggtggctctttggccgtgttggtggtggtatttataccaaggctgctgatgttggtgccgaccttgtggggaaggtagaaagaaacattcctgaggacgatccaagaaacccagctgtcattgctgacaatgttggtgataatgttggagatattgttggaatgggatcatatctctttggctcatatgctgaatcgtcatgtgctgctcttgttgtggcctcgatctcgtcttttggaatcaaccatcaatttactccaatggtgtatccccttcttgtcagctctgttggtattatagcatgtctcataacaacgctgtttgcaactgatttcttcgagataaaggctgtgagtgaaatagagcctgctctcaagaaacaacttataatatccactgttgtgatgaccattggcattgcgctcatgttggcttggtcttccatacaccttcaccatttataactttggagcccagaagacagtgcaaagctggcaattgttcttgtgtgtggcggttggtctctgggctggcttagtcattggttttattactgagtactacacaagcaatgcctacagccctgtataagatgttgctgattcctgcagaactggagctgccactaatgtcatttttgggcttgctctgggttacaaatcagtcattatcccaatttttgctattgcgtttagtatcttccttagcttcagccttgctgccatgtatggtgttgttgtggctgctcttggaatgctgagtaccattgccacagaccttgctattgatgcctatggccctatcagtgataatgctggaagcttaagtctgtatgggtgcatcttatcatttatatgtatatctgaaagcttaagtatttttttaaatagaagatgtctggaaactttagtaacgacatgagtttcaggctttcagctatagcagtcttattcgcttttaagacagagaagatttttatttagagtttagaaagagtaggtgctatgggtgcatgttatcatttatgtggggaacatctctggtggaaattaatcagtaacgacatgagttaagacagagaagcttaagtattttttcagctatagcagtcttattcgcttttaagacagagaagcttaagtattttttgaatagaagatgtctggaaactttagtaacgacatgagttaatcagaagagatggaagggtagtttatcaacatgtatttggcacttcgccgaaaatgtcacttggactatcttgcaaactgaattttcagattggcttcttctgtctgaacattcagttcagtcttgcaggatttatttggtgtgc

SEQ ID NO: 21828 - DNA, 3848 bp, Zea Mays
ggttctttctccaccccgatgcccctccccctcccccgtgtgatcccctctccagatcgatgtctgccccggccgtaacccccgcggctcaccgcacgaaaccgccgcgagatcttggagctcagcctctgacgatggctacgactacctcgccaacctccgcgagctctgtccccctccctctcctccaccggcggcgggggatccttggccatgttcctcccgaggcgccggtccacgcgcttcggcctccgcgtggtcatcaagcctttctgatggctcggaacagaggtcagctatgcgatgtggcgtggcgaggttaccgcgggcgccgcggaggtggagggggaaggggaggacgagggcacgggcaagagagcgcatcgctgtggacggtctcgtgagagggaccttgggtgatccgggtgcttggtttcttggttctacggctttcgctgctgttggatttgccgagccggagccgacggagatgaccgtcgacgagctgaagctgcaggcaagggccagcggcggccacgacctaaggaccagttccccgtcggcatgcgcgtgctcgccgtcgacgacgacccgacctgcctcaaggtcctcgagaacctcttgttccgctgccagtaccatgtgacaacaatgggccaggcagccactgccctgagctgctgagggagaagaaggaccagtttgaccctgtgatcagcaacgtccacatgccggacatggacggcttcaagctcctcgagcttgtgggcctcgagatggaccttccggggattaacagctgaaaacctcgcccgatttgtaaagaagttttcttgttcaatgcggcattgaatttgggaggaatgacaagtctcatgaaaacttctgtatgccctacacgtgaccactaaaagaaagagttagacaggacaaaaggctgcagcggcagaagaagagcttttacatacccttacaatgctgattttgatggagatgaaatgaatttgcatgtccctcggacggaggaagctcgcactgaagcgcttaattctcataggggttcaaaataatttatgtactcctaagaatgtgatgggggatacttcaatgcaataatgagcttcccacaaaattacccaaacagcccaccatcagtcagatttacctctgaaatgtggcatccaaatgtctaacctgatgggcgggtttgtatctctattcttcatccacccagtgaagatccaaacggttatgagctcgcaagtgagcgatggacacctgtgcacacacttgtaggtactgatcacagcacattcaactccacacagattgtccatgtttctttcagtcaccatgatttatcactaggtcattgtgtttgtggccaacgagtattgttctaacagttatgttcccatagctagctagattcattgttgtgttttgttcagggtactttcaccacttctggtatggttctgtctgtaatgtgccagggattattatattgtttttggtttggatttggaatggtttggggtccacaacgatgatgcgtcagagctgttccaaggattggatgatttccattcccctgctgccaattcgactaggctcgccgtctccgctctgcccaactggcaccaagcagccaatggaacttgagcagccaatggatgatttccattcccctgctgccaattctccgaactgctttgacccttcaactcaatccgcatgtacccagcctattgtggcagcaaacagcgactgggtgcggaagccggaagggagaggcgcttggttgacccagaacggacgacaagacaccgccgggggttcgctgcaaccgcacgcgtggtggccggtgtgggaaggagcccactgctcaagcagcgacgacttccgtaacttctcaggccaagttgtagggagggagggcagcaaagaaagcaagcaagaaagaagccgattccactggtggttaaggttttggattaaaggagagaggtgcagagaaaaaaaggttgcaactccctgggccaagcagtagcccagcaagttcagcaccaatggcagccatatgaaatataaggcaaagcagataaaaagcttaatttttttcaataaggtaaaggcaatgacagaaaagtgaggagggtcagaggtgtacagataaggatgagggctgaaaagaggagcaggaaggcatgctccatctgtgctacaagggtcagaatggacttgataggacatttgactatacaacatggaagttatttcaagatatccttttttaactatgctgtcgttgctgatcatttgcatttttacatttttcacattatactatagttgaagatacattcctgaggacgaatgggtgcagttatgggcttcctgcttgctgccagcagtcttttggtgcttttatattgctattaatttgtttgaaatttattatggtgatgactgggaaggtctttttgaggctattactggttatggccttggtggctctttggccgtgttggtggtggtatttataccaaggctgctgatgttggtgccgaccttgtggggaaggtagaaagaaacattcctgaggacgatccaagaaacccagctgtcattgctgacaatgttggtgataatgttggagatattgttggaatgggatcatatctctttggctcatatgctgaatcgtcatgtgctgctcttgttgtggcctcgatctcgtcttttggaatcaaccatcaatttactccaatggtgtatccccttcttgtcagctctgttggtattatagcatgtctcataacaacgctgtttgcaactgatttcttcgagataaaggctgtgagtgaaatagagcctgctctcaagaaacaacttataatatccactgttgtgatgaccattggcattgcgctcatgttggcttggtcttccatacaccttcaccatttataactttggagcccagaagacagtgcaaagctggcaattgttcttgtgtgtggcggttggtctctgggctggcttagtcattggttttattactgagtactacacaagcaatgcctacagccctgtataagatgttgctgattcctgcagaactggagctgccactaatgtcatttttgggcttgctctgggttacaaatcagtcattatcccaatttttgctattgcgtttagtatcttccttagcttcagccttgctgccatgtatggtgttgttgtggctgctcttggaatgctgagtaccattgccacagaccttgctattgatgcctatggccctatcagtgataatgctggaagcttaagtctgtatgggtgcatcttatcatttatatgtatatctgaaagcttaagtatttttttaaatagaagatgtctggaaactttagtaacgacatgagtttcaggctttcagctatagcagtcttattcgcttttaagacagagaagatttttatttagagtttagaaagagtaggtgctatgggtgcatgttatcatttatgtggggaacatctctggtggaaattaatcagtaacgacatgagttaagacagagaagcttaagtattttttcagctatagcagtcttattcgcttttaagacagagaagcttaagtattttttgaatagaagatgtctggaaactttagtaacgacatgagttaatcagaagagatggaagggtagtttatcaacatgtatttggcacttcgccgaaaatgtcacttggactatcttgcaaactgaattttcagattggcttcttctgtctgaacattcagttcagtcttgcaggatttatttggtgtgc

SEQ ID NO: 21829 - DNA, 4222 bp, Zea Mays
ggttctttctccaccccgatgcccctccccctcccccgtgtgatcccctctccagatcgatgtctgccccggccgtaacccccgcggctcaccgcacgaaaccgccgcgagatcttggagctcagcctctgacgatggctacgactacctcgccaacctccgcgagctctgtccccctccctctcctccaccggcggcgggggatccttggccatgttcctcccgaggcgccggtccacgcgcttcggcctccgcgtggtcatcaagcctttctgatggctcggaacagaggtcagctatgcgatgtggcgtggcgaggttaccgcgggcgccgcggaggtggagggggaaggggaggacgagggcacgggcaagagagcgcatcgctgtggacggtctcgtgagtgagtgctgctgcctgcccctctctctctgcctgcgttctcctggtgctgctctccctctcctcccctgcttcgacctcccgcctttccccaccgtttcttggatttctaggatccagacaaccgcccttgtgagcctgccttcctgcctactacctgcgtacgtacaggagggaccttgggtgatccgggtgcttggtttcttggttctacggctttcgctgctgttggatttgccgagccggagccgacggagatgaccgtcgacgagctgaagctgcaggcaagggccagcggcggccacgacctaaggaccagttccccgtcggcatgcgcgtgctcgccgtcgacgacgacccgacctgcctcaaggtcctcgagaacctcttgttccgctgccagtaccatgtgacaacaatgggccaggcagccactgccctgagctgctgagggagaagaaggaccagtttgaccctgtgatcagcaacgtccacatgccggacatggacggcttcaagctcctcgagcttgtgggcctcgagatggaccttccggggattaacagctgaaaacctcgcccgatttgtaaagaagttttcttgttcaatgcggcattgaatttgggaggaatgacaagtctcatgaaaacttctgtatgccctacacgtgaccactaaaagaaagagttagacaggacaaaaggctgcagcggcagaagaagagcttttacatacccttacaatgctgattttgatggagatgaaatgaatttgcatgtccctcggacggaggaagctcgcactgaagcgcttaattctcataggggttcaaaataatttatgtactcctaagaatgtgatgggggatacttcaatgcaataatgagcttcccacaaaattacccaaacagcccaccatcagtcagatttacctctgaaatgtggcatccaaatgtctaacctgatgggcgggtttgtatctctattcttcatccacccagtgaagatccaaacggttatgagctcgcaagtgagcgatggacacctgtgcacacacttgtaggtactgatcacagcacattcaactccacacagattgtccatgtttctttcagtcaccatgatttatcactaggtcattgtgtttgtggccaacgagtattgttctaacagttatgttcccatagctagctagattcattgttgtgttttgttcagggtactttcaccacttctggtatggttctgtctgtaatgtgccagggattattatattgtttttggtttggatttggaatggtttggggtccacaacgatgatgcgtcagagctgttccaaggattggatgatttccattcccctgctgccaattcgactaggctcgccgtctccgctctgcccaactggcaccaagcagccaatggaacttgagcagccaatggatgatttccattcccctgctgccaattctccgaactgctttgacccttcaactcaatccgcatgtacccagtaaatgttcaatctgaatttggatcattgctagcaggattctttgcttgctcttctacttctgaaaattcgcaaaatggatagataattccagttaattttaatccattacagcaaacagcgactgggtgcggaagccggaagggagaggcgcttggttgacccagaacggacgacaagacaccgccgggggttcgctgcaaccgcacgcgtggtggccggtgtgggaaggagcccactgctcaagcagcgacgacttccgtaacttctcaggccaagggagggagggcagcaaagaaagcaagcaagaaagaagccgattccactggtggttaaggttttggattaaaggagagaggtgcagagaaaaaaaggttgcaactccctgggccaagcagtagcccagcaagttcagcaccaatggcagccatatgaaatataaggcaaagcagataaaaagcttaatttttttcaataaggtaaaggcaatgacagaaaagtgaggagggtcagaggtgtacagataaggatgagggctgaaaagaggagcaggaagggcatgatgaaatcagtgtttgctatttagcctccttcacaactaagatcatcctacataatagatttagacaacaaaaacttatggagtttgctgaaatgccctttcaggcatgctccatctgtgctacaagggtcagaatggacttgataggacatttgactatacaacatggaagttatttcaagatatccttttttaactatgctgtcgttgctgatcatttgcatttttacatttttcacattatactatagttgaagatacattcctgaggacgaatgggtgcagttatgggcttcctgcttgctgccagcagtcttttggtgcttttatattgctattaatttgtttgaaatttattatggtgatgactgggaaggtctttttgaggctattactggttatggccttggtggctctttggccgtgttggtggtggtatttataccaaggctgctgatgttggtgccgaccttgtggggaaggtagaaagaaacattcctgaggacgatccaagaaacccagctgtcattgctgacaatgttggtgataatgttggagatattgttggaatgggatcatatctctttggctcatatgctgaatcgtcatgtgctgctcttgttgtggcctcgatctcgtcttttggaatcaaccatcaatttactccaatggtgtatccccttcttgtcagctctgttggtattatagcatgtctcataacaacgctgtttgcaactgatttcttcgagataaaggctgtgagtgaaatagagcctgctctcaagaaacaacttataatatccactgttgtgatgaccattggcattgcgctcatgttggcttggtcttccatacaccttcaccatttataactttggagcccagaagacagtgcaaagctggcaattgttcttgtgtgtggcggttggtctctgggctggcttagtcattggttttattactgagtactacacaagcaatgcctacagccctgtataagatgttgctgattcctgcagaactggagctgccactaatgtcatttttgggcttgctctgggttacaaatcagtcattatcccaatttttgctattgcgtttagtatcttccttagcttcagccttgctgccatgtatggtgttgttgtggctgctcttggaatgctgagtaccattgccacagaccttgctattgatgcctatggccctatcagtgataatgctggaagcttaagtctgtatgggtgcatcttatcatttatatgtatatctgaaagcttaagtatttttttaaatagaagatgtctggaaactttagtaacgacatgagtttcaggctttcagctatagcagtcttattcgcttttaagacagagaagatttttatttagagtttagaaagagtaggtgctatgggtgcatgttatcatttatgtggggaacatctctggtggaaattaatcagtaacgacatgagttaagacagagaagcttaagtattttttcagctatagcagtcttattcgcttttaagacagagaagcttaagtattttttgaatagaagatgtctggaaactttagtaacgacatgagttaatcagaagagatggaagggtagtttatcaacatgtatttggcacttcgccgaaaatgtcacttggactatcttgcaaactgaattttcagattggcttcttctgtctgaacattcagttcagtcttgcaggatttatttggtgtgc

SEQ ID NO: 21830 - DNA, 4601 bp, Zea Mays
ggttctttctccaccccgatgcccctccccctcccccgtgtgatcccctctccagatcgatgtctgccccggccgtaacccccgcggctcaccgcacgaaaccgccgcgagatcttggagctcagcctctgacgatggctacgactacctcgccaacctccgcgagctctgtccccctccctctcctccaccggcggcgggggatccttggccatgttcctcccgaggcgccggtccacgcgcttcggcctccgcgtggtcatcaagcctttctgatggctcggaacagaggtcagctatgcgatgtggcgtggcgaggttaccgcgggcgccgcggaggtggagggggaaggggaggacgagggcacgggcaagagagcgcatcgctgtggacggtctcgtgagtgagtgctgctgcctgcccctctctctctgcctgcgttctcctggtgctgctctccctctcctcccctgcttcgacctcccgcctttccccaccgtttcttggatttctaggatccagacaaccgcccttgtgagcctgccttcctgcctactacctgcgtacgtacaggagggaccttgggtgatccgggtgcttggtttcttggttctacggctttcgctgctgttggatttgccgagccggagccgacggagatgaccgtcgacgagctgaagctgcaggcaagggccagcggcggccacgacctaaggaccagttccccgtcggcatgcgcgtgctcgccgtcgacgacgacccgacctgcctcaaggtcctcgagaacctcttgttccgctgccagtaccatgtgacaacaatgggccaggcagccactgccctgagctgctgagggagaagaaggaccagtttgaccctgtgatcagcaacgtccacatgccggacatggacggcttcaagctcctcgagcttgtgggcctcgagatggaccttccggggattaacagctgaaaacctcgcccgatttgtaaagaagttttcttgttcaatgcggcattgaatttgggaggaatgacaagtctcatgaaaacttctgtatgccctacacgtgaccactaaaagaaagagttagacaggacaaaaggctgcaggtgaagcggcagaagaagagcttttacatacccttacaatgctgattttgatggagatgaaatgaatttgcatgtccctcggacggaggaagctcgcactgaagcgcttaattctcataggggttcaaaataatttatgtactcctaagaatgtgatgggggatacttcaatgcaataatgagcttcccacaaaattacccaaacagcccaccatcagtcagatttacctctgaaatgtggcatccaaatggtcaactttttattagtgaaaatagtatttatttactccatctacagttatgttttctgacatcatgcataatatttgaggaaacgccagtctaacctgatgggcgggtttgtatctctattcttcatccacccagtgaagatccaaacggttatgagctcgcaagtgagcgatggacacctgtgcacacagtatggcttcgtatactttgtttacatatcttttccccattgtaatgttactcatctcccttttatgtgtatactttttagagagaaaattaccttgtagtctcattgtttcagtttatggtccaatttacaatggcttcactgtaaatgggaaaacaactcggtaggaatgcttttttgaattataaattatttctatttcatacgatgcttataggtatgtgatgagtcctccaatctgagaagtagagcatggtaaagcactccaagctgctctttcatcgggaaatttataggtgacacttgtgtcatacattgaactatggagtcaaacaaattacatattatccttcaacatttttcaccagtgggaactgtagttattgcgtagaatagatggtatattaatcgttgagagccaatgtttacattaactgttatgcagaagacaatttatgttttattttatatctaactgtactttgttgcagcttgtaggtactgatcacagcacattcaactccacacagattgtccatgtttctttcagtcaccatgatttatcactaggtcattgtgtttgtggccaacgagtattgttctaacagttatgttcccatagctagctagattcattgttgtgttttgttcagggtactttcaccacttctggtatggttctgtctgtaatgtgccagggattattatattgtttttggtttggatttggaatggtttggggtccacaacgatgatgcgtcagagctgttccaaggattggatgatttccattcccctgctgccaattcgactaggctcgccgtctccgctctgcccaactggcaccaagcagccaatggaacttgagcagccaatggatgatttccattcccctgctgccaattctccgaactgctttgacccttcaactcaatccgcatgtacccagtaaatgttcaatctgaatttggatcattgctagcaggattctttgcttgctcttctacttctgaaaattcgcaaaatggatagataattccagttaattttaatccattacagcaaacagcgactgggtgcggaagccggaagggagaggcgcttggttgacccagaacggacgacaagacaccgccgggggttcgctgcaaccgcacgcgtggtggccggtgtgggaaggagcccactgctcaagcagcgacgacttccgtaacttctcaggccaagttgtagggagggagggcagcaaagaaagcaagcaagaaagaagccgattccactggtggttaaggttttggattaaaggagagaggttgcaactccctgggccaagcagtagcccagcaagttcagcaccaatggcagccatatgaaatataaggcaaagcagataaaaagcttaatttttttcaataaggtaaaggcaatgacagaaaagtgaggagggtcagaggtgtacagataaggatgagggctgaaaagaggagcaggaaggcatgctccatctgtgctacaagggtcagaatggacttgataggacatttgactatacaacatggaagttatttcaagatatccttttttaactatgctgtcgttgctgatcatttgcatttttacatttttcacattatactatagttgaagatacattcctgaggacgaatgggtgcagttatgggcttcctgcttgctgccagcagtcttttggtgcttttatattgctattaatttgtttgaaatttattatggtgatgactgggaaggtctttttgaggctattactggttatggccttggtggctctttggccgtgttggtggtggtatttataccaaggctgctgatgttggtgccgaccttgtggggaaggtagaaagaaacattcctgaggacgatccaagaaacccagctgtcattgctgacaatgttggtgataatgttggagatattgttggaatgggatcatatctctttggctcatatgctgaatcgtcatgtgctgctcttgttgtggcctcgatctcgtcttttggaatcaaccatcaatttactccaatggtgtatccccttcttgtcagctctgttggtattatagcatgtctcataacaacgctgtttgcaactgatttcttcgagataaaggctgtgagtgaaatagagcctgctctcaagaaacaacttataatatccactgttgtgatgaccattggcattgcgctcatgttggcttggcaattgttcttgtgtgtggcggttggtctctgggctggcttagtcattggttttattactgagtactacacaagcaatgcctacagaactggagctgccactaatgtcatttttgggcttgctctgggttacaaatcagtcattatcccaatttttgctattgcgtttagtatcttccttagcttcagccttgctgccatgtatggtgttgttgtggctgctcttggaatgctgagtaccattgccacagaccttgctattgatgcctatggccctatcagtgataatgctggaagcttaagtctgtatgggtgcatcttatcatttatatgtatatctgaaagcttaagtatttttttaaatagaagatgtctggaaactttagtaacgacatgagtttcaggctttcagctatagcagtcttattcgcttttaagacagagaagatttttatttagagtttagaaagagtaggtgctatgggtgcatgttatcatttatgtggggaacatctctggtggaaattaatcagtaacgacatgagttaagacagagaagcttaagtattttttcagctatagcagtcttattcgcttttaagacagagaagcttaagtattttttgaatagaagatgtctggaaactttagtaacgacatgagttaatcagaagagatggaagggtagtttatcaacatgtatttggcacttcgccgaaaatgtcacttggactatcttgcaaactgaattttcagattggcttcttctgtctgaacattcagttcagtcttgcaggatttatttggtgtgc

SEQ ID NO: 21831 - DNA, 4493 bp, Zea Mays
ggttctttctccaccccgatgcccctccccctcccccgtgtgatcccctctccagatcgatgtctgccccggccgtaacccccgcggctcaccgcacgaaaccgccgcgagatcttggagctcagcctctgacgatggctacgactacctcgccaacctccgcgagctctgtccccctccctctcctccaccggcggcgggggatccttggccatgttcctcccgaggcgccggtccacgcgcttcggcctccgcgtggtcatcaagcctttctgatggctcggaacagagccggagccgacggagatgaccgtcgacgagctgaagctgcaggcaagggccagcggcggccacgacctaaggaccagttccccgtcggcatgcgcgtgctcgccgtcgacgacgacccgacctgcctcaaggtcctcgagaacctcttgttccgctgccagtaccatgtgacaacaatgggccaggcagccactgccctgagctgctgagggagaagaaggaccagtttgaccctgtgatcagcaacgtccacatgccggacatggacggcttcaagctcctcgagcttgtgggcctcgagatggaccttccggggattaacagctgaaaacctcgcccgatttgtaaagaagttttcttgttcaatgcggcattgaatttgggaggaatgacaagtctcatgaaaacttctgtatgccctacacgtgaccactaaaagaaagagttagacaggacaaaaggctgcagcggcagaagaagagcttttacatacccttacaatgctgattttgatggagatgaaatgaatttgcatgtccctcggacggaggaagctcgcactgaagcgcttaattctcataggggttcaaaataatttatgtactcctaagaatggtgagatactggttgcttccgcgcaagacttcttgacctcatctttcttagatatgttttcgaattagattgggatggaaattcacatttgttatcacattttctgttagcaagcacaaccattgtgacattattttgcatgcactcagcctctcaccatggctatgagaatgaaattcaacttatagatataccaaaatgttatagaatcaatataattagatatgtcaagatgacaacacatatttcattcaactactatggatttttcattgataaaatacatgcttgatggctgcttgtctaaaatttatttgtttaatattctttgtttgtaagcccaagaatttgtaaaccaggaaataattccaatgaaagatcggtgcggggcggaattttcttggctttttgtagtggctaccgtagtacatcaacttgggcacttggcgacatgtccggtgcccagctccatcacatatcaatctgaaattaaacatgtgtctgagttctgaatgaaaaaattcagctaacagctaacactacgcactactaacagacctcaagcataatactgttgatttgatgtccttatatttatcttgaagcattgcattcatgcagtcatgtaaatagtactttatttatcttctgaccaacacactaataaccaacctttgcagtgatgggggatacttcaatgcaataatgagcttcccacaaaattacccaaacagcccaccatcagtcagatttacctctgaaatgtggcatccaaatggtcaactttttattagtgaaaatagtatttatttactccatctacagttatgttttctgacatcatgcataatatttgaggaaacgccagtctaacctgatgggcgggtttgtatctctattcttcatccacccagtgaagatccaaacggttatgagctcgcaagtgagcgatggacacctgtgcacacagtatggcttcgtatactttgtttacatatcttttccccattgtaatgttactcatctcccttttatgtgtatactttttagagagaaaattaccttgtagtctcattgtttcagtttatggtccaatttacaatggcttcactgtaaatgggaaaacaactcggtaggaatgcttttttgaattataaattatttctatttcatacgatgcttataggtatgtgatgagtcctccaatctgagaagtagagcatggtaaagcactccaagctgctctttcatcgggaaatttatagcttgtaggtactgatcacagcacattcaactccacacagattgtccatgtttctttcagtcaccatgatttatcactaggtcattgtgtttgtggccaacgagtattgttctaacagttatgttcccatagctagctagattcattgttgtgttttgttcagggtactttcaccacttctggtatggttctgtctgtaatgtgccagggattattatattgtttttggtttggatttggaatggtttggggtccacaacgatgatgcgtcagagctgttccaaggattggatgatttccattcccctgctgccaattcgactaggctcgccgtctccgctctgcccaactggcaccaagcagccaatggaacttgagcagccaatggatgatttccattcccctgctgccaattctccgaactgctttgacccttcaactcaatccgcatgtacccagtaaatgttcaatctgaatttggatcattgctagcaggattctttgcttgctcttctacttctgaaaattcgcaaaatggatagataattccagttaattttaatccattacagcgactgggtgcggaagccggaagggagaggcgcttggttgacccagaacggacgacaagacaccgccgggggttcgctgcaaccgcacgcgtggtggccggtgtgggaaggagcccactgctcaagcagcgacgacttccgtaacttctcaggccaagggcatgatgaaatcagtgtttgctatttagcctccttcacaactaagatcatcctacataatagatttagacaacaaaaacttatggagtttgctgaaatgccctttcaggcatgctccatctgtgctacaaggttatgggcttcctgcttgctgccagcagtcttttggtgcttttatattgctattaatttgtttgaaatttattatggtgatgactgggaaggtctttttgaggctattactggttatggccttggtggctctttggccgtgttggtggtggtatttataccaaggctgctgatgttggtgccgaccttgtggggaaggtagaaagaaacattcctgaggacgatccaagaaacccagctgtcattgctgacaatgttggtgataatgttggagatattgttggaatgggatcatatctctttggctcatatgctgaatcgtcatgtgctgctcttgttgtggcctcgatctcgtcttttggaatcaaccatcaatttactccaatggtgtatccccttcttgtcagctctgttggtattatagcatgtctcataacaacgctgtttgcaactgatttcttcgagataaaggctgtgagtgaaatagagcctgctctcaagaaacaacttataatatccactgttgtgatgaccattggcattgcgctcatgttggcttggtcttccatacaccttcaccatttataactttggagcccagaagacagtgcaaagctggcaattgttcttgtgtgtggcggttggtctctgggctggcttagtcattggttttattactgagtactacacaagcaatgcctacagccctgtataagatgttgctgattcctgcagaactggagctgccactaatgtcatttttgggcttgctctgggttacaaatcagtcattatcccaatttttgctattgcgtttagtatcttccttagcttcagccttgctgccatgtatggtgttgttgtggctgctcttggaatgctgagtaccattgccacagaccttgctattgatgcctatggccctatcagtgataatgctggaagcttaagtctgtatgggtgcatcttatcatttatatgtatatctgaaagcttaagtatttttttaaatagaagatgtctggaaactttagtaacgacatgagtttcaggctttcagctatagcagtcttattcgcttttaagacagagaagatttttatttagagtttagaaagagtaggtgctatgggtgcatgttatcatttatgtggggaacatctctggtggaaattaatcagtaacgacatgagttaagacagagaagcttaagtattttttcagctatagcagtcttattcgcttttaagacagagaagcttaagtattttttgaatagaagatgtctggaaactttagtaacgacatgagttaatcagaagagatggaagggtagtttatcaacatgtatttggcacttcgccgaaaatgtcacttggactatcttgcaaactgaattttcagattggcttcttctgtctgaacattcagttcagtcttgcaggatttatttggtgtgc

SEQ ID NO: 21832 - DNA, 5263 bp, Zea Mays
ggttctttctccaccccgatgcccctccccctcccccgtgtgatcccctctccagatcgatgtctgccccggccgtaacccccgcggctcaccgcacgaaaccgccgcgagatcttggagctcagcctctgacgatggctacgactacctcgccaacctccgcgagctctgtccccctccctctcctccaccggcggcgggggatccttggccatgttcctcccgaggcgccggtccacgcgcttcggcctccgcgtggtcatcaagcctttctgatggctcggaacagaggtcagctatgcgatgtggcgtggcgaggttaccgcgggcgccgcggaggtggagggggaaggggaggacgagggcacgggcaagagagcgcatcgctgtggacggtctcgtgagagggaccttgggtgatccgggtgcttggtttcttggttctacggctttcgctgctgttggatttgccgagccggagccgacggagatgaccgtcgacgagctgaagctgcaggcaagggccagcggcggccacgacctaaggaccagttccccgtcggcatgcgcgtgctcgccgtcgacgacgacccgacctgcctcaaggtcctcgagaacctcttgttccgctgccagtaccatgtgacaacaatgggccaggcagccactgccctgagctgctgagggagaagaaggaccagtttgaccctgtgatcagcaacgtccacatgccggacatggacggcttcaagctcctcgagcttgtgggcctcgagatggaccttccggggattaacagctgaaaacctcgcccgatttgtaaagaagttttcttgttcaatgcggcattgaatttgggaggaatgacaagtctcatgaaaacttctgtatgccctacacgtgaccactaaaagaaagagttagacaggacaaaaggctgcagcggcagaagaagagcttttacatacccttacaatgctgattttgatggagatgaaatgaatttgcatgtccctcggacggaggaagctcgcactgaagcgcttaattctcataggggttcaaaataatttatgtactcctaagaatggtgagatactggttgcttccgcgcaagacttcttgacctcatctttcttagatatgttttcgaattagattgggatggaaattcacatttgttatcacattttctgttagcaagcacaaccattgtgacattattttgcatgcactcagcctctcaccatggctatgagaatgaaattcaacttatagatataccaaaatgttatagaatcaatataattagatatgtcaagatgacaacacatatttcattcaactactatggatttttcattgataaaatacatgcttgatggctgcttgtctaaaatttatttgtttaatattctttgtttgtaagcccaagaatttgtaaaccaggaaataattccaatgaaagatcggtgcggggcggaattttcttggctttttgtagtggctaccgtagtacatcaacttgggcacttggcgacatgtccggtgcccagctccatcacatatcaatctgaaattaaacatgtgtctgagttctgaatgaaaaaattcagctaacagctaacactacgcactactaacagacctcaagcataatactgttgatttgatgtccttatatttatcttgaagcattgcattcatgcagtcatgtaaatagtactttatttatcttctgaccaacacactaataaccaacctttgcagtgatgggggatacttcaatgcaataatgagcttcccacaaaattacccaaacagcccaccatcagtcagatttacctctgaaatgtggcatccaaatggtcaactttttattagtgaaaatagtatttatttactccatctacagttatgttttctgacatcatgcataatatttgaggaaacgccagtctaacctgatgggcgggtttgtatctctattcttcatccacccagtgaagatccaaacggttatgagctcgcaagtgagcgatggacacctgtgcacacagtatggcttcgtatactttgtttacatatcttttccccattgtaatgttactcatctcccttttatgtgtatactttttagagagaaaattaccttgtagtctcattgtttcagtttatggtccaatttacaatggcttcactgtaaatgggaaaacaactcggtaggaatgcttttttgaattataaattatttctatttcatacgatgcttataggtatgtgatgagtcctccaatctgagaagtagagcatggtaaagcactccaagctgctctttcatcgggaaatttataggtgacacttgtgtcatacattgaactatggagtcaaacaaattacatattatccttcaacatttttcaccagtgggaactgtagttattgcgtagaatagatggtatattaatcgttgagagccaatgtttacattaactgttatgcagaagacaatttatgttttattttatatctaactgtactttgttgcagcttgtaggtactgatcacagcacattcaactccacacagattgtccatgtttctttcagtcaccatgatttatcactaggtcattgtgtttgtggccaacgagtattgttctaacagttatgttcccatagctagctagattcattgttgtgttttgttcagggtactttcaccacttctggtatggttctgtctgtaatgtgccagggattattatattgtttttggtttggatttggaatggtttggggtccacaacgatgatgcgtcagagctgttccaaggattggatgatttccattcccctgctgccaattcgactaggctcgccgtctccgctctgcccaactggcaccaagcagccaatggaacttgagcagccaatggatgatttccattcccctgctgccaattctccgaactgctttgacccttcaactcaatccgcatgtacccaggattctttgcttgctcttctacttctgaaaattcgcaaaatggatagataattccagttaattttaatccattacagcctattgtggcagcaaacagcgactgggtgcggaagccggaagggagaggcgcttggttgacccagaacggacgacaagacaccgccgggggttcgctgcaaccgcacgcgtggtggccggtgtgggaaggagcccactgctcaagcagcgacgacttccgtaacttctcaggccaagttgtagggagggagggcagcaaagaaagcaagcaagaaagaagccgattccactggtggttaaggttttggattaaaggagagaggtgcagagaaaaaaaggcaatcttactcttaatctctgtgtccacatcacttccgatcatgccgtgatcgacagaagtacgggtgccatgtataagtgccccctccaactcaccaaagtaataaggagcagctgctgcaggttgcaactccctgggccaagcagtagcccagcaagttcagcaccaatggcagccatatgaaatataaggcaaagcagataaaaagcttaatttttttcaataaggtaaaggcaatgacagaaaagtgaggagggtcagaggtgtacagataaggatgagggctgaaaagaggagcaggaagggcatgatgaaatcagtgtttgctatttagcctccttcacaactaagatcatcctacataatagatttagacaacaaaaacttatggagtttgctgaaatgccctttcaggcatgctccatctgtgctacaaggttatgggcttcctgcttgctgccagcagtcttttggtgcttttatattgctattaatttgtttgaaatttattatggtgatgactgggaaggtctttttgaggctattactggttatggccttggtggctctttggccgtgttggtggtggtatttataccaaggctgctgatgttggtgccgaccttgtggggaaggtagaaagaaacattcctgaggacgatccaagaaacccagctgtcattgctgacaatgttggtgataatgttggagatattgttggaatgggatcatatctctttggctcatatgctgaatcgtcatgtgctgctcttgttgtggcctcgatctcgtcttttggaatcaaccatcaatttactccaatggtgtatccccttcttgtcagctctgttggtattatagcatgtctcataacaacgctgtttgcaactgatttcttcgagataaaggctgtgagtgaaatagagcctgctctcaagaaacaacttataatatccactgttgtgatgaccattggcattgcgctcatgttggcttggtcttccatacaccttcaccatttataactttggagcccagaagacagtgcaaagctggcaattgttcttgtgtgtggcggttggtctctgggctggcttagtcattggttttattactgagtactacacaagcaatgcctacagccctgtataagatgttgctgattcctgcagaactggagctgccactaatgtcatttttgggcttgctctgggttacaaatcagtcattatcccaatttttgctattgcgtttagtatcttccttagcttcagccttgctgccatgtatggtgttgttgtggctgctcttggaatgctgagtaccattgccacagaccttgctattgatgcctatggccctatcagtgataatgctggaagcttaagtctgtatgggtgcatcttatcatttatatgtatatctgaaagcttaagtatttttttaaatagaagatgtctggaaactttagtaacgacatgagtttcaggctttcagctatagcagtcttattcgcttttaagacagagaagatttttatttagagtttagaaagagtaggtgctatgggtgcatgttatcatttatgtggggaacatctctggtggaaattaatcagtaacgacatgagttaagacagagaagcttaagtattttttcagctatagcagtcttattcgcttttaagacagagaagcttaagtattttttgaatagaagatgtctggaaactttagtaacgacatgagttaatcagaagagatggaagggtagtttatcaacatgtatttggcacttcgccgaaaatgtcacttggactatcttgcaaactgaattttcagattggcttcttctgtctgaacattcagttcagtcttgcaggatttatttggtgtgc

SEQ ID NO: 21833 - DNA, 4956 bp, Zea Mays
ggttctttctccaccccgatgcccctccccctcccccgtgtgatcccctctccagatcgatgtctgccccggccgtaacccccgcggctcaccgcacgaaaccgccgcgagatcttggagctcagcctctgacgatggctacgactacctcgccaacctccgcgagctctgtccccctccctctcctccaccggcggcgggggatccttggccatgttcctcccgaggcgccggtccacgcgcttcggcctccgcgtggtcatcaagcctttctgatggctcggaacagaggtcagctatgcgatgtggcgtggcgaggttaccgcgggcgccgcggaggtggagggggaaggggaggacgagggcacgggcaagagagcgcatcgctgtggacggtctcgtgagtgagtgctgctgcctgcccctctctctctgcctgcgttctcctggtgctgctctccctctcctcccctgcttcgacctcccgcctttccccaccgtttcttggatttctaggatccagacaaccgcccttgtgagcctgccttcctgcctactacctgcgtacgtacaggagggaccttgggtgatccgggtgcttggtttcttggttctacggctttcgctgctgttggatttgccgagccggagccgacggagatgaccgtcgacgagctgaagctgcaggcaagggccagcggcggccacgacctaaggaccagttccccgtcggcatgcgcgtgctcgccgtcgacgacgacccgacctgcctcaaggtcctcgagaacctcttgttccgctgccagtaccatgtgacaacaatgggccaggcagccactgccctgagctgctgagggagaagaaggaccagtttgaccctgtgatcagcaacgtccacatgccggacatggacggcttcaagctcctcgagcttgtgggcctcgagatggaccttccggggattaacagctgaaaacctcgcccgatttgtaaagaagttttcttgttcaatgcggcattgaatttgggaggaatgacaagtctcatgaaaacttctgtatgccctacacgtgaccactaaaagaaagagttagacaggacaaaaggctgcaggtgaagcggcagaagaagagcttttacatacccttacaatgctgattttgatggagatgaaatgaatttgcatgtccctcggacggaggaagctcgcactgaagcgcttaattctcataggggttcaaaataatttatgtactcctaagaatggtgagatactggttgcttccgcgcaagacttcttgacctcatctttcttagatatgttttcgaattagattgggatggaaattcacatttgttatcacattttctgttagcaagcacaaccattgtgacattattttgcatgcactcagcctctcaccatggctatgagaatgaaattcaacttatagatataccaaaatgttatagaatcaatataattagatatgtcaagatgacaacacatatttcattcaactactatggatttttcattgataaaatacatgcttgatggctgcttgtctaaaatttatttgtttaatattctttgtttgtaagcccaagaatttgtaaaccaggaaataattccaatgaaagatcggtgcggggcggaattttcttggctttttgtagtggctaccgtagtacatcaacttgggcacttggcgacatgtccggtgcccagctccatcacatatcaatctgaaattaaacatgtgtctgagttctgaatgaaaaaattcagctaacagctaacactacgcactactaacagacctcaagcataatactgttgatttgatgtccttatatttatcttgaagcattgcattcatgcagtcatgtaaatagtactttatttatcttctgaccaacacactaataaccaacctttgcagtgatgggggatacttcaatgcaataatgagcttcccacaaaattacccaaacagcccaccatcagtcagatttacctctgaaatgtggcatccaaatgtctaacctgatgggcgggtttgtatctctattcttcatccacccagtgaagatccaaacggttatgagctcgcaagtgagcgatggacacctgtgcacacacttgtaggtactgatcacagcacattcaactccacacagattgtccatgtttctttcagtcaccatgatttatcactaggtcattgtgtttgtggccaacgagtattgttctaacagttatgttcccatagctagctagattcattgttgtgttttgttcagggtactttcaccacttctggtatggttctgtctgtaatgtgccagggattattatattgtttttggtttggatttggaatggtttggggtccacaacgatgatgcgtcagagctgttccaaggattggatgatttccattcccctgctgccaattcgactaggctcgccgtctccgctctgcccaactggcaccaagcagccaatggaacttgagcagccaatggatgatttccattcccctgctgccaattctccgaactgctttgacccttcaactcaatccgcatgtacccagtaaatgttcaatctgaatttggatcattgctagcaggattctttgcttgctcttctacttctgaaaattcgcaaaatggatagataattccagttaattttaatccattacagcctattgtggcagcaaacagcgactgggtgcggaagccggaagggagaggcgcttggttgacccagaacggacgacaagacaccgccgggggttcgctgcaaccgcacgcgtggtggccggtgtgggaaggagcccactgctcaagcagcgacgacttccgtaacttctcaggccaagggagggagggcagcaaagaaagcaagcaagaaagaagccgattccactggtggttaaggttttggattaaaggagagaggtgcagagaaaaaaaggcaatcttactcttaatctctgtgtccacatcacttccgatcatgccgtgatcgacagaagtacgggtgccatgtataagtgccccctccaactcaccaaagtaataaggagcagctgctgcaggttgcaactccctgggccaagcagtagcccagcaagttcagcaccaatggcagccatatgaaatataaggcaaagcagataaaaagcttaatttttttcaataaggtaaaggcaatgacagaaaagtgaggagggtcagaggtgtacagataaggatgagggctgaaaagaggagcaggaagggcatgatgaaatcagtgtttgctatttagcctccttcacaactaagatcatcctacataatagatttagacaacaaaaacttatggagtttgctgaaatgccctttcaggcatgctccatctgtgctacaagggtcagaatggacttgataggacatttgactatacaacatggaagttatttcaagatatccttttttaactatgctgtcgttgctgatcatttgcatttttacatttttcacattatactatagttgaagatacattcctgaggacgaatgggtgcagttatgggcttcctgcttgctgccagcagtcttttggtgcttttatattgctattaatttgtttgaaatttattatggtgatgactgggaaggtctttttgaggctattactggttatggccttggtggctctttggccgtgttggtggtggtcattgctgacaatgttggtgataatgttggagatattgttggaatgggatcatatctctttggctcatatgctgaatcgtcatgtgctgctcttgttgtggcctcgatctcgtcttttggaatcaaccatcaatttactccaatggtgtatccccttcttgtcagctctgttggtattatagcatgtctcataacaacgctgtttgcaactgatttcttcgagataaaggctgtgagtgaaatagagcctgctctcaagaaacaacttataatatccactgttgtgatgaccattggcattgcgctcatgttggcttggtcttccatacaccttcaccatttataactttggagcccagaagacagtgcaaagctggcaattgttcttgtgtgtggcggttggtctctgggctggcttagtcattggttttattactgagtactacacaagcaatgcctacagccctgtataagatgttgctgattcctgcagaactggagctgccactaatgtcatttttgggcttgctctgggttacaaatcagtcattatcccaatttttgctattgcgtttagtatcttccttagcttcagccttgctgccatgtatggtgttgttgtggctgctcttggaatgctgagtaccattgccacagaccttgctattgatgcctatggccctatcagtgataatgctggaagcttaagtctgtatgggtgcatcttatcatttatatgtatatctgaaagcttaagtatttttttaaatagaagatgtctggaaactttagtaacgacatgagtttcaggctttcagctatagcagtcttattcgcttttaagacagagaagatttttatttagagtttagaaagagtaggtgctatgggtgcatgttatcatttatgtggggaacatctctggtggaaattaatcagtaacgacatgagttaagacagagaagcttaagtattttttcagctatagcagtcttattcgcttttaagacagagaagcttaagtattttttgaatagaagatgtctggaaactttagtaacgacatgagttaatcagaagagatggaagggtagtttatcaacatgtatttggcacttcgccgaaaatgtcacttggactatcttgcaaactgaattttcagattggcttcttctgtctgaacattcagttcagtcttgcaggatttatttggtgtgc

SEQ ID NO: 21834 - DNA, 5016 bp, Zea Mays
ggttctttctccaccccgatgcccctccccctcccccgtgtgatcccctctccagatcgatgtctgccccggccgtaacccccgcggctcaccgcacgaaaccgccgcgagatcttggagctcagcctctgacgatggctacgactacctcgccaacctccgcgagctctgtccccctccctctcctccaccggcggcgggggatccttggccatgttcctcccgaggcgccggtccacgcgcttcggcctccgcgtggtcatcaagcctttctgatggctcggaacagaggtcagctatgcgatgtggcgtggcgaggttaccgcgggcgccgcggaggtggagggggaaggggaggacgagggcacgggcaagagagcgcatcgctgtggacggtctcgtgagagggaccttgggtgatccgggtgcttggtttcttggttctacggctttcgctgctgttggatttgccgagccggagccgacggagatgaccgtcgacgagctgaagctgcaggcaagggccagcggcggccacgacctaaggaccagttccccgtcggcatgcgcgtgctcgccgtcgacgacgacccgacctgcctcaaggtcctcgagaacctcttgttccgctgccagtaccatgtgacaacaatgggccaggcagccactgccctgagctgctgagggagaagaaggaccagtttgaccctgtgatcagcaacgtccacatgccggacatggacggcttcaagctcctcgagcttgtgggcctcgagatggaccttccggggattagtgaagcggcagaagaagagcttttacatacccttacaatgctgattttgatggagatgaaatgaatttgcatgtccctcggacggaggaagctcgcactgaagcgcttaattctcataggggttcaaaataatttatgtactcctaagaatggtgagatactggttgcttccgcgcaagacttcttgacctcatctttcttagatatgttttcgaattagattgggatggaaattcacatttgttatcacattttctgttagcaagcacaaccattgtgacattattttgcatgcactcagcctctcaccatggctatgagaatgaaattcaacttatagatataccaaaatgttatagaatcaatataattagatatgtcaagatgacaacacatatttcattcaactactatggatttttcattgataaaatacatgcttgatggctgcttgtctaaaatttatttgtttaatattctttgtttgtaagcccaagaatttgtaaaccaggaaataattccaatgaaagatcggtgcggggcggaattttcttggctttttgtagtggctaccgtagtacatcaacttgggcacttggcgacatgtccggtgcccagctccatcacatatcaatctgaaattaaacatgtgtctgagttctgaatgaaaaaattcagctaacagctaacactacgcactactaacagacctcaagcataatactgttgatttgatgtccttatatttatcttgaagcattgcattcatgcagtcatgtaaatagtactttatttatcttctgaccaacacactaataaccaacctttgcagtgatgggggatacttcaatgcaataatgagcttcccacaaaattacccaaacagcccaccatcagtcagatttacctctgaaatgtggcatccaaatggtcaactttttattagtgaaaatagtatttatttactccatctacagttatgttttctgacatcatgcataatatttgaggaaacgccagtctaacctgatgggcgggtttgtatctctattcttcatccacccagtgaagatccaaacggttatgagctcgcaagtgagcgatggacacctgtgcacacagtatggcttcgtatactttgtttacatatcttttccccattgtaatgttactcatctcccttttatgtgtatactttttagagagaaaattaccttgtagtctcattgtttcagtttatggtccaatttacaatggcttcactgtaaatgggaaaacaactcggtaggaatgcttttttgaattataaattatttctatttcatacgatgcttataggtatgtgatgagtcctccaatctgagaagtagagcatggtaaagcactccaagctgctctttcatcgggaaatttatagcttgtaggtactgatcacagcacattcaactccacacagattgtccatgtttctttcagtcaccatgatttatcactagggtactttcaccacttctggtatggttctgtctgtaatgtgccagggattattatattgtttttggtttggatttggaatggtttggggtccacaacgatgatgcgtcagagctgttccaaggattggatgatttccattcccctgctgccaattcgactaggctcgccgtctccgctctgcccaactggcaccaagcagccaatggaacttgagcagccaatggatgatttccattcccctgctgccaattctccgaactgctttgacccttcaactcaatccgcatgtacccagtaaatgttcaatctgaatttggatcattgctagcaggattctttgcttgctcttctacttctgaaaattcgcaaaatggatagataattccagttaattttaatccattacagcgactgggtgcggaagccggaagggagaggcgcttggttgacccagaacggacgacaagacaccgccgggggttcgctgcaaccgcacgcgtggtggccggtgtgggaaggagcccactgctcaagcagcgacgacttccgtaacttctcaggccaagttgtagggagggagggcagcaaagaaagcaagcaagaaagaagccgattccactggtggttaaggttttggattaaaggagagaggtgcagagaaaaaaaggcaatcttactcttaatctctgtgtccacatcacttccgatcatgccgtgatcgacagaagtacgggtgccatgtataagtgccccctccaactcaccaaagtaataaggagcagctgctgcaggttgcaactccctgggccaagcagtagcccagcaagttcagcaccaatggcagccatatgaaatataaggcaaagcagataaaaagcttaatttttttcaataaggtaaaggcaatgacagaaaagtgaggagggtcagaggtgtacagataaggatgagggctgaaaagaggagcaggaagggcatgatgaaatcagtgtttgctatttagcctccttcacaactaagatcatcctacataatagatttagacaacaaaaacttatggagtttgctgaaatgccctttcaggcatgctccatctgtgctacaagggtcagaatggacttgataggacatttgactatacaacatggaagttatttcaagatatccttttttaactatgctgtcgttgctgatcatttgcatttttacatttttcacattatactatagttgaagatacattcctgaggacgaatgggtgcagttatgggcttcctgcttgctgccagcagtcttttggtgcttttatattgctattaatttgtttgaaatttattatggtgatgactgggaaggtctttttgaggctattactggttatggccttggtggctctttggccgtgttggtggtggtatttataccaaggctgctgatgttggtgccgaccttgtggggaaggtagaaagaaacattcctgaggacgatccaagaaacccagctgtcattgctgacaatgttggtgataatgttggagatattgttggaatgggatcatatctctttggctcatatgctgaatcgtcatgtgctgctcttgttgtggcctcgatctcgtcttttggaatcaaccatcaatttactccaatggtgtatccccttcttgtcagctctgttggtattatagcatgtctcataacaacgctgtttgcaactgatttcttcgagataaaggctgtgagtgaaatagagcctgctctcaagaaacaacttataatatccactgttgtgatgaccattggcattgcgctcatgttggcttggtcttccatacaccttcaccatttataactttggagcccagaagacagtgcaaagctggcaattgttcttgtgtgtggcggttggtctctgggctggcttagtcattggttttattactgagtactacacaagcaatgcctacagccctgtataagatgttgctgattcctgcagaactggagctgccactaatgtcatttttgggcttgctctgggttacaaatcagtcattatcccaatttttgctattgcgtttagtatcttccttagcttcagccttgctgccatgtatggtgttgttgtggctgctcttggaatgctgagtaccattgccacagaccttgctattgatgcctatggccctatcagtgataatgctggaagcttaagtctgtatgggtgcatcttatcatttatatgtatatctgaaagcttaagtatttttttaaatagaagatgtctggaaactttagtaacgacatgagtttcaggctttcagctatagcagtcttattcgcttttaagacagagaagatttttatttagagtttagaaagagtaggtgctatgggtgcatgttatcatttatgtggggaacatctctggtggaaattaatcagtaacgacatgagttaagacagagaagcttaagtattttttcagctatagcagtcttattcgcttttaagacagagaagcttaagtattttttgaatagaagatgtctggaaactttagtaacgacatgagttaatcagaagagatggaagggtagtttatcaacatgtatttggcacttcgccgaaaatgtcacttggactatcttgcaaactgaattttcagattggcttcttctgtctgaacattcagttcagtcttgcaggatttatttggtgtgc

SEQ ID NO: 21835 - DNA, 5231 bp, Zea Mays
ggttctttctccaccccgatgcccctccccctcccccgtgtgatcccctctccagatcgatgtctgccccggccgtaacccccgcggctcaccgcacgaaaccgccgcgagatcttggagctcagcctctgacgatggctacgactacctcgccaacctccgcgagctctgtccccctccctctcctccaccggcggcgggggatccttggccatgttcctcccgaggcgccggtccacgcgcttcggcctccgcgtggtcatcaagcctttctgatggctcggaacagaggtcagctatgcgatgtggcgtggcgaggttaccgcgggcgccgcggaggtggagggggaaggggaggacgagggcacgggcaagagagcgcatcgctgtggacggtctcgtgagtgagtgctgctgcctgcccctctctctctgcctgcgttctcctggtgctgctctccctctcctcccctgcttcgacctcccgcctttccccaccgtttcttggatttctaggatccagacaaccgcccttgtgagcctgccttcctgcctactacctgcgtacgtacaggagggaccttgggtgatccgggtgcttggtttcttggttctacggctttcgctgctgttggatttgccgagccggagccgacggagatgaccgtcgacgagctgaagctgcaggcaagggccagcggcggccacgacctaaggaccagttccccgtcggcatgcgcgtgctcgccgtcgacgacgacccgacctgcctcaaggtcctcgagaacctcttgttccgctgccagtaccatgtgacaacaatgggccaggcagccactgccctgagctgctgagggagaagaaggaccagtttgaccctgtgatcagcaacgtccacatgccggacatggacggcttcaagctcctcgagcttgtgggcctcgagatggaccttccggggattagtgaagcggcagaagaagagcttttacatacccttacaatgctgattttgatggagatgaaatgaatttgcatgtccctcggacggaggaagctcgcactgaagcgcttaattctcataggggttcaaaataatttatgtactcctaagaatggtgagatactggttgcttccgcgcaagacttcttgacctcatctttcttagatatgttttcgaattagattgggatggaaattcacatttgttatcacattttctgttagcaagcacaaccattgtgacattattttgcatgcactcagcctctcaccatggctatgagaatgaaattcaacttatagatataccaaaatgttatagaatcaatataattagatatgtcaagatgacaacacatatttcattcaactactatggatttttcattgataaaatacatgcttgatggctgcttgtctaaaatttatttgtttaatattctttgtttgtaagcccaagaatttgtaaaccaggaaataattccaatgaaagatcggtgcggggcggaattttcttggctttttgtagtggctaccgtagtacatcaacttgggcacttggcgacatgtccggtgcccagctccatcacatatcaatctgaaattaaacatgtgtctgagttctgaatgaaaaaattcagctaacagctaacactacgcactactaacagacctcaagcataatactgttgatttgatgtccttatatttatcttgaagcattgcattcatgcagtcatgtaaatagtactttatttatcttctgaccaacacactaataaccaacctttgcagtgatgggggatacttcaatgcaataatgagcttcccacaaaattacccaaacagcccaccatcagtcagatttacctctgaaatgtggcatccaaatggtcaactttttattagtgaaaatagtatttatttactccatctacagttatgttttctgacatcatgcataatatttgaggaaacgccagtctaacctgatgggcgggtttgtatctctattcttcatccacccagtgaagatccaaacggttatgagctcgcaagtgagcgatggacacctgtgcacacagtatggcttcgtatactttgtttacatatcttttccccattgtaatgttactcatctcccttttatgtgtatactttttagagagaaaattaccttgtagtctcattgtttcagtttatggtccaatttacaatggcttcactgtaaatgggaaaacaactcggtaggaatgcttttttgaattataaattatttctatttcatacgatgcttataggtatgtgatgagtcctccaatctgagaagtagagcatggtaaagcactccaagctgctctttcatcgggaaatttataggtgacacttgtgtcatacattgaactatggagtcaaacaaattacatattatccttcaacatttttcaccagtgggaactgtagttattgcgtagaatagatggtatattaatcgttgagagccaatgtttacattaactgttatgcagaagacaatttatgttttattttatatctaactgtactttgttgcagcttgtaggtactgatcacagcacattcaactccacacagattgtccatgtttctttcagtcaccatgatttatcactagggtactttcaccacttctggtatggttctgtctgtaatgtgccagggattattatattgtttttggtttggatttggaatggtttggggtccacaacgatgatgcgtcagagctgttccaaggattggatgatttccattcccctgctgccaattcgactaggctcgccgtctccgctctgcccaactggcaccaagcagccaatggaacttgagcagccaatggatgatttccattcccctgctgccaattctccgaactgctttgacccttcaactcaatccgcatgtacccagtaaatgttcaatctgaatttggatcattgctagcaggattctttgcttgctcttctacttctgaaaattcgcaaaatggatagataattccagttaattttaatccattacagcaaacagcgactgggtgcggaagccggaagggagaggcgcttggttgacccagaacggacgacaagacaccgccgggggttcgctgcaaccgcacgcgtggtggccggtgtgggaaggagcccactgctcaagcagcgacgacttccgtaacttctcaggccaagttgtagggagggagggcagcaaagaaagcaagcaagaaagaagccgattccactggtggttaaggttttggattaaaggagagaggtgcagagaaaaaaaggcaatcttactcttaatctctgtgtccacatcacttccgatcatgccgtgatcgacagaagtacgggtgccatgtataagtgccccctccaactcaccaaagtaataaggagcagctgctgcaggttgcaactccctgggccaagcagtagcccagcaagttcagcaccaatggcagccatatgaaatataaggcaaagcagataaaaagcttaatttttttcaataaggtaaaggcaatgacagaaaagtgaggagggtcagaggtgtacagataaggatgagggctgaaaagaggagcaggaagggcatgatgaaatcagtgtttgctatttagcctccttcacaactaagatcatcctacataatagatttagacaacaaaaacttatggagtttgctgaaatgccctttcaggcatgctccatctgtgctacaaggttatgggcttcctgcttgctgccagcagtcttttggtgcttttatattgctattaatttgtttgaaatttattatggtgatgactgggaaggtctttttgaggctattactggttatggccttggtggctctttggccgtgttggtggtggtatttataccaaggctgctgatgttggtgccgaccttgtggggaaggtagaaagaaacattcctgaggacgatccaagaaacccagctgtcattgctgacaatgttggtgataatgttggagatattgttggaatgggatcatatctctttggctcatatgctgaatcgtcatgtgctgctcttgttgtggcctcgatctcgtcttttggaatcaaccatcaatttactccaatggtgtatccccttcttgtcagctctgttggtattatagcatgtctcataacaacgctgtttgcaactgatttcttcgagataaaggctgtgagtgaaatagagcctgctctcaagaaacaacttataatatccactgttgtgatgaccattggcattgcgctcatgttggcttggtcttccatacaccttcaccatttataactttggagcccagaagacagtgcaaagctggcaattgttcttgtgtgtggcggttggtctctgggctggcttagtcattggttttattactgagtactacacaagcaatgcctacagccctgtataagatgttgctgattcctgcagaactggagctgccactaatgtcatttttgggcttgctctgggttacaaatcagtcattatcccaatttttgctattgcgtttagtatcttccttagcttcagccttgctgccatgtatggtgttgttgtggctgctcttggaatgctgagtaccattgccacagaccttgctattgatgcctatggccctatcagtgataatgctggaagcttaagtctgtatgggtgcatcttatcatttatatgtatatctgaaagcttaagtatttttttaaatagaagatgtctggaaactttagtaacgacatgagtttcaggctttcagctatagcagtcttattcgcttttaagacagagaagatttttatttagagtttagaaagagtaggtgctatgggtgcatgttatcatttatgtggggaacatctctggtggaaattaatcagtaacgacatgagttaagacagagaagcttaagtattttttcagctatagcagtcttattcgcttttaagacagagaagcttaagtattttttgaatagaagatgtctggaaactttagtaacgacatgagttaatcagaagagatggaagggtagtttatcaacatgtatttggcacttcgccgaaaatgtcacttggactatcttgcaaactgaattttcagattggcttcttctgtctgaacattcagttcagtcttgcaggatttatttggtgtgc

SEQ ID NO: 21836 - DNA, 4189 bp, Zea Mays
ggttctttctccaccccgatgcccctccccctcccccgtgtgatcccctctccagatcgatgtctgccccggccgtaacccccgcggctcaccgcacgaaaccgccgcgagatcttggagctcagcctctgacgatggctacgactacctcgccaacctccgcgagctctgtccccctccctctcctccaccggcggcgggggatccttggccatgttcctcccgaggcgccggtccacgcgcttcggcctccgcgtggtcatcaagcctttctgatggctcggaacagaggtcagctatgcgatgtggcgtggcgaggttaccgcgggcgccgcggaggtggagggggaaggggaggacgagggcacgggcaagagagcgcatcgctgtggacggtctcgtgagagggaccttgggtgatccgggtgcttggtttcttggttctacggctttcgctgctgttggatttgccgagccggagccgacggagatgaccgtcgacgagctgaagctgcaggcaagggccagcggcggccacgacctaaggaccagttccccgtcggcatgcgcgtgctcgccgtcgacgacgacccgacctgcctcaaggtcctcgagaacctcttgttccgctgccagtaccatgtgacaacaatgggccaggcagccactgccctgagctgctgagggagaagaaggaccagtttgaccctgtgatcagcaacgtccacatgccggacatggacggcttcaagctcctcgagcttgtgggcctcgagatggaccttccggggattaacagctgaaaacctcgcccgatttgtaaagaagttttcttgttcaatgcggcattgaatttgggaggaatgacaagtctcatgaaaacttctgtatgccctacacgtgaccactaaaagaaagagttagacaggacaaaaggctgcagaagaagagcttttacatacccttacaatgctgattttgatggagatgaaatgaatttgcatgtccctcggacggaggaagctcgcactgaagcgcttaattctcataggggttcaaaataatttatgtactcctaagaatgtgatgggggatacttcaatgcaataatgagcttcccacaaaattacccaaacagcccaccatcagtcagatttacctctgaaatgtggcatccaaatgtctaacctgatgggcgggtttgtatctctattcttcatccacccagtgaagatccaaacggttatgagctcgcaagtgagcgatggacacctgtgcacacacttgtaggtactgatcacagcacattcaactccacacagattgtccatgtttctttcagtcaccatgatttatcactaggtcattgtgtttgtggccaacgagtattgttctaacagttatgttcccatagctagctagattcattgttgtgttttgttcagggtactttcaccacttctggtatggttctgtctgtaatgtgccagggattattatattgtttttggtttggatttggaatggtttggggtccacaacgatgatgcgtcagagctgttccaaggattggatgatttccattcccctgctgccaattcgactaggctcgccgtctccgctctgcccaactggcaccaagcagccaatggaacttgagcagccaatggatgatttccattcccctgctgccaattctccgaactgctttgacccttcaactcaatccgcatgtacccagtaaatgttcaatctgaatttggatcattgctagcaggattctttgcttgctcttctacttctgaaaattcgcaaaatggatagataattccagttaattttaatccattacagcctattgtggcagcaaacagcgactgggtgcggaagccggaagggagaggcgcttggttgacccagaacggacgacaagacaccgccgggggttcgctgcaaccgcacgcgtggtggccggtgtgggaaggagcccactgctcaagcagcgacgacttccgtaacttctcaggccaagttgtagggagggagggcagcaaagaaagcaagcaagaaagaagccgattccactggtggttaaggttttggattaaaggagagaggtgcagagaaaaaaaggcaatcttactcttaatctctgtgtccacatcacttccgatcatgccgtgatcgacagaagtacgggtgccatgtataagtgccccctccaactcaccaaagtaataaggagcagctgctgcaggttgcaactccctgggccaagcagtagcccagcaagttcagcaccaatggcagccatatgaaatataaggcaaagcagataaaaagcttaatttttttcaataaggtaaaggcaatgacagaaaagtgaggagggtcagaggtgtacagataaggatgagggctgaaaagaggagcaggaagggcatgatgaaatcagtgtttgctatttagcctccttcacaactaagatcatcctacataatagatttagacaacaaaaacttatggagtttgctgaaatgccctttcaggcatgctccatctgtgctacaagggtcagaatggacttgataggacatttgactatacaacatggaagttatttcaagatatccttttttaactatgctgtcgttgctgatcatttgcatttttacatttttcacattatactatagttgaagatacattcctgaggacgaatgggtgcagttatgggcttcctgcttgctgccagcagtcttttggtgcttttatattgctattaatttgtttgaaatttattatggtgatgactgggaaggtctttttgaggctattactggttatggccttggtggctctttggccgtgttggtggtggtatttataccaaggctgctgatgttggtgccgaccttgtggggaaggtagaaagaaacattcctgaggacgatccaagaaacccagctgtcattgctgacaatgttggtgataatgttggagatattgttggaatgggatcatatctctttggctcatatgctgaatcgtcatgtgctgctcttgttgtggcctcgatctcgtcttttggaatcaaccatcaatttactccaatggtgtatccccttcttgtcagctctgttggtattatagcatgtctcataacaacgctgtttgcaactgatttcttcgagataaaggctgtgagtgaaatagagcctgctctcaagaaacaacttataatatccactgttgtgatgaccattggcattgcgctcatgttggcttggtcttccatacaccttcaccatttataactttggagcccagaagacagtgcaaagctggcaattgttcttgtgtgtggcggttggtctctgggctggcttagtcattggttttattactgagtactacacaagcaatgcctacagccctgtataagatgttgctgattcctgcagaactggagctgccactaatgtcatttttgggcttgctctgggttacaaatcagtcattatcccaatttttgctattgcgtttagtatcttccttagcttcagccttgctgccatgtatggtgttgttgtggctgctcttggaatgctgagtaccattgccacagaccttgctattgatgcctatggccctatcagtgataatgctggaagcttaagtctgtatgggtgcatcttatcatttatatgtatatctgaaagcttaagtatttttttaaatagaagatgtctggaaactttagtaacgacatgagtttcaggctttcagctatagcagtcttattcgcttttaagacagagaagatttttatttagagtttagaaagagtaggtgctatgggtgcatgttatcatttatgtggggaacatctctggtggaaattaatcagtaacgacatgagttaagacagagaagcttaagtattttttcagctatagcagtcttattcgcttttaagacagagaagcttaagtattttttgaatagaagatgtctggaaactttagtaacgacatgagttaatcagaagagatggaagggtagtttatcaacatgtatttggcacttcgccgaaaatgtcacttggactatcttgcaaactgaattttcagattggcttcttctgtctgaacattcagttcagtcttgcaggatttatttggtgtgc

SEQ ID NO: 21837 - DNA, 3032 bp, Zea Mays
ggttctttctccaccccgatgcccctccccctcccccgtgtgatcccctctccagatcgatgtctgccccggccgtaacccccgcggctcaccgcacgaaaccgccgcgagatcttggagctcagcctctgacgatggctacgactacctcgccaacctccgcgagctctgtccccctccctctcctccaccggcggcgggggatccttggccatgttcctcccgaggcgccggtccacgcgcttcggcctccgcgtggtcatcaagcctttctgatggctcggaacagaggtcagctatgcgatgtggcgtggcgaggttaccgcgggcgccgcggaggtggagggggaaggggaggacgagggcacgggcaagagagcgcatcgctgtggacggtctcgtgagtgagtgctgctgcctgcccctctctctctgcctgcgttctcctggtgctgctctccctctcctcccctgcttcgacctcccgcctttccccaccgtttcttggatttctaggatccagacaaccgcccttgtgagcctgccttcctgcctactacctgcgtacgtacaggagggaccttgggtgatccgggtgcttggtttcttggttctacggctttcgctgctgttggatttgccgagccggagccgacggagatgaccgtcgacgagctgaagctgcaggcaagggccagcggcggccacgacctaaggaccagttccccgtcggcatgcgcgtgctcgccgtcgacgacgacccgacctgcctcaaggtcctcgagaacctcttgttccgctgccagtaccatgtgacaacaatgggccaggcagccactgccctgagctgctgagggagaagaaggaccagtttgaccctgtgatcagcaacgtccacatgccggacatggacggcttcaagctcctcgagcttgtgggcctcgagatggaccttccggggattaggtactttcaccacttctggtatggttctgtctgtaatgtgccagggattattatattgtttttggtttggatttggaatggtttggggtccacaacgatgatgcgtcagagctgttccaaggattggatgatttccattcccctgctgccaattcgactaggctcgccgtctccgctctgcccaactggcaccaagcagccaatggaacttgagcagccaatggatgatttccattcccctgctgccaattctccgaactgctttgacccttcaactcaatccgcatgtacccagcctattgtggcagcaaacagcgactgggtgcggaagccggaagggagaggcgcttggttgacccagaacggacgacaagacaccgccgggggttcgctgcaaccgcacgcgtggtggccggtgtgggaaggagcccactgctcaagcagcgacgacttccgtaacttctcaggccaagggcatgatgaaatcagtgtttgctatttagcctccttcacaactaagatcatcctacataatagatttagacaacaaaaacttatggagtttgctgaaatgccctttcaggcatgctccatctgtgctacaaggttatgggcttcctgcttgctgccagcagtcttttggtgcttttatattgctattaatttgtttgaaatttattatggtgatgactgggaaggtctttttgaggctattactggttatggccttggtggctctttggccgtgttggtggtggtatttataccaaggctgctgatgttggtgccgaccttgtggggaaggtagaaagaaacattcctgaggacgatccaagaaacccagctgtcattgctgacaatgttggtgataatgttggagatattgttggaatgggatcatatctctttggctcatatgctgaatcgtcatgtgctgctcttgttgtggcctcgatctcgtcttttggaatcaaccatcaatttactccaatggtgtatccccttcttgtcagctctgttggtattatagcatgtctcataacaacgctgtttgcaactgatttcttcgagataaaggctgtgagtgaaatagagcctgctctcaagaaacaacttataatatccactgttgtgatgaccattggcattgcgctcatgttggcttggtcttccatacaccttcaccatttataactttggagcccagaagacagtgcaaagctggcaattgttcttgtgtgtggcggttggtctctgggctggcttagtcattggttttattactgagtactacacaagcaatgcctacagccctgtataagatgttgctgattcctgcagaactggagctgccactaatgtcatttttgggcttgctctgggttacaaatcagtcattatcccaatttttgctattgcgtttagtatcttccttagcttcagccttgctgccatgtatggtgttgttgtggctgctcttggaatgctgagtaccattgccacagaccttgctattgatgcctatggccctatcagtgataatgctggaagcttaagtctgtatgggtgcatcttatcatttatatgtatatctgaaagcttaagtatttttttaaatagaagatgtctggaaactttagtaacgacatgagtttcaggctttcagctatagcagtcttattcgcttttaagacagagaagatttttatttagagtttagaaagagtaggtgctatgggtgcatgttatcatttatgtggggaacatctctggtggaaattaatcagtaacgacatgagttaagacagagaagcttaagtattttttcagctatagcagtcttattcgcttttaagacagagaagcttaagtattttttgaatagaagatgtctggaaactttagtaacgacatgagttaatcagaagagatggaagggtagtttatcaacatgtatttggcacttcgccgaaaatgtcacttggactatcttgcaaactgaattttcagattggcttcttctgtctgaacattcagttcagtcttgcaggatttatttggtgtgc

SEQ ID NO: 21838 - DNA, 4297 bp, Zea Mays
ggttctttctccaccccgatgcccctccccctcccccgtgtgatcccctctccagatcgatgtctgccccggccgtaacccccgcggctcaccgcacgaaaccgccgcgagatcttggagctcagcctctgacgatggctacgactacctcgccaacctccgcgagctctgtccccctccctctcctccaccggcggcgggggatccttggccatgttcctcccgaggcgccggtccacgcgcttcggcctccgcgtggtcatcaagcctttctgatggctcggaacagaggtcagctatgcgatgtggcgtggcgaggttaccgcgggcgccgcggaggtggagggggaaggggaggacgagggcacgggcaagagagcgcatcgctgtggacggtctcgtgagagggaccttgggtgatccgggtgcttggtttcttggttctacggctttcgctgctgttggatttgccgagccggagccgacggagatgaccgtcgacgagctgaagctgcaggcaagggccagcggcggccacgacctaaggaccagttccccgtcggcatgcgcgtgctcgccgtcgacgacgacccgacctgcctcaaggtcctcgagaacctcttgttccgctgccagtaccatgtgacaacaatgggccaggcagccactgccctgagctgctgagggagaagaaggaccagtttgaccctgtgatcagcaacgtccacatgccggacatggacggcttcaagctcctcgagcttgtgggcctcgagatggaccttccggggattagtgaagcggcagaagaagagcttttacatacccttacaatgctgattttgatggagatgaaatgaatttgcatgtccctcggacggaggaagctcgcactgaagcgcttaattctcataggggttcaaaataatttatgtactcctaagaatgtgatgggggatacttcaatgcaataatgagcttcccacaaaattacccaaacagcccaccatcagtcagatttacctctgaaatgtggcatccaaatgtctaacctgatgggcgggtttgtatctctattcttcatccacccagtgaagatccaaacggttatgagctcgcaagtgagcgatggacacctgtgcacacagtatggcttcgtatactttgtttacatatcttttccccattgtaatgttactcatctcccttttatgtgtatactttttagagagaaaattaccttgtagtctcattgtttcagtttatggtccaatttacaatggcttcactgtaaatgggaaaacaactcggtaggaatgcttttttgaattataaattatttctatttcatacgatgcttataggtatgtgatgagtcctccaatctgagaagtagagcatggtaaagcactccaagctgctctttcatcgggaaatttataggtgacacttgtgtcatacattgaactatggagtcaaacaaattacatattatccttcaacatttttcaccagtgggaactgtagttattgcgtagaatagatggtatattaatcgttgagagccaatgtttacattaactgttatgcagaagacaatttatgttttattttatatctaactgtactttgttgcagcttgtaggtactgatcacagcacattcaactccacacagattgtccatgtttctttcagtcaccatgatttatcactaggtcattgtgtttgtggccaacgagtattgttctaacagttatgttcccatagctagctagattcattgttgtgttttgttcagggtactttcaccacttctggtatggttctgtctgtaatgtgccagggattattatattgtttttggtttggatttggaatggtttggggtccacaacgatgatgcgtcagagctgttccaaggattggatgatttccattcccctgctgccaattcgactaggctcgccgtctccgctctgcccaactggcaccaagcagccaatggaacttgagcagccaatggatgatttccattcccctgctgccaattctccgaactgctttgacccttcaactcaatccgcatgtacccagtaaatgttcaatctgaatttggatcattgctagcaggattctttgcttgctcttctacttctgaaaattcgcaaaatggatagataattccagttaattttaatccattacagcaaacagcgactgggtgcggaagccggaagggagaggcgcttggttgacccagaacggacgacaagacaccgccgggggttcgctgcaaccgcacgcgtggtggccggtgtgggaaggagcccactgctcaagcagcgacgacttccgtaacttctcaggccaagttgtagggagggagggcagcaaagaaagcaagcaagaaagaagccgattccactggtggttaaggttttggattaaaggagagaggtgcagagaaaaaaaggttgcaactccctgggccaagcagtagcccagcaagttcagcaccaatggcagccatatgaaatataaggcaaagcagataaaaagcttaatttttttcaataaggtaaaggcaatgacagaaaagtgaggagggtcagaggtgtacagataaggatgagggctgaaaagaggagcaggaaggcatgctccatctgtgctacaagggtcagaatggacttgataggacatttgactatacaacatggaagttatttcaagatatccttttttaactatgctgtcgttgctgatcatttgcatttttacatttttcacattatactatagttgaagatacattcctgaggacgaatgggtgcagttatgggcttcctgcttgctgccagcagtcttttggtgcttttatattgctattaatttgtttgaaatttattatggtgatgactgggaaggtctttttgaggctattactggttatggccttggtggctctttggccgtgttggtggtggtatttataccaaggctgctgatgttggtgccgaccttgtggggaaggtagaaagaaacattcctgaggacgatccaagaaacccagctgtcattgctgacaatgttggtgataatgttggagatattgttggaatgggatcatatctctttggctcatatgctgaatcgtcatgtgctgctcttgttgtggcctcgatctcgtcttttggaatcaaccatcaatttactccaatggtgtatccccttcttgtcagctctgttggtattatagcatgtctcataacaacgctgtttgcaactgatttcttcgagataaaggctgtgagtgaaatagagcctgctctcaagaaacaacttataatatccactgttgtgatgaccattggcattgcgctcatgttggcttggtcttccatacaccttcaccatttataactttggagcccagaagacagtgcaaagctggcaattgttcttgtgtgtggcggttggtctctgggctggcttagtcattggttttattactgagtactacacaagcaatgcctacagccctgtataagatgttgctgattcctgcagaactggagctgccactaatgtcatttttgggcttgctctgggttacaaatcagtcattatcccaatttttgctattgcgtttagtatcttccttagcttcagccttgctgccatgtatggtgttgttgtggctgctcttggaatgctgagtaccattgccacagaccttgctattgatgcctatggccctatcagtgataatgctggaagcttaagtctgtatgggtgcatcttatcatttatatgtatatctgaaagcttaagtatttttttaaatagaagatgtctggaaactttagtaacgacatgagtttcaggctttcagctatagcagtcttattcgcttttaagacagagaagatttttatttagagtttagaaagagtaggtgctatgggtgcatgttatcatttatgtggggaacatctctggtggaaattaatcagtaacgacatgagttaagacagagaagcttaagtattttttcagctatagcagtcttattcgcttttaagacagagaagcttaagtattttttgaatagaagatgtctggaaactttagtaacgacatgagttaatcagaagagatggaagggtagtttatcaacatgtatttggcacttcgccgaaaatgtcacttggactatcttgcaaactgaattttcagattggcttcttctgtctgaacattcagttcagtcttgcaggatttatttggtgtgc

SEQ ID NO: 21839 - DNA, 3526 bp, Zea Mays
ggttctttctccaccccgatgcccctccccctcccccgtgtgatcccctctccagatcgatgtctgccccggccgtaacccccgcggctcaccgcacgaaaccgccgcgagatcttggagctcagcctctgacgatggctacgactacctcgccaacctccgcgagctctgtccccctccctctcctccaccggcggcgggggatccttggccatgttcctcccgaggcgccggtccacgcgcttcggcctccgcgtggtcatcaaggtcctaccaccgcctcacctcctccttgccgccgtgcggttgagcgccgacgacgttcgggctccggcggttcctgcatggaccggaagagccatctcatactctttctctacagcctttctgatggctcggaacagagccggagccgacggagatgaccgtcgacgagctgaagctgcaggcaagggccagcggcggccacgacctaaggaccagttccccgtcggcatgcgcgtgctcgccgtcgacgacgacccgacctgcctcaaggtcctcgagaacctcttgttccgctgccagtaccatgtgacaacaatgggccaggcagccactgccctgagctgctgagggagaagaaggaccagtttgaccctgtgatcagcaacgtccacatgccggacatggacggcttcaagctcctcgagcttgtgggcctcgagatggaccttccggggattaacagctgaaaacctcgcccgatttgtaaagaagttttcttgttcaatgcggcattgaatttgggaggaatgacaagtctcatgaaaacttctgtatgccctacacgtgaccactaaaagaaagagttagacaggacaaaaggctgcagcggcagaagaagagcttttacatacccttacaatgctgattttgatggagatgaaatgaatttgcatgtccctcggacggaggaagctcgcactgaagcgcttaattctcataggggttcaaaataatttatgtactcctaagaatgtgatgggggatacttcaatgcaataatgagcttcccacaaaattacccaaacagcccaccatcagtcagatttacctctgaaatgtggcatccaaatgtctaacctgatgggcgggtttgtatctctattcttcatccacccagtgaagatccaaacggttatgagctcgcaagtgagcgatggacacctgtgcacacacttgtaggtactgatcacagcacattcaactccacacagattgtccatgtttctttcagtcaccatgatttatcactaggtcattgtgtttgtggccaacgagtattgttctaacagttatgttcccatagctagctagattcattgttgtgttttgttcagggtactttcaccacttctggtatggttctgtctgtaatgtgccagggattattatattgtttttggtttggatttggaatggtttggggtccacaacgatgatgcgtcagagctgttccaaggattggatgatttccattcccctgctgccaattcgactaggctcgccgtctccgctctgcccaactggcaccaagcagccaatggaacttgagcagccaatggatgatttccattcccctgctgccaattctccgaactgctttgacccttcaactcaatccgcatgtacccaggattctttgcttgctcttctacttctgaaaattcgcaaaatggatagataattccagttaattttaatccattacagcctattgtggcagcaaacagcgactgggtgcggaagccggaagggagaggcgcttggttgacccagaacggacgacaagacaccgccgggggttcgctgcaaccgcacgcgtggtggccggtgtgggaaggagcccactgctcaagcagcgacgacttccgtaacttctcaggccaagggcatgatgaaatcagtgtttgctatttagcctccttcacaactaagatcatcctacataatagatttagacaacaaaaacttatggagtttgctgaaatgccctttcaggcatgctccatctgtgctacaaggttatgggcttcctgcttgctgccagcagtcttttggtgcttttatattgctattaatttgtttgaaatttattatggtgatgactgggaaggtctttttgaggctattactggttatggccttggtggctctttggccgtgttggtggtggtatttataccaaggctgctgatgttggtgccgaccttgtggggaaggtagaaagaaacattcctgaggacgatccaagaaacccagctgtcattgctgacaatgttggtgataatgttggagatattgttggaatgggatcatatctctttggctcatatgctgaatcgtcatgtgctgctcttgttgtggcctcgatctcgtcttttggaatcaaccatcaatttactccaatggtgtatccccttcttgtcagctctgttggtattatagcatgtctcataacaacgctgtttgcaactgatttcttcgagataaaggctgtgagtgaaatagagcctgctctcaagaaacaacttataatatccactgttgtgatgaccattggcattgcgctcatgttggcttggtcttccatacaccttcaccatttataactttggagcccagaagacagtgcaaagctggcaattgttcttgtgtgtggcggttggtctctgggctggcttagtcattggttttattactgagtactacacaagcaatgcctacagccctgtataagatgttgctgattcctgcagaactggagctgccactaatgtcatttttgggcttgctctgggttacaaatcagtcattatcccaatttttgctattgcgtttagtatcttccttagcttcagccttgctgccatgtatggtgttgttgtggctgctcttggaatgctgagtaccattgccacagaccttgctattgatgcctatggccctatcagtgataatgctggaagcttaagtctgtatgggtgcatcttatcatttatatgtatatctgaaagcttaagtatttttttaaatagaagatgtctggaaactttagtaacgacatgagtttcaggctttcagctatagcagtcttattcgcttttaagacagagaagatttttatttagagtttagaaagagtaggtgctatgggtgcatgttatcatttatgtggggaacatctctggtggaaattaatcagtaacgacatgagttaagacagagaagcttaagtattttttcagctatagcagtcttattcgcttttaagacagagaagcttaagtattttttgaatagaagatgtctggaaactttagtaacgacatgagttaatcagaagagatggaagggtagtttatcaacatgtatttggcacttcgccgaaaatgtcacttggactatcttgcaaactgaattttcagattggcttcttctgtctgaacattcagttcagtcttgcaggatttatttggtgtgc

SEQ ID NO: 21840 - DNA, 3891 bp, Zea Mays
ggttctttctccaccccgatgcccctccccctcccccgtgtgatcccctctccagatcgatgtctgccccggccgtaacccccgcggctcaccgcacgaaaccgccgcgagatcttggagctcagcctctgacgatggctacgactacctcgccaacctccgcgagctctgtccccctccctctcctccaccggcggcgggggatccttggccatgttcctcccgaggcgccggtccacgcgcttcggcctccgcgtggtcatcaagcctttctgatggctcggaacagaggtcagctatgcgatgtggcgtggcgaggttaccgcgggcgccgcggaggtggagggggaaggggaggacgagggcacgggcaagagagcgcatcgctgtggacggtctcgtgagagggaccttgggtgatccgggtgcttggtttcttggttctacggctttcgctgctgttggatttgccgagccggagccgacggagatgaccgtcgacgagctgaagctgcaggcaagggccagcggcggccacgacctaaggaccagttccccgtcggcatgcgcgtgctcgccgtcgacgacgacccgacctgcctcaaggtcctcgagaacctcttgttccgctgccagtaccatgtgacaacaatgggccaggcagccactgccctgagctgctgagggagaagaaggaccagtttgaccctgtgatcagcaacgtccacatgccggacatggacggcttcaagctcctcgagcttgtgggcctcgagatggaccttccggggattaacagctgaaaacctcgcccgatttgtaaagaagttttcttgttcaatgcggcattgaatttgggaggaatgacaagtctcatgaaaacttctgtatgccctacacgtgaccactaaaagaaagagttagacaggacaaaaggctgcagcggcagaagaagagcttttacatacccttacaatgctgattttgatggagatgaaatgaatttgcatgtccctcggacggaggaagctcgcactgaagcgcttaattctcataggggttcaaaataatttatgtactcctaagaatgtgatgggggatacttcaatgcaataatgagcttcccacaaaattacccaaacagcccaccatcagtcagatttacctctgaaatgtggcatccaaatggtcaactttttattagtgaaaatagtatttatttactccatctacagttatgttttctgacatcatgcataatatttgaggaaacgccagtctaacctgatgggcgggtttgtatctctattcttcatccacccagtgaagatccaaacggttatgagctcgcaagtgagcgatggacacctgtgcacacacttgtaggtactgatcacagcacattcaactccacacagattgtccatgtttctttcagtcaccatgatttatcactaggtcattgtgtttgtggccaacgagtattgttctaacagttatgttcccatagctagctagattcattgttgtgttttgttcagggtactttcaccacttctggtatggttctgtctgtaatgtgccagggattattatattgtttttggtttggatttggaatggtttggggtccacaacgatgatgcgtcagagctgttccaaggattggatgatttccattcccctgctgccaattcgactaggctcgccgtctccgctctgcccaactggcaccaagcagccaatggaacttgagcagccaatggatgatttccattcccctgctgccaattctccgaactgctttgacccttcaactcaatccgcatgtacccagcctattgtggcagcaaacagcgactgggtgcggaagccggaagggagaggcgcttggttgacccagaacggacgacaagacaccgccgggggttcgctgcaaccgcacgcgtggtggccggtgtgggaaggagcccactgctcaagcagcgacgacttccgtaacttctcaggccaagttgtagggagggagggcagcaaagaaagcaagcaagaaagaagccgattccactggtggttaaggttttggattaaaggagagaggtgcagagaaaaaaaggttgcaactccctgggccaagcagtagcccagcaagttcagcaccaatggcagccatatgaaatataaggcaaagcagataaaaagcttaatttttttcaataaggtaaaggcaatgacagaaaagtgaggagggtcagaggtgtacagataaggatgagggctgaaaagaggagcaggaagggcatgatgaaatcagtgtttgctatttagcctccttcacaactaagatcatcctacataatagatttagacaacaaaaacttatggagtttgctgaaatgccctttcaggcatgctccatctgtgctacaaggttatgggcttcctgcttgctgccagcagtcttttggtgcttttatattgctattaatttgtttgaaatttattatggtgatgactgggaaggtctttttgaggctattactggttatggccttggtggctctttggccgtgttggtggtggtatttataccaaggctgctgatgttggtgccgaccttgtggggaaggtagaaagaaacattcctgaggacgatccaagaaacccagctgtcattgctgacaatgttggtgataatgttggagatattgttggaatgggatcatatctctttggctcatatgctgaatcgtcatgtgctgctcttgttgtggcctcgatctcgtcttttggaatcaaccatcaatttactccaatggtgtatccccttcttgtcagctctgttggtattatagcatgtctcataacaacgctgtttgcaactgatttcttcgagataaaggctgtgagtgaaatagagcctgctctcaagaaacaacttataatatccactgttgtgatgaccattggcattgcgctcatgttggcttggtcttccatacaccttcaccatttataactttggagcccagaagacagtgcaaagctggcaattgttcttgtgtgtggcggttggtctctgggctggcttagtcattggttttattactgagtactacacaagcaatgcctacagccctgtataagatgttgctgattcctgcagaactggagctgccactaatgtcatttttgggcttgctctgggttacaaatcagtcattatcccaatttttgctattgcgtttagtatcttccttagcttcagccttgctgccatgtatggtgttgttgtggctgctcttggaatgctgagtaccattgccacagaccttgctattgatgcctatggccctatcagtgataatgctggaagcttaagtctgtatgggtgcatcttatcatttatatgtatatctgaaagcttaagtatttttttaaatagaagatgtctggaaactttagtaacgacatgagtttcaggctttcagctatagcagtcttattcgcttttaagacagagaagatttttatttagagtttagaaagagtaggtgctatgggtgcatgttatcatttatgtggggaacatctctggtggaaattaatcagtaacgacatgagttaagacagagaagcttaagtattttttcagctatagcagtcttattcgcttttaagacagagaagcttaagtattttttgaatagaagatgtctggaaactttagtaacgacatgagttaatcagaagagatggaagggtagtttatcaacatgtatttggcacttcgccgaaaatgtcacttggactatcttgcaaactgaattttcagattggcttcttctgtctgaacattcagttcagtcttgcaggatttatttggtgtgc
